United States Patent Application Publication US 2006/0134663 A1 - sequence listing, part 14

SEQ ID NO: 24946 - DNA, 14093 bp, Homo Sapiens
ggcgcggtacaggagcagcactgccggcgggggcgggtgccagggacttggaggtggaggggacgcggcggtactctggcgtcttccgacttcgactccttaccttaaaagatgctggagtcatatgtaactccaattttaatgagctatgtgaatcgctacatcaagaacttaaagccgtcggatctacagctttcactatggggtggagacgtggtactcagcaagctcgagttaaagttggatgtgctggaacaggaactgaaattaccattcacttttttaagtggacatattcatgaattgaggattcatgtaccatggacaaaactgggttcagaaccagtggtaattaccatcaatactatggaatgcattttgaaacttaaggatgggatacaggatgaccatgaaagctgtggttctaattctaccaaccgtagtactgctgagagcacaaaatcatcaatcaaaccgcggagaatgcagcaggctgctcctacagatcctgacttaccaccaggttatgtgcagagtctgattagacgagttgtaaataatgtaaacattgtgataaataatctcatactaaaatatgttgaagatgatatcgtcctttccgtcaatatcacttctgcagaatgttatacagtaggtgaattatgggatcgtgcattcatggatatttctgcaactgatttggtgctgagaaaggttatcaatttttctgactgtacagtttgtcttgataaacggaatgccagtggtaaaatagaattttaccaggatcctttattatacaaatgttccttcagaactcgtcttcattttacatatgaaaacctaaattccaagatgccatctgttattaaaattcatactttagtggaaagtttgaaactttctatcacagatcaacaactgcctatgtttattcgtataatgcaacttggaattgctctttactatggagaaataggcaattttaaagaaggcgaaatagaggaccttacttgtcataataaagatatgctaggaaacattacaggttctgaagatgaaacaagaatagatatgcaatatcctgctcagcataaaggtcaagagttatattcacagcaagatgaggagcagccacagggatgggtgtcatgggcctggtcctttgtgcctgcaattgtgagttatgacgatggcgaggaagactttgttgggaacgatcctgcatcaaccatgcatcaacaaaaagcacagactttgaaggatcctattgtttctataggattttattgcacaaaggcaacggtgactttcaaactcacagaaatgcaagttgagagtagttattacagtccacagaaagtaaaatctaaagaagtattgtgttgggaacaagaaggaactacagttgaggcccttatgatgggagaacctttctttgattgccagattgggtttgttggttgcagagccatgtgccttaaaggaattatgggtgttaaagattttgaagagaatatgaatagaagtgaaactgaagcctgtttcttcatttgtggtgacaatttgagtacgaaaggtttcacataccttacaaattcattgtttgattaccgaagcccagaaaataatggtactcgcgcagaatttatcttggattcaactcaccataaggagacatacactgagatagctggaatgcaacggtttggggctttttatatggattacctgtatacagtggagaacactagtggcaaaggttccacaaatcaacaagacttttcttcagggaaaagtgaagatttgggaacagttcaggagaagtccaccaaaagccttgttataggtcctcttgattttcgtttggatagcagtgcggtgcataggattttgaaaatgattgtgtgtgccttggaacatgaatatgaaccatatagcaggctaaaatcagatattaagaatgaaaatgaaacaatactgaatcctgaagaggtggctcttctggaggaatatattcctactcgacatacaagtgttactctcctcaaatgtacctgcacaatttccatggctgaattcaacttgctggaccatttactacctgtcattatgggagaaaagaactcaagtaacttcatgaatactacaaacttccagtctcttcggcctttgccatccattcgaatattggtggataaaattaatctggaacattcagtgccaatgtatgctgaacagttggtgcatgtggtcagcagccttactcaaccttctgataacctgcttcattattgttatgtacactgctatcttaagatatttggtttccaggcaggactgacgtctttggattgcagtggatcttactgcttacctgtaccagttattccctctttcagcactgctctttatgggaaacttctgaaactccccacatgctggaccaaaagatctcagattgctataactgaaggtatatttgaacttccaaatctcacaattcaagctacaagagcacagacacttctcttgcaagcaatatatcaaagttggtctcatcttggaaatgtcagctcttccgcagtgattgaagctttgataaatgaaatcttcctaagtataggtgtgaaatctaagaatcccctgccaactcttgagggctcaatccagaatgttgaattgaagtactgcagcacatcattggtcaaatgtgcctctgggaccatgggatcaataaaaatttgtgccaaagccccagttgatagtggaaaagagaagttgattcccttgcttcagggtccttctgacactaaagaccttcatagcaccaagtggctcaatgagagtagaaagccagagtctctcttagctccagatttgatggccttcacaatccaagttccacaatatattgactactgccacaattccggtgctgtacttctttgcagtatacaaggactagcagttaatattgacccaatcttatatacgtggctcatctatcagcctcagaaacgaacaagtagacatatgcaacagcagcctgtggtagctgttcctcttgttatgccagtttgtagaaggaaagaggatgaggtgtctattggaagtgcccccttggcaaagcagcaatcatatcaggcctctgaatatgccagcagccctgtaaaaacaaaaacggtaacagaatcccgcccattgtcagttcctgttaaagccatgttgaatatatctgaaagctgtagaagtcctgaagaaagaatgaaggaatttattggaattgtttggaatgcagtgaagcatctcacactacagcttgaagtacaatcttgttgtgtgtttattccaaatgatagcctgccttccccaagtacaattgtatctggtgacattcctggaacagtaagaagttggtaccatggacaaaccagcatgccgggaacacttgtcctctgtttgcctcaaataaagattattagtgctgggcacaagtatatggaacctctgcaggagattccatttgttatcccacgacccatccttgaagaaggtgatgcttttccttggacgatcagcttgcataatttcagcatatatacccttcttggaaaacaagtgacactttgcctagtggaacctatgggttgcacctccactctagctgtcacgtctcaaaaactgcttgctacgggacctgatacacgacattcatttgttgtctgtctccatgttgacctagagtcactagagataaaatgctctaatccccaggtccagctcttctatgaactaactgatatcatgaataaggtctggaacaagattcagaagagaggcaatctcaacctatctccaacctctccagagaccatggcagggcctgttcctacttctccagttagaagcagtataggcacagctcctccagataccagcacatgcagcccatctgctgacattgggactactactgagggagattctatacaagcaggtgaggaatcaccattctcagattctgtgaccttggaacaaactacaagtaatattggaggaaccagtggacgtgttagtttatggatgcagtgggtgcttcccaaaattactataaagctctttgctccagatcctgaaaataaaggcacagaggtttgtatggtcagtgaactagaagatctcagtgcttccatagatgtccaggatgtatataccaaagtgaaatgtaaaatagagagtttcaatattgatcactatagaagcagccatggggaagagtgttggtcattggggcaatgtggaggtgtcatcctttcctgtactgacaagctgaacagacgcaccttgttggttcgaccaatcagcaagcaggaccctttcagaaattgctctggcttctttccttcgacaactacaaaacttctagatggcactcatcagcagcatggattcctctctctgacatacacaaaagctgtaacaaaaaatgtccgccacaagttaacatcaagaaatgagcgaagaagttttcataagttatctgaaggcctaatggatggttctcctcattttcttcatgaaattcttctttcagcacaagcttttgatattgttctttattttcctttacttaatgccattgcaagtatatttcaagcaaaactaccaaagacccaaaaagagaaaagaaaatctcctggtcagcccatgaggacccatacactgacatcccgcaatttacctttgatttatgtcaacacaagtgtaatcagaatttttattccaaaaacagaagaaatgcagccaactgttgaagctaatcaggcagcaaaagaagacactgtggttttgaagattggctctgttgccatggctccccaggctgacaatccccttggcagatctgtccttaggaaagatatttaccagagagccttgaacttaggaattcttcgagatcctggatcagaaatcgaagacagacaataccaaatagatctgcagtccatcaatattggtactgcacagtggcatcaactaaaaccagagaaggaaagtgtctcaggaggggtggtaacagagactgaaaggaattctcaaaatccagcccttgagtggaatatggacagcagcatacggcggcatcaagaaaggagagcaattttgacccccgttttgacagatttttctgtccgaataactggagcacctgctgtcattttcaccaaagtagtttctccagaaaatttgcatactgaggagattttagtgtgtggccattccttagaagtgaatataaccacaaacctggacttcttcctaagtgtggctcaagttcaactcttacatcagttaatagtagcaaatatgactggactggaaccatcaaacaaggctgcagagatctctaaacaagaacagaaaaaagtggatatatttgatggaggcatggctgaaacctcatctcgctacagtggtgctcaggatagtggaattggcagtgacagtgttaaaatcagaatagtgcaaatagagcagcacagtggtgccagtcagcatcgcattgcccgtccctcacgccagtcatcaattgtaaaaaatctaaattttattccctttgacatatttattactgcaagtagaatctcactaatgacctattcctgtatggccttatccaaatcgaaatcacaagaacagaagaataatgaaaaaacagacaagagttcattaaatctcccagaagttgattcagatgttgctaagcccaaccaggcatgtatttccacggtgacagcagaagatctcttaaggagcagcatttcttttccttcagggaaaaaaataggggtcctctctcttgaaagtcttcatgcatccacaaggtcatctgctagacaagcacttggtataactattgttcggcagcctggtcgaagaggaactggtgacttacagctagagccttttctgtactttattgtgtcccagccttccttgcttctgagttgtcaccacagaaagcagcgagtggaagtatccatttttgatgctgtgcttaaaggggtggcctctgattacaaatgtatagatcctgggaagactctgcctgaagcccttgattattgcactgtttggctacagacagtgcctggagaaatagacagcaaaagtggtattccaccttcctttataacactacagattaaagactttctgaatggaccagcggatgtcaatttggatatatcaaagcctttgaaagcaaacctgagtttcaccaaactggatcagataaacctttttttaaagaagataaaaaatgcacacagtttggcacatagtgaagagacttcagccatgtccaacaccatggtgaataaggatgatcttccagtctccaaatattaccgtggaaagttgtctaaacccaaaattcatggtgatggagtgcaaaagatttcagctcaagaaaacatgtggagagctgtttcctgctttcaaaaaatttctgttcaaactactcagattgtgatctccatggaaactgtaccccataccagcaaaccatgcctgttagcatctctctcaaacctcaatggaagccttagtgtcaaggcaacacaaaaagtacctggcataattcttgggtcatcatttctactcagtataaacgattttctccttaaaacaagtctcaaagaaagaagccgcattctgataggaccatgttgtgctactgccaatctggaagctaagtggtgtaaacacagcgggaatccaggcccagaacaatccataccaaaaatatccattgacttaagaggaggtctactacaggtcttctggggtcaagaacatttgaattgtttagttcttctacatgaattactcaatggataccttaatgaggagggaaattttgaagtacaagtttctgaaccagtgcctcaaatgtcatctcctgtggaaaagaatcagacatttaaaagtgaacaaagttcagatgacctacggacaggtctatttcagtatgtacaggatgctgaatctttgaaattgcctggggtctatgaagtcttattttataatgaaactgaagattgcccagggatgatgttatggagatatccagaacctagagtactcacccttgtacgaataactcctgtaccttttaacaccacagaggatccagatattagcacagcagaccttggtgatgtgctacaggttccttgtagcttggaatactgggatgaactccagaaggtttttgttgcatttagagaatttaatctgtctgaaagcaaagtttgtgaactgcagttgccggatatcaatctcgtgaatgaccagaagaaattagtatcttcagatctttggagaattgtcttgaacagcagtcaaaatggagctgatgaccaaagctctgcaagtgagtctggttctcaaagcacttgtgatccacttgtgactccaacagccctggctgcctgtaccagagttgactcctgctttaccccatggtttgtcccatccctttgcgtttctttccagtttgctcacctggaattccatctttgtcatcaccttgaccaactaggcacagctgcaccacagtacctacagccatttgtttccgacagaaatatgccatctgaactagaatacatgattgtttccttcagagaaccacacatgtatcttcgacagtggaataatggttctgtctgtcaggagatccagttcttagctcaagcagactgtaaacttctagagtgcagaaatgtcactatgcaaagtgtggtgaaacccttcagcatcttcgggcagatggcagtttccagcgatgtagtggaaaagctgcttgactgcaccgtgatagttgattctgtatttgtaaaccttggacagcatgtagtccattcactaaacactgcaatacaagcttggcaacagaacaaatgccctgaggtagaggagttggtcttcagccattttgtgatctgtaatgacacacaggagacactgcggtttggccaggtggatactgatgaaaatattctgctggcgagtctccacagtcaccagtacagctggcgctctcacaaatccccacagctgttacacatctgtattgaaggttggggcaactggcgttggtcagagcctttcagtgtggaccatgccgggacttttattagaacaattcagtacaggggtcgaactgcttctctcatcatcaaggttcagcaactcaatggagtacaaaaacagattatcatctgtggaagacagatcatctgtagttacttgtctcaaagcatagaactaaaagtcgttcagcattacattggtcaagatggacaagctgtagttcgggaacattttgactgcctcacagccaaacagaaattgccttcgtacatactagaaaacaatgaactgacggagctgtgtgtgaaggccaaaggagatgaagactggtcaagagatgtgtgcctggaatccaaagcccctgagtacagcattgtcattcaggtgccatcttcaaacagttccattatttatgtctggtgcacagttttgactttagaacccaactctcaagtgcaacaacgaatgattgtgttcagccctctttttatcatgaggagtcatcttccagaccccattatcatacatttggagaaaaggagtctgggattgagtgaaacacaaattattccaggaaaagggcaggaaaaaccactgcaaaacatagaacctgaccttgtacatcacctgacattccaagcaagagaagaatatgatccttcagattgtgcagttcccatctcaacatccctcattaagcaaatagccactaaggtacaccctggaggcacagttaatcagatccttgacgaattctatgggccagaaaagtcgcttcaacccatatggccctataataagaaggattctgacaggaatgaacagctaagtcagtgggatagcccaatgcgagtgaagctgtcaatctggaagccatatgttagaactttgttgatagaacttctgccctgggccctgcttatcaatgaatccaaatgggacctctggctatttgaaggagagaaaattgttctacaggttcctgctggcaaaattattattcctcctaattttcaggaagcttttcaaattggaatatactgggcaaatacaaacactgtgcacaagtcagtagcaattaaactggtccataacctgacatctccaaagtggaaagatggaggtaatggtgaagttgtgacactggatgaagaagcgtttgttgatactgaaataagacttggtgcttttccaggacatcagaagttatgtcagttctgcatttcctccatggtacagcaaggtatacaaattattcagattgaagacaagactacaataatcaataatacaccatatcaaatattttataaaccacagctatctgtctgcaatccccattctggaaaggagtattttcgtgttccagacagtgctacttttagcatttgcccaggtggagagcagcctgctatgaaatccagctcccttccttgctgggacttgatgcctgacatcagtcagtcagtactggatgcatccctgcttcagaaacagatcatgctgggcttttcccctgccccaggtgctgacagctcacagtgctggagcctgccagctatagttagaccagagtttcccagacagagtgtggcagtacccctcgggaatttccgggaaaatggattctgtaccagggctatagtgctgacatatcaagaacacctcggagtgacttatttaaccctctcagaagaccctagtcctcgagtaattatccacaatagatgtccagtaaaaatgcttataaaggaaaacattaaagatattccaaagtttgaggtttattgcaaaaaaattccctccgagtgctcaattcatcatgagctgtatcatcagatttccagttatccggactgcaagaccaaagacttacttccaagcctacttttgagagttgaacctctagatgaagtaacaactgagtggagtgatgccattgacatcaacagtcagggaacacaggttgtgttcctgactggctttggctatgtgtatgtggatgttgtacatcagtgtggcacagtcttcatcactgtggccccagaaggaaaagcaggacctattttaaccaataccaacagagcgccagagaagattgttacatttaaaatgttcatcactcagttaagcctggcagtgtttgatgacctcacccaccacaaagcatcagctgagcttctgagactcacactggacaacatttttctctgtgtggccccgggagctggtcccctccctggggaagagcctgtggctgcgttgtttgaactttactgtgtggagatctgctgtggggacctgcagctagacaaccagctttataacaagtccaatttccactttgctgtcttagtctgccagggagaaaaagcagaacccattcagtgttccaaaatgcagagtctcctcatatccaacaaagagttggaagaatacaaggaaaaatgttttatcaaactttgcatcaccttaaatgaaggcaagagcatcctctgtgatattaatgagttcagctttgaattaaaacctgctcggttatacgtggaagacacatttgtatactacatcaagactttgtttgacacctaccttcctaacagcaggttggctggtcactccacacacctctccgggggtaaacaggtgttgcccatgcaggtcacacagcacgccagggccttggtgaatcctgtgaagttacggaaactggtgatccagccagtaaatttgctcgtcagcatccacgcttccctcaagctgtacatagcctcagaccacactcctctctccttctcggtgtttgaaagaggacccatcttcaccactgcgaggcagcttgtgcacgccctggcaatgcactatgccgctggggccctttttagagcaggctgggtagttgggtctctggatattcttggcagccctgcaagcctggtgagaagcatcgggaacggggtcgccgacttcttcaggcttccgtatgaggggctgacccggggccctggagccttcgtgagtggcgtctccagagggaccacatcgtttgtaaagcacatctccaaaggtaccctcacatccatcaccaacctcgccacaagcctggcccggaacatggaccggctctcactggatgaggagcactacaaccggcaggaggagtggcggcggcagctccccgagagcctgggcgaggggcttcgacagggcctgtcccggctgggcatcagcctgcttggtgcaattgctggtatagttgatcagccgatgcagaacttccagaaaacatctgaggcacaggcttcagcaggacacaaggccaagggtgtcatctcgggtgtggggaaaggaatcatgggggtgttcacaaagcccatcggaggagctgctgagctggtgtcacagactggctatggtattttacatggagctggactttctcagcttcccaaacagcgccatcagccaagtgatctacatgctgaccaggctccaaacagccatgtcaaatatgtctggaaaatgcttcagtctctgggcagaccagaagtccacatggccctggacgtggttctggtgaggggctcaggccaggagcatgaagggtgcttgctgctgacatcagaagtgctcttcgtggtgagtgtcagtgaggacacacagcagcaggccttccccgtcacagaaatcgactgtgcacaggacagcaagcagaacaacttactcacagtgcagctcaagcagccaagagtggcctgtgatgtggaggtagatggagtccgagagagactgtcagagcaacagtacaacagactggtggactacatcacaaagacatcttgtcacctggcccccagctgttcttccatgcaaataccatgccctgtggtggctgcagaacctcccccctccactgttaaaacataccattacctggttgatccacattttgctcaggtcttccttagtaaatttaccatggtgaaaaataaagccctgaggaaagggtttccttgagtcccctctgaggtgtttattcctgcttgtgtgatttagtttttgggtttctttgagacagggtctcactgcattgcccttgctgacctcaaattctggggttcaagcaatcctcccacctcaacccacaagtagctacgactgcaagcacctgccaccataaagggctgcattttgccaccataaagggctgcatttttttaaaaagcctaggcagctctaacatcatctgatatggacacaaggccaacagtttccttatttacatccttacctctaaaagatacttcaaagtgacaaaaacgtgttccttccccacttagagacaatgattaacagggccctatatgttcttaccacatacagaggatgcatttatttttgctctatgacacttgcaaaaatctctactgtaattaatttgggtctattattaactctctgttccatcatagaatgtggccaggccttacaatggagagccagagttaaaacttcaagttgcatctgtttttgggctgagtcaccacctttgcctcatgctcctttgtctgcaaaggcctaggattctttctttaaatgaaatgcttaggactttgtggcttgttacatttgtcatttaactgcagtgctattctttgaaagctgctatgtgtattttctctgaagtctgcattttactaaaatttacaacagtctgatgattgattgattactgtccaggtacattttagaaaaagtgttcttcttccagtttgttttactaagcaaactttgagtaaatcctttgtcctatattgaatccagtcccaaagtgttcaggtgagtttctctagttccataaacaaaacatacatagtgggaactccctggtatgccatagagcacacaagaaccccaatattaatgctaacaattataccagtccattttgtttattctgtggaattgacttgacaaagcatgaagatattcccagtgtctgtctgataatattttgcatctaagaatgggtttgactcaagatcttgggttaccaagatgtcttaaatgttcagtaaatatctttcttacagtccagtagcttagagcatgtttgctgattgatattacatttaaacttggggctacagcttgttacctagaattttgagatactaagagaatgcaattttaaatgcccactggttttatttgttttggagagagggtctcattctgtcacccaggctagagtacagtgggaacagtcatggctcactgcagcttaagctcactgcctgggctcaagtgatcttactccagcctcccaagcagctgggactacaccaccacaggtatgcaccaccatacctggctgatttttaaaattttttctagagatgaggtctcactatgttgcccagctggtctcatactcctcagttcacgcattcctcccacctccacctcccaaactgctgggattacaggtgtgagccaccatgcccaacacccactgatctttaactctcacatgttgggcataagaagtcactatataattgttactggaaagcaagacttaacgaacaattctgactatgaaaaatgtctctttcagtttgttctgtaaatatttagaaaagtgacagctgtcaacctcagagtaactatttctaaaaatgtaaatatgtattaatccttgtatcttttatggtaattttgcatattgatatgaattatataaaattgtttaaaataaaaggtgtccttgaattactgaccacccatagatgtctactgttaccaggttttacaatgcaaattttcactaatacctgggtttaatacagctcacatcactgaatgttacacatgagtttaaatgggtaatatacaggttttgttataataaagttactgattaaatt

SEQ ID NO: 24947 - DNA, 14018 bp, Homo Sapiens
ggcgcggtacaggagcagcactgccggcgggggcgggtgccagggacttggaggtggaggggacgcggcggtactctggcgtcttccgacttcgactccttaccttaaaagatgctggagtcatatgtaactccaattttaatgagctatgtgaatcgctacatcaagaacttaaagccgtcggatctacagctttcactatggggtggagacgtggtactcagcaagctcgagttaaagttggatgtgctggaacaggaactgaaattaccattcacttttttaagtggacatattcatgaattgaggattcatgtaccatggacaaaactgggttcagaaccagtggtaattaccatcaatactatggaatgcattttgaaacttaaggatgggatacaggatgaccatgaaagctgtggttctaattctaccaaccgtagtactgctgagagcacaaaatcatcaatcaaaccgcggagaatgcagcaggctgctcctacagatcctgacttaccaccaggttatgtgcagagtctgattagacgagttgtaaataatgtaaacattgtgataaataatctcatactaaaatatgttgaagatgatatcgtcctttccgtcaatatcacttctgcagaatgttatacagtaggtgaattatgggatcgtgcattcatggatatttctgcaactgatttggtgctgagaaaggttatcaatttttctgactgtacagtttgtcttgataaacggaatgccagtggtaaaatagaattttaccaggatcctttattatacaaatgttccttcagaactcgtcttcattttacatatgaaaacctaaattccaagatgccatctgttattaaaattcatactttagtggaaagtttgaaactttctatcacagatcaacaactgcctatgtttattcgtataatgcaacttggaattgctctttactatggagaaataggcaattttaaagaaggcgaaatagaggaccttacttgtcataataaagatatgctaggaaacattacaggttctgaagatgaaacaagaatagatatgcaatatcctgctcagcataaaggtcaagagttatattcacagcaagatgaggagcagccacagggatgggtgtcatgggcctggtcctttgtgcctgcaattgtgagttatgacgatggcgaggaagactttgttgggaacgatcctgcatcaaccatgcatcaacaaaaagcacagactttgaaggatcctattgtttctataggattttattgcacaaaggcaacggtgactttcaaactcacagaaatgcaagttgagagtagttattacagtccacagaaagtaaaatctaaagaagtattgtgttgggaacaagaaggaactacagttgaggcccttatgatgggagaacctttctttgattgccagattgggtttgttggttgcagagccatgtgccttaaaggaattatgggtgttaaagattttgaagagaatatgaatagaagtgaaactgaagcctgtttcttcatttgtggtgacaatttgagtacgaaaggtttcacataccttacaaattcattgtttgattaccgaagcccagaaaataatggtactcgcgcagaatttatcttggattcaactcaccataaggagacatacactgagatagctggaatgcaacggtttggggctttttatatggattacctgtatacagtggagaacactagtggcaaaggttccacaaatcaacaagacttttcttcagggaaaagtgaagatttgggaacagttcaggagaagtccaccaaaagccttgttataggtcctcttgattttcgtttggatagcagtgcggtgcataggattttgaaaatgattgtgtgtgccttggaacatgaatatgaaccatatagcaggctaaaatcagatattaagaatgaaaatgaaacaatactgaatcctgaagaggtggctcttctggaggaatatattcctactcgacatacaagtgttactctcctcaaatgtacctgcacaatttccatggctgaattcaacttgctggaccatttactacctgtcattatgggagaaaagaactcaagtaacttcatgaatactacaaacttccagtctcttcggcctttgccatccattcgaatattggtggataaaattaatctggaacattcagtgccaatgtatgctgaacagttggtgcatgtggtcagcagccttactcaaccttctgataacctgcttcattattgttatgtacactgctatcttaagatatttggtttccaggcaggactgacgtctttggattgcagtggatcttactgcttacctgtaccagttattccctctttcagcactgctctttatgggaaacttctgaaactccccacatgctggaccaaaagatctcagattgctataactgaaggtatatttgaacttccaaatctcacaattcaagctacaagagcacagacacttctcttgcaagcaatatatcaaagttggtctcatcttggaaatgtcagctcttccgcagtgattgaagctttgataaatgaaatcttcctaagtataggtgtgaaatctaagaatcccctgccaactcttgagggctcaatccagaatgttgaattgaagtactgcagcacatcattggtcaaatgtgcctctgggaccatgggatcaataaaaatttgtgccaaagccccagttgatagtggaaaagagaagttgattcccttgcttcagggtccttctgacactaaagaccttcatagcaccaagtggctcaatgagagtagaaagccagagtctctcttagctccagatttgatggccttcacaatccaagttccacaatatattgactactgccacaattccggtgctgtacttctttgcagtatacaaggactagcagttaatattgacccaatcttatatacgtggctcatctatcagcctcagaaacgaacaagtagacatatgcaacagcagcctgtggtagctgttcctcttgttatgccagtttgtagaaggaaagaggatgaggtgtctattggaagtgcccccttggcaaagcagcaatcatatcaggcctctgaatatgccagcagccctgtaaaaacaaaaacggtaacagaatcccgcccattgtcagttcctgttaaagccatgttgaatatatctgaaagctgtagaagtcctgaagaaagaatgaaggaatttattggaattgtttggaatgcagtgaagcatctcacactacagcttgaagtacaatcttgttgtgtgtttattccaaatgatagcctgccttccccaagtacaattgtatctggtgacattcctggaacagtaagaagttggtaccatggacaaaccagcatgccgggaacacttgtcctctgtttgcctcaaataaagattattagtgctgggcacaagtatatggaacctctgcaggagattccatttgttatcccacgacccatccttgaagaaggtgatgcttttccttggacgatcagcttgcataatttcagcatatatacccttcttggaaaacaagtgacactttgcctagtggaacctatgggttgcacctccactctagctgtcacgtctcaaaaactgcttgctacgggacctgatacacgacattcatttgttgtctgtctccatgttgacctagagtcactagagataaaatgctctaatccccaggtccagctcttctatgaactaactgatatcatgaataaggtctggaacaagattcagaagagaggcaatctcaacctatctccaacctctccagagaccatggcagggcctgttcctacttctccagttagaagcagtataggcacagctcctccagataccagcacatgcagcccatctgctgacattgggactactactgagggagattctatacaagcaggtgaggaatcaccattctcagattctgtgaccttggaacaaactacaagtaatattggaggaaccagtggacgtgttagtttatggatgcagtgggtgcttcccaaaattactataaagctctttgctccagatcctgaaaataaaggcacagaggtttgtatggtcagtgaactagaagatctcagtgcttccatagatgtccaggatgtatataccaaagtgaaatgtaaaatagagagtttcaatattgatcactatagaagcaggccaggggaaggttggcagtcaggacattttgaaggagtatttctacaatgcaaagaaaaatctgtgacaactacaaaacttctagatggcactcatcagcagcatggattcctctctctgacatacacaaaagctgtaacaaaaaatgtccgccacaagttaacatcaagaaatgagcgaagaagttttcataagttatctgaaggcctaatggatggttctcctcattttcttcatgaaattcttctttcagcacaagcttttgatattgttctttattttcctttacttaatgccattgcaagtatatttcaagcaaaactaccaaagacccaaaaagagaaaagaaaatctcctggtcagcccatgaggacccatacactgacatcccgcaatttacctttgatttatgtcaacacaagtgtaatcagaatttttattccaaaaacagaagaaatgcagccaactgttgaagctaatcaggcagcaaaagaagacactgtggttttgaagattggctctgttgccatggctccccaggctgacaatccccttggcagatctgtccttaggaaagatatttaccagagagccttgaacttaggaattcttcgagatcctggatcagaaatcgaagacagacaataccaaatagatctgcagtccatcaatattggtactgcacagtggcatcaactaaaaccagagaaggaaagtgtctcaggaggggtggtaacagagactgaaaggaattctcaaaatccagcccttgagtggaatatggacagcagcatacggcggcatcaagaaaggagagcaattttgacccccgttttgacagatttttctgtccgaataactggagcacctgctgtcattttcaccaaagtagtttctccagaaaatttgcatactgaggagattttagtgtgtggccattccttagaagtgaatataaccacaaacctggacttcttcctaagtgtggctcaagttcaactcttacatcagttaatagtagcaaatatgactggactggaaccatcaaacaaggctgcagagatctctaaacaagaacagaaaaaagtggatatatttgatggaggcatggctgaaacctcatctcgctacagtggtgctcaggatagtggaattggcagtgacagtgttaaaatcagaatagtgcaaatagagcagcacagtggtgccagtcagcatcgcattgcccgtccctcacgccagtcatcaattgtaaaaaatctaaattttattccctttgacatatttattactgcaagtagaatctcactaatgacctattcctgtatggccttatccaaatcgaaatcacaagaacagaagaataatgaaaaaacagacaagagttcattaaatctcccagaagttgattcagatgttgctaagcccaaccaggcatgtatttccacggtgacagcagaagatctcttaaggagcagcatttcttttccttcagggaaaaaaataggggtcctctctcttgaaagtcttcatgcatccacaaggtcatctgctagacaagcacttggtataactattgttcggcagcctggtcgaagaggaactggtgacttacagctagagccttttctgtactttattgtgtcccagccttccttgcttctgagttgtcaccacagaaagcagcgagtggaagtatccatttttgatgctgtgcttaaaggggtggcctctgattacaaatgtatagatcctgggaagactctgcctgaagcccttgattattgcactgtttggctacagacagtgcctggagaaatagacagcaaaagtggtattccaccttcctttataacactacagattaaagactttctgaatggaccagcggatgtcaatttggatatatcaaagcctttgaaagcaaacctgagtttcaccaaactggatcagataaacctttttttaaagaagataaaaaatgcacacagtttggcacatagtgaagagacttcagccatgtccaacaccatggtgaataaggatgatcttccagtctccaaatattaccgtggaaagttgtctaaacccaaaattcatggtgatggagtgcaaaagatttcagctcaagaaaacatgtggagagctgtttcctgctttcaaaaaatttctgttcaaactactcagattgtgatctccatggaaactgtaccccataccagcaaaccatgcctgttagcatctctctcaaacctcaatggaagccttagtgtcaaggcaacacaaaaagtacctggcataattcttgggtcatcatttctactcagtataaacgattttctccttaaaacaagtctcaaagaaagaagccgcattctgataggaccatgttgtgctactgccaatctggaagctaagtggtgtaaacacagcgggaatccaggcccagaacaatccataccaaaaatatccattgacttaagaggaggtctactacaggtcttctggggtcaagaacatttgaattgtttagttcttctacatgaattactcaatggataccttaatgaggagggaaattttgaagtacaagtttctgaaccagtgcctcaaatgtcatctcctgtggaaaagaatcagacatttaaaagtgaacaaagttcagatgacctacggacaggtctatttcagtatgtacaggatgctgaatctttgaaattgcctggggtctatgaagtcttattttataatgaaactgaagattgcccagggatgatgttatggagatatccagaacctagagtactcacccttgtacgaataactcctgtaccttttaacaccacagaggatccagatattagcacagcagaccttggtgatgtgctacaggttccttgtagcttggaatactgggatgaactccagaaggtttttgttgcatttagagaatttaatctgtctgaaagcaaagtttgtgaactgcagttgccggatatcaatctcgtgaatgaccagaagaaattagtatcttcagatctttggagaattgtcttgaacagcagtcaaaatggagctgatgaccaaagctctgcaagtgagtctggttctcaaagcacttgtgatccacttgtgactccaacagccctggctgcctgtaccagagttgactcctgctttaccccatggtttgtcccatccctttgcgtttctttccagtttgctcacctggaattccatctttgtcatcaccttgaccaactaggcacagctgcaccacagtacctacagccatttgtttccgacagaaatatgccatctgaactagaatacatgattgtttccttcagagaaccacacatgtatcttcgacagtggaataatggttctgtctgtcaggagatccagttcttagctcaagcagactgtaaacttctagagtgcagaaatgtcactatgcaaagtgtggtgaaacccttcagcatcttcgggcagatggcagtttccagcgatgtagtggaaaagctgcttgactgcaccgtgatagttgattctgtatttgtaaaccttggacagcatgtagtccattcactaaacactgcaatacaagcttggcaacagaacaaatgccctgaggtagaggagttggtcttcagccattttgtgatctgtaatgacacacaggagacactgcggtttggccaggtggatactgatgaaaatattctgctggcgagtctccacagtcaccagtacagctggcgctctcacaaatccccacagctgttacacatctgtattgaaggttggggcaactggcgttggtcagagcctttcagtgtggaccatgccgggacttttattagaacaattcagtacaggggtcgaactgcttctctcatcatcaaggttcagcaactcaatggagtacaaaaacagattatcatctgtggaagacagatcatctgtagttacttgtctcaaagcatagaactaaaagtcgttcagcattacattggtcaagatggacaagctgtagttcgggaacattttgactgcctcacagccaaacagaaattgccttcgtacatactagaaaacaatgaactgacggagctgtgtgtgaaggccaaaggagatgaagactggtcaagagatgtgtgcctggaatccaaagcccctgagtacagcattgtcattcaggtgccatcttcaaacagttccattatttatgtctggtgcacagttttgactttagaacccaactctcaagtgcaacaacgaatgattgtgttcagccctctttttatcatgaggagtcatcttccagaccccattatcatacatttggagaaaaggagtctgggattgagtgaaacacaaattattccaggaaaagggcaggaaaaaccactgcaaaacatagaacctgaccttgtacatcacctgacattccaagcaagagaagaatatgatccttcagattgtgcagttcccatctcaacatccctcattaagcaaatagccactaaggtacaccctggaggcacagttaatcagatccttgacgaattctatgggccagaaaagtcgcttcaacccatatggccctataataagaaggattctgacaggaatgaacagctaagtcagtgggatagcccaatgcgagtgaagctgtcaatctggaagccatatgttagaactttgttgatagaacttctgccctgggccctgcttatcaatgaatccaaatgggacctctggctatttgaaggagagaaaattgttctacaggttcctgctggcaaaattattattcctcctaattttcaggaagcttttcaaattggaatatactgggcaaatacaaacactgtgcacaagtcagtagcaattaaactggtccataacctgacatctccaaagtggaaagatggaggtaatggtgaagttgtgacactggatgaagaagcgtttgttgatactgaaataagacttggtgcttttccaggacatcagaagttatgtcagttctgcatttcctccatggtacagcaaggtatacaaattattcagattgaagacaagactacaataatcaataatacaccatatcaaatattttataaaccacagctatctgtctgcaatccccattctggaaaggagtattttcgtgttccagacagtgctacttttagcatttgcccaggtggagagcagcctgctatgaaatccagctcccttccttgctgggacttgatgcctgacatcagtcagtcagtactggatgcatccctgcttcagaaacagatcatgctgggcttttcccctgccccaggtgctgacagctcacagtgctggagcctgccagctatagttagaccagagtttcccagacagagtgtggcagtacccctcgggaatttccgggaaaatggattctgtaccagggctatagtgctgacatatcaagaacacctcggagtgacttatttaaccctctcagaagaccctagtcctcgagtaattatccacaatagatgtccagtaaaaatgcttataaaggaaaacattaaagatattccaaagtttgaggtttattgcaaaaaaattccctccgagtgctcaattcatcatgagctgtatcatcagatttccagttatccggactgcaagaccaaagacttacttccaagcctacttttgagagttgaacctctagatgaagtaacaactgagtggagtgatgccattgacatcaacagtcagggaacacaggttgtgttcctgactggctttggctatgtgtatgtggatgttgtacatcagtgtggcacagtcttcatcactgtggccccagaaggaaaagcaggacctattttaaccaataccaacagagcgccagagaagattgttacatttaaaatgttcatcactcagttaagcctggcagtgtttgatgacctcacccaccacaaagcatcagctgagcttctgagactcacactggacaacatttttctctgtgtggccccgggagctggtcccctccctggggaagagcctgtggctgcgttgtttgaactttactgtgtggagatctgctgtggggacctgcagctagacaaccagctttataacaagtccaatttccactttgctgtcttagtctgccagggagaaaaagcagaacccattcagtgttccaaaatgcagagtctcctcatatccaacaaagagttggaagaatacaaggaaaaatgttttatcaaactttgcatcaccttaaatgaaggcaagagcatcctctgtgatattaatgagttcagctttgaattaaaacctgctcggttatacgtggaagacacatttgtatactacatcaagactttgtttgacacctaccttcctaacagcaggttggctggtcactccacacacctctccgggggtaaacaggtgttgcccatgcaggtcacacagcacgccagggccttggtgaatcctgtgaagttacggaaactggtgatccagccagtaaatttgctcgtcagcatccacgcttccctcaagctgtacatagcctcagaccacactcctctctccttctcggtgtttgaaagaggacccatcttcaccactgcgaggcagcttgtgcacgccctggcaatgcactatgccgctggggccctttttagagcaggctgggtagttgggtctctggatattcttggcagccctgcaagcctggtgagaagcatcgggaacggggtcgccgacttcttcaggcttccgtatgaggggctgacccggggccctggagccttcgtgagtggcgtctccagagggaccacatcgtttgtaaagcacatctccaaaggtaccctcacatccatcaccaacctcgccacaagcctggcccggaacatggaccggctctcactggatgaggagcactacaaccggcaggaggagtggcggcggcagctccccgagagcctgggcgaggggcttcgacagggcctgtcccggctgggcatcagcctgcttggtgcaattgctggtatagttgatcagccgatgcagaacttccagaaaacatctgaggcacaggcttcagcaggacacaaggccaagggtgtcatctcgggtgtggggaaaggaatcatgggggtgttcacaaagcccatcggaggagctgctgagctggtgtcacagactggctatggtattttacatggagctggactttctcagcttcccaaacagcgccatcagccaagtgatctacatgctgaccaggctccaaacagccatgtcaaatatgtctggaaaatgcttcagtctctgggcagaccagaagtccacatggccctggacgtggttctggtgaggggctcaggccaggagcatgaagggtgcttgctgctgacatcagaagtgctcttcgtggtgagtgtcagtgaggacacacagcagcaggccttccccgtcacagaaatcgactgtgcacaggacagcaagcagaacaacttactcacagtgcagctcaagcagccaagagtggcctgtgatgtggaggtagatggagtccgagagagactgtcagagcaacagtacaacagactggtggactacatcacaaagacatcttgtcacctggcccccagctgttcttccatgcaaataccatgccctgtggtggctgcagaacctcccccctccactgttaaaacataccattacctggttgatccacattttgctcaggtcttccttagtaaatttaccatggtgaaaaataaagccctgaggaaagggtttccttgagtcccctctgaggtgtttattcctgcttgtgtgatttagtttttgggtttctttgagacagggtctcactgcattgcccttgctgacctcaaattctggggttcaagcaatcctcccacctcaacccacaagtagctacgactgcaagcacctgccaccataaagggctgcattttgccaccataaagggctgcatttttttaaaaagcctaggcagctctaacatcatctgatatggacacaaggccaacagtttccttatttacatccttacctctaaaagatacttcaaagtgacaaaaacgtgttccttccccacttagagacaatgattaacagggccctatatgttcttaccacatacagaggatgcatttatttttgctctatgacacttgcaaaaatctctactgtaattaatttgggtctattattaactctctgttccatcatagaatgtggccaggccttacaatggagagccagagttaaaacttcaagttgcatctgtttttgggctgagtcaccacctttgcctcatgctcctttgtctgcaaaggcctaggattctttctttaaatgaaatgcttaggactttgtggcttgttacatttgtcatttaactgcagtgctattctttgaaagctgctatgtgtattttctctgaagtctgcattttactaaaatttacaacagtctgatgattgattgattactgtccaggtacattttagaaaaagtgttcttcttccagtttgttttactaagcaaactttgagtaaatcctttgtcctatattgaatccagtcccaaagtgttcaggtgagtttctctagttccataaacaaaacatacatagtgggaactccctggtatgccatagagcacacaagaaccccaatattaatgctaacaattataccagtccattttgtttattctgtggaattgacttgacaaagcatgaagatattcccagtgtctgtctgataatattttgcatctaagaatgggtttgactcaagatcttgggttaccaagatgtcttaaatgttcagtaaatatctttcttacagtccagtagcttagagcatgtttgctgattgatattacatttaaacttggggctacagcttgttacctagaattttgagatactaagagaatgcaattttaaatgcccactggttttatttgttttggagagagggtctcattctgtcacccaggctagagtacagtgggaacagtcatggctcactgcagcttaagctcactgcctgggctcaagtgatcttactccagcctcccaagcagctgggactacaccaccacaggtatgcaccaccatacctggctgatttttaaaattttttctagagatgaggtctcactatgttgcccagctggtctcatactcctcagttcacgcattcctcccacctccacctcccaaactgctgggattacaggtgtgagccaccatgcccaacacccactgatctttaactctcacatgttgggcataagaagtcactatataattgttactggaaagcaagacttaacgaacaattctgactatgaaaaatgtctctttcagtttgttctgtaaatatttagaaaagtgacagctgtcaacctcagagtaactatttctaaaaatgtaaatatgtattaatccttgtatcttttatggtaattttgcatattgatatgaattatataaaattgtttaaaataaaaggtgtccttgaattactgaccacccatagatgtctactgttaccaggttttacaatgcaaattttcactaatacctgggtttaatacagctcacatcactgaatgttacacatgagtttaaatgggtaatatacaggttttgttataataaagttactgattaaatt

SEQ ID NO: 24948 - DNA, 1503 bp, Homo Sapiens
atggcggcggcgtctgtctctgcggcttctggttctcacttgtcgaacagctttgctgagccatcaaggtctaatggaagcatggttcggcattcttcatctccatatgtagtatatccttcggataagcctttccttaatagtgatctacgacgctccccaagtaagcctacacttgcctatccagaaagcaacagcagagccatattttctgctcttaagaatcttcaagataagattcgacgcttggaacttgagaggattcaggcagaagaaagtgtgaaaaccttgtctagagaaacaattgaatataagaaagtactggatgaacagatacaagaaagggagaattcaaagaatgaggaatcaaagcacaatcaagaactgacatctcagttgttagctgcagaaaataaatgcaatctattagaaaaacaattggaatacatgcgaaatatgataaagcatgccgaaatggagaggacatctgtcttagagaaacaagtttccctagaaagagaacgacaacatgatcaaacacatgttcagagccaacttgaaaaattggatcttcttgaacaggagtataacaaacttaccacaatgcaggcccttgcagaaaaaaaaatgcaagagttggaagcaaaactccatgaagaagaacaggaaaggaaacgcatgcaagctaaggcagctgagttgcagactggtctagaaacaaatagacttatctttgaagataaggcaactccgtgtgttcccaatgcaagaagaattaaaaaaaagaagtcaaaaccaccagaaaagaaaagttctaggaactattttggtgcacaaccacattatagattatgcttgggtgatatgccatttgtagctgggaagtccacaagccctagccatgccgtggtagccaatgttcagcttgtcttgcatctaatgaagcaacacagtaaagctttgtgcaatgatcgagtcatcaacagtattcctttggcaaagcaagtatcttcacgaggtggtaaaagtaagaagttgtcagtaacacctccctcctccaacggtattaatgaggagttgtcagaagtcttacagactttacaggatgaatttgggcaaatgagctttgatcaccagcagcttgcaaaacttatccaggagtcgccaaccgttgaactgaaagacaagttggagtgtgaattggaggcattagtgggaaggatggaagcaaaagccaaccaaataactaaagttcgaaaataccaagcccagctggagaaacagaagttagagaagcagaagaaggaattaaaagctaccaaaaagactcttgatgaagaaggaaacagcagcagccgttctggaatcacagggaccacaaataagaaagattttatgaaactgagacctggagaaaaaaggagaaaaaatcttcagttattgaaggacatgcaaagcatacagaattcattacaaagcagtagtttgtgttgggattactga

SEQ ID NO: 24949 - DNA, 1353 bp, Homo Sapiens
ctaggttggagttggaaccgtggagatgcggaaggaaaccccaccccccctagtgcccccggcggcccgggagtggaatcttcccccaaatgcgcccgcctgcatggaacggcagttggaggctgcgcggtaccggtccgatggggcgcttctcctcggggcctccagcctgagtgggcgctgctgggccggctccctctggctttttaaggacccctgtgccgcccccaacgaaggcttctgctccgccggagtccaaacggaggctggagtggctgacctcacttgggttggggagagaggtattctagtggcctccgattcaggtgctgttgaattgtgggaactagatgagaatgagacacttattgtcagcaagttctgcaagtatgagcatgatgacattgtgtctacagtcagtgtcttgagctctggcacacaagctgtcagtggtagcaaagacatctgcatcaaggtttgggaccttgctcagcaggtggtactgagttcataccgagctcatgctgctcaggtcacttgtgttgctgcctctcctcacaaggactctgtgtttctttcatgcagcgaggacaatagaattttactctgggatacccgctgtcccaagccagcatcacagattggctgcagtgcgcctggctaccttcctacctcgctggcttggcatcctcagcaaagtgaagtctttgtctttggtgatgagaatgggacagtctcccttgtggacaccaagagtacaagctgtgtcctgagctcagctgtacactcccagtgtgtcactgggctggtgttctccccacacagtgttcccttcctggcctctctcagtgaagactgctcacttgctgtgctggactcaagcctttctgagttgtttagaagccaagcccacagagactttgtgagagatgcgacttggtccccgctcaatcactccctgcttaccacagtgggctgggaccatcaggtcgtccaccacgttgtgcccacagaacctctcccagcccctggacctgcaagtgttactgagtagattggatttaagacaaaaagcaagtcccccatgagtgtccacttctttgccctgccctctcagcttgtgagacaacacaggagccttctatagtatgttgatatgctagatctgtgccgttaataggcatcgtctctcagcctgagggaggctggattctgggttcctgtagtcacagggaggaaaagctttcttaaaaatggacaagtatgtgcgtgtgagtgtgtgtgtagatttatagtttttggtagtggcaggaataaaaaaaatccatcctaaaaaaaaaaaaaaaaaaaaaa

SEQ ID NO: 24950 - DNA, 1021 bp, Homo Sapiens
ctttctcctccgagcggcgccggtttcggcttggggggggcggggtacagcccatccatgaccatgggcgacaagaagagcccgaccaggccaaaaagacaagcgaaacctgccgcagacgaagggttttgggattgtagcgtctgcaccttcagaaacagtgctgaagcctttaaatgcagcatctgcgatgtgaggaaaggcacctccaccagaaaacctcggatcaattctcagctggtggcacaacaagtggcacaacagtatgccaccccaccaccccctaaaaaggagaagaaggagaaagttgaaaagcaggacaaagagaaacctgagaaagacaaggaaattagtcctagtgttaccaagaaaaataccaacaagaaaaccaaaccaaagtctgacattctgaaagatcctcctagtgaagcaaacagcatacagtctgcaaatgctacaacaaagaccagcgaaacaaatcacacctcaaggccccggctgaaaaacgtggacaggagcactgcacagcagttggcagtaactgtgggcaacgtcaccgtcattatcacagactttaaggaaaagactcgctcctcatcgacatcctcatccacagtgacctccagtgcagggtcagaacagcagaaccagagcagctcggggtcagagagcacagacaagggctcctcccgttcctccacgccaaagggcgacatgtcagcagtcaatgatgaatctttctgaaattgcacatggaattgtgaaaactatgaatcagggtatgaaattcaaaacctccacctgcccatgctgcttgcatccctggagaatcttctgtggacatcgacctcttagtgatgctgccaggataatttctgcttgccatgggcatctggccaccaaggaatttcgcaccctgacgattactcttgacacttttatgtattccattgttttatatgattttcctaacaatcatttataattggatgtgctcctgaatctactttttataaaaaaa

SEQ ID NO: 24951 - DNA, 1558 bp, Homo Sapiens
cacgaggggtgaccaccccttccagcaggcaggttcccagccccagccaagcagtgtttctccaggagccggacagcctctctgtctccatggcagccttcctatctgctggcctcggcatacttgcaccctcagagacctaccccctacctacaaccagctctggctgggagccccggctggggtcaccattcccatcaggcccttgcaccagctctactggggcccaagctgtggccgagcccactgggcagggccccaagaacccacgtgtgtccagagtgacagttcagctggagatgaagcctctgtgggaggaattcaaccagctgggcactgagatgatcgtcaccaaggcaggcaggaggatgttcccccccttccaggtgaagatcctgggcatggactccctggccgactacgccctgctcatggacttcatccccctggacgacaagagatacaggtatgccttccacagctcggcctggctggtggcgggcaaggcagacccagccacacctggccgcgtgcacttccaccccgactcgccagccaagggtgcccagtggatgcgccagattgtgtcctttgacaagctcaagctgaccaacaacctgctggatgacaatggccacatcattctcaactctatgcaccgctaccagccccgtttccacgtggtcttcgtggacccacgcaaggacagtgagcgctatgcccaggagaacttcaagtccttcatcttcacagagacccagttcacagcagtgacagcctatcagaaccacaggatcacccagctgaaaatcgccagcaacccttttgccaaaggctttagagagagtgacctggactcctggcctgtggccccacggcccctgctcagtgtcccagcccggagtcacagcagcctcagtccctgtgtgctgaagggtgccacagacagggagaaagaccccaacaaagcttcagcttccacctccaagacccctgcttggctccatcatcagctgctgcccccacctgaggtcctgctggccccggccacctacaggcctgtcacgtatcagagcctgtactctggagccccgagccacctagggatcccaaggacccgaccagcaccataccccctccccaacatccgggctgatagggatcaaggaggcctgcctctcccagctgggctggggctcctgtcccccactgtggtgtgcctggggcctggccaggactcccagtgatgccagaagccctggggggaagccctgctaccctggaccttacaccgggtgtgggaatcagcctctgccccgccccctccagccccatctctgtctcaaggagagcagggtaggtgaaagtctagagaaagaggctacctgcccagggtcacagcaaggctgggaccatggcaagcttggaaccaggacttctacctcccaaccccagcagcctgaatactgtgccctcttgctttgggggtaactcccgaaaaccctgccttacctctcccttccccctaacattaaactatttggcatgaaaaaaaaaa

SEQ ID NO: 24952 - DNA, 1877 bp, Homo Sapiens
gtccatctggaaggcccagcatgagaggcccggccgtcctcctcactgtggctctggccacgctcctggctcccggggccggagcaccggtacaaagtcagggctcccagaacaagctgctcctggtgtccttcgacggcttccgctggaactacgaccaggacgtggacacccccaacctggacgccatggcccgagacggggtgaaggcacgctacatgacccccgcctttgtcaccatgaccagcccctgccacttcaccctggtcaccggcaaatatatcgagaaccacggggtggttcacaacatgtactacaacaccaccagcaaggtgaagctgccctaccacgccacgctgggcatccagaggtggtgggacaacggcagcgtgcccatctggatcacagcccagaggcagggcctgagggctggctccttcttctacccgggcgggaacgtcacctaccaaggggtggctgtgacgcggagccggaaagaaggcatcgcacacaactacaaaaatgagacggagtggagagcgaacatcgacacagtgatggcgtggttcacagaggaggacctggatctggtcacactctacttcggggagccggactccacgggccacaggtacggccccgagtccccggagaggagggagatggtgcggcaggtggaccggaccgtgggctacctccgggagagcatcgcgcgcaaccacctcacagaccgcctcaacctgatcatcacatccgaccacggcatgacgaccgtggacaaacgggctggcgacctggttgaattccacaagttccccaacttcaccttccgggacatcgagtttgagctcctggactacggaccaaacgggatgctgctccctaaagaagggaggctggagaaggtgtacgatgccctcaaggacgcccaccccaagctccacgtctacaagaaggaggcgttccccgaggccttccactacgccaacaaccccagggtcacacccctgctgatgtacagcgaccttggctacgtcatccatgggagaattaacgtccagttcaacaatggggagcacggctttgacaacaaggacatggacatgaagaccatcttccgcgctgtgggccctagcttcagggcgggcctggaggtggagccctttgagagcgtccacgtgtacgagctcatgtgccggctgctgggcatcgtgcccgaggccaacgatgggcacctagctactctgctgcccatgctgcacacagaatctgctcttccgcctgatggaaggcctactctcctgcccaagggaagatctgctctcccgcccagcagcaggcccctcctcgtgatgggactgctggggaccgtgattcttctgtctgaggtcgcataacgccccatggctcaaggaagccgccgggagctgcccgcaggccctgggccggctgtctcgctgcgatgctctgctggtcgcggacggaccctgcctccccagcttatcccaggccagaggctgcatgccactgtccccggcagcgccaacccctgcttggctgttatggtgctggtaataagcctcgcagcccaggtccagagcccccggcgagccggtcccataaccggccccctgcccctgcccctgctcctgctcctccccttcgggccccctcctcctgcaaaacccgctcccgaagcggcgctgccgtctgcagccacgcgggggcgcgcgggagctctgcgggcgctggaacctgcagacccggcctcggtcagctgggaggggcccgccccggcacaaagcacccatgggaataaaggccaagccgcgacagtcagcaaaaaaaaaaaaaaaaaaaaaaaaaaaaaaaaaaaa

SEQ ID NO: 24953 - DNA, 7405 bp, Homo Sapiens
gctatgccgctgcagggaaaatgctgagccctcccgggccgggtgggcggcggccggcgagggcggcgacggggacccgcttcccgagcgcggcggcggcggccatggcccggctggctgactacttcatcgtggtaggctatgaccacgagaagccaggatcaggagaaggtctggggaaaataatccagagatttccacagaaggactgggatgatacaccttttccacagggaattgagttgttttgtcagcctggcgggtggcagctgtccagagagaggaagcagccaacgttctttgtggttgtcctgacagacattgactcagatcgacattactgctcatgcctaaccttctatgaggcagagatcaatcttcagggaacaaagaaggaagagattgaaggtgaagcaaaagtgtctggtttaattcagcctgcagaagtgtttgctcccaaaagcctggtgttggtatccagattatattatccagaaatttttagggcttgcctgggtttgatctataccgtgtatgtggacagcctgaatgtctccttggaaagtctaattgcaaacctttgtgcctgccttgtcccagcggctggagggtctcagaagctgttttctttgggtgcaggagatagacagttgatccagactcctttacatgatagtcttcctatcacgggcactagtgtggctctcctgttccagcaattgggaattcaaaatgtcctcagcctcttttgtgcagtcctcacagaaaataaggttctcttccattctgcaagtttccagagacttagtgatgcttgtagagccctggaatctttaatgtttcctcttaaatatagttatccttatatccctattctcccggctcagctactggaagttctaagttccccaacgcctttcattattggagtacattctgtctttaaaactgatgtccatgaacttttagatgtaatcatagcagatttggatggaggcactattaaaattcccgaatgtattcacctctcttccctcccagaaccacttctacatcagactcaatcagctctttctttgattttacacccagatttggaagtagcagatcatgcttttcctcctccacgaacagctttatcccactcaaaaatgctggataaagaggtgcgagccgttttccttagattatttgcacaactcttccaaggatatagatcctgcctgcaacttataagaattcatgcagagccagtaatacatttccacaagacagcattcttggggcagcgtggtttggtcgagaatgatttcctcactaaagtactcagtggaatggcatttgcaggttttgtttcagaaagaggtcctccttatagatcttgtgatctctttgatgagttggtagcctttgaagtagagagaattaaagttgaagaaaataacccagtgaagatgataaagcatgtcagggaacttgctgagcaactattcaaaaatgagaatccaaatcctcatatggcattccagaaagttccacggccaacagaaggatcccatttgcgagttcatattcttcctttcccagagattaatgaagcccgggttcaggaattaatacaggaaaatgttgctaagaaccagaatgcacctcctgccacacgaatagaaaagaaatgtgttgtgccagcaggtccacctgttgtttcgataatggacaaggtgacgacagttttcaacagtgcacaaagactagaagttgtcagaaactgtatctcattcatatttgaaaataaaattttggaaactgaaaagacccttcctgctgcactcagagcccttaaaggaaaggcagcaagacagtgtctcactgatgaattgggtttgcatgtccagcaaaaccgggcaatattagaccatcaacagtttgactacataataaggatgatgaattgtactctacaggattgttcaagtttagaagaatacaacattgccgcagcattactccctttgaccagtgctttctataggaaacttgcccctggagtcagccagtttgcttacacgtgtgtacaagaccaccccatttggacaaatcagcaattttgggagacaaccttttacaatgcagtgcaggaacaggttcgctccctttatctctcagccaaggaagacaatcatgccccgcatctgaagcaaaaggataagcttcctgatgaccattatcaggagaagacagcaatggacctggcagctgagcaactacgcctttggcctaccctgagcaagtcaactcagcaagagctagtgcaacatgaggaaagcactgtctttagtcaggccattcactttgcaaacctcatggtgaacctgctagttccactcgacacaagtaaaaacaagctcctaagaacatcagcgccaggtgactgggagagcggaagcaacagcattgtcacaaacagtattgcaggaagtgtagctgagagctatgatacagagagtgggtttgaagattcagagaatactgacattgccaattctgttgtgcggttcattacccgatttattgacaaagtttgtacagagagtggagttactcaggatcacatcaagagccttcattgcatgataccaggaattgtagctatgcacattgagaccctagaagcagtacatcgagaaagcagaagacttccgcctattcagaagcccaagattcttagacctgctctgctgccaggagaagaaattgtctgtgagggtcttcgagtcttgctggatcctgatggaagagaagaagctactggaggtcttcttggaggccctcagctcctgccagcagaaggagccttgttcctcaccacatacagaattctcttcagaggaacaccccatgatcagttagtgggtgagcagacagttgtgcggagctttcccattgcctccatcaccaaggagaagaagattacaatgcagaaccagctacagcagaacatgcaagaaggactgcagatcacatcagcatcttttcagttgattaaggtagcatttgatgaagaagtcagtccagaagtagtagagatctttaagaaacagctgatgaagttccgttatcctcagtccattttcagtacctttgcttttgctgctggacaaactaccccacaaataattttaccaaaacagaaggaaaagaacacttcttttcgtaccttctcaaaaacaattgtgaaaggtgccaaaagggcagggaaaatgacaattgggcggcaatatttactgaagaagaagacagggacaattgtggaagaaagagtaaatcgtcctggatggaatgaagatgatgatgtatctgtttcagatgagagtgagctccccacaagtaccaccctgaaggcctccgagaagtctacaatggaacagttggtggaaaaagcttgtttcagagactatcagcgtttaggtttaggaaccataagtggcagctcttcccgttcaagacccgagtattttagaattactgcctccaacaggatgtattcactctgccggagctatcctggccttttagtcgtacctcaagctgtacaggacagtagtttaccaagagtagctcgctgctatcgacacaatcgcctgcctgttgtatgttggaagaactcaagaagtggtactctgctcctccgatctggaggattccatgggaagggagtcgttggtcttttcaaatctcagaactcccctcaggccgctcctacctcctctttagaatcttccagtagcatagaacaagagaaatacttgcaagccttactgaatgctgtttctgtccatcagaaactcagaggcaacagcactcttactgtcaggccagcctttgctctatctccaggtgtgtgggcaagtcttcgctctagcactcgcttgatcagctctccaacatccttcattgatgttggcgcccggctggcaggcaaggatcactcggcctccttcagtaacagcagctacctacaaaaccagctcttgaaacggcaagcagccctttacatatttggtgaaaagtcgcaactaaggaacttcaaggtagaatttgctttaaattgtgagtttgttcctgttgaatttcatgaaatccggcaagtgaaagccagttttaagaagctgatgagggcttgtatcccaagcaccatccctactgactcagaagtgaccttcctgaaagcgctgggagattctgagtggttcccacagcttcacaggataatgcagctggctgtggttgtatcagaagtacttgagaatggttcctcagttttggtctgtttggaggaaggctgggacatcactgcacaagtgacatccctggttcagttactcagtgatcccttttataggacacttgaaggcttccagatgttggttgaaaaagagtggctctcttttggtcacaaattcagtcagaggagcagcttgaccctcaactgtcaggggagtggttttgctccagtcttcttacagttcttagactgtgtacaccaggttcacaaccagtatccaactgagtttgaattcaatctctattacttaaagttcttggctttccactatgtgtctaatcgctttaaaacatttctcctggattcagactatgaaagattagagcacggaactttatttgatgataaaggagaaaagcatgccaaaaaaggagtctgtatttgggaatgtattgacagaatgcacaagaggagtcccattttctttaattatttatattcaccattggaaatagaggctctaaagcccaatgtaaacgtctctagcctcaagaagtgggattactacatagaagagaccctgtccacaggcccttcctatgactggatgatgctaacccccaagcacttcccctccgaagactctgacctggctggagaagctgggccacggagccagaggagaacagtgtggccatgctatgatgatgtcagctgtactcagcctgatgctctcaccagccttttcagtgaaattgaaaaattggagcacaaattgaaccaagcccctgagaagtggcagcagctgtgggaaagggtaaccgtggaccttaaagaagaaccaagaacagatcgctcccaaagacacctgtcgagatccccaggaattgtgtctaccaacctaccttcctatcagaagaggtctctgctacatctcccagacagcagcatgggggaggaacagaattccagcatctccccatccaatggagtggagcgaagagcagccacgctctatagccagtatacatccaagaatgatgaaaacaggtcctttgagggaacactttataaaagaggggctttgctgaaaggttggaagccccgttggtttgttttggatgtaacaaaacatcagctgcgctactatgactcaggtgaggacacaagctgtaaaggccacattgatctggctgaagtagaaatggtcatccctgctggccccagcatgggagccccaaagcacacaagtgacaaggctttctttgatctcaagaccagcaaacgtgtgtataacttctgcgcccaggatggacagagtgcccagcaatggatggacaagatccagagttgtatctctgatgcctgatgcccatggtcaacccacgcagaagaaacagaagaactcatgctgccagatagatagaaaaagaagcatggatccttgaggagctgacaacaagttatcccagggcctgaggttctcctgcccagtcccctcttgcaggggttgctatatctacttaacctgaataggtgtttcacacaggtctggtcaacagccccatgcactccctgtatcttgcactaaatttttctaacagggtcttagtggttaatgatcagaagatgtctcctgagccaactgtgaacctcacccaggcaaaatggctaccacctacttgggtccttcttcatgaaagctatagatccttttttgttctctgaggtcataatttcctcggagacctgtttaacaagcaaaaatcaaaaccctccaagattgtctcatattctacctggactaggtttcctatgagagacatctacttgtaatgcctgacctttgagatgctcagttctctggtgctgccaaaagatgcttccatggtccgtgctctgccagtggggttcacaacaagagacgtcattgttcagtagcaggcaaagagggagcacacagcattattctgatggaaaaagattatccagggaatggtacaacaatgaccagcccaatgcaggaaaacactacttccaaaacactgaattctctagaccagaggtgctctgaggatccagggccttgtgttcttatgtatcttctgcttcctgacagcttctttttcaaaataacatgcaaaaaaagctgaatgcactaactcacaaaacaaacacttgcactgaattcccaatgaagtgaagatgttggaaagacagaggccagctatttaggaccatacgcacctgtgacaagggctgtgttgaccacagtcacactgtggcatgactggatacccaaactacacttctacacatgaaaagtaagaactgtctttagattttctttactttgataacttgtgattgtttagcttaagacccaagaaatgctgtttgctcatggtaaacagaaacagcatcttcgctacaaccactgacaccagctggcgtcataggtagctagatcattgcatttgttttgaaatgttaatatgttaaatactaaactaatatttcaaaaatgtgtatatatgatttctatatccttgtttttcagatagcctgcttataatttaatataaattaactgatgcattcataagatttcaataatgaaatggttcccttttaaaaaataaaaatactttgtagattaaaaataaatcagaatttcaaatttaaaattgtccacacactaggaaatagaactgtgttaatatataagaaatctggggataattaagaatgaaggacttttctatcatttccattttataaattgccacctgtgaaaatggtttttgcacattatttgtatttttctttgtatatgaaataattttttgtactttgtaaaatatggagcccattgtaccttcagctatttgagactatacacagtgcttcttttgtaactggattactttaactttcgtgaaggcattacattgcctcacattcactaaccaccttgaattaaatttatttcttaagaaaaagcatccctcatttactgtgaactaaagttcattctgtagtgcacagcattcaggagggtaacactcaggattcatacatgggactaaaggttcaagaataaaacaaagcatgacccac

SEQ ID NO: 24954 - DNA, 2906 bp, Homo Sapiens
cctaattcctctaatatctctctgtgagcctaaaccaataattatatattacattctattgtctttcttatataactgcagaaagataaatatcactttgtttgttcctgtaggttttctttagtgtaatccatagcagttattgcattggagcagcagtccctcactttgaaaccttcgcaatagcccgaggagctgcctttcatattttccaggttattgataagaaacccagtatagataacttttccacagctggatataaacctgaatccatagaaggaactgtggaatttaaaaatgtttctttcaattatccatcaagaccatctatcaagattctgaaaggtctgaatctcagaattaagtctggagagacagtcgccttggtcggtctcaatggcagtgggaagagtacggtagtccagcttctgcagaggttatatgatccggatgatggctttatcatggtggatgagaatgacatcagagctttaaatgtgcggcattatcgagaccatattggagtggttagtcaagagcctgttttgttcgggaccaccatcagtaacaatatcaagtatggacgagatgatgtgactgatgaagagatggagagagcagcaagggaagcaaatgcgtatgattttatcatggagtttcctaataaatttaatacattggtaggggaaaaaggagctcaaatgagtggagggcagaaacagaggatcgcaattgctcgtgccttagttcgaaaccccaagattctgattttagatgaggctacgtctgccctggattcagaaagcaagtcagctgttcaagctgcactggagaaggcgagcaaaggtcggactacaatcgtggtagcacaccgactttctactattcgaagtgcagatttgattgtgaccctaaaggatggaatgctggcggagaaaggagcacatgctgaactaatggcaaaacgaggtctatattattcacttgtgatgtcacaggatattaaaaaagctgatgaacagatggagtcaatgacatattctactgaaagaaagaccaactcacttcctctgcactctgtgaagagcatcaagtcagacttcattgacaaggctgaggaatccacccaatctaaagagataagtcttcctgaagtctctctattaaaaattttaaagttaaacaagcctgaatggccttttgtggttctggggacattggcttctgttctaaatggaactgttcatccagtattttccatcatctttgcaaaaattataaccatgtttggaaataatgataaaaccacattaaagcatgatgcagaaatttattccatgatattcgtcattttgggtgttatttgctttgtcagttatttcatgcagggattattttacggcagagcaggggaaattttaacgatgagattaagacacttggccttcaaagccatgttatatcaggatattgcctggtttgatgaaaaggaaaacagcacaggaggcttgacaacaatattagccatagatatagcacaaattcaaggagcaacaggttccaggattggcgtcttaacacaaaatgcaactaacatgggactttcagttatcatttcctttatatatggatgggagatgacattcctgattctgagtattgctccagtacttgccgtgacaggaatgattgaaaccgcagcaatgactggatttgccaacaaagataagcaagaacttaagcatgctggaaagatagcaactgaagctttggagaatatacgtactatagtgtcattaacaagggaaaaagccttcgagcaaatgtatgaagagatgcttcagactcaacacagaaatacctcgaagaaagcacagattattggaagctgttatgcattcagccatgcctttatatattttgcctatgcagcagggtttcgatttggagcctatttaattcaagctggacgaatgaccccagagggcatgttcatagtttttactgcaattgcatatggagctatggccatcggaaaaacgctcgttttggctcctgaatattccaaagccaaatcgggggctgcgcatctgtttgccttgttggaaaagaaaccaaatatagacagccgcagtcaagaagggaaaaagccagacacatgtgaagggaatttagagtttcgagaagtctctttcttctatccatgtcgcccagatgttttcatcctccgtggcttatccctcagtattgagcgaggaaagacagtagcatttgtggggagcagcggctgtgggaaaagcacttctgttcaacttctgcagagactttatgaccccgtgcaaggacaagtgctgtttgatggtgtggatgcaaaagaattgaatgtacagtggctccgttcccaaatagcaatcgttcctcaagagcctgtgctcttcaactgcagcattgctgagaacatcgcctatggtgacaacagccgtgtggtgccattagatgagatcaaagaagccgcaaatgcagcaaatatccattcttttattgaaggtctccctgagaaatacaacacacaagttggactgaaaggagcacagctttctggcggccagaaacaaagactagctattgcaagggctcttctccaaaaacccaaaattttattgttggatgaggccacttcagccctcgataatgacagtgagaaggtggttcagcatgcccttgataaagccaggacgggaaggacatgcctagtggtcactcacaggctctctgcaattcagaacgcagatttgatagtggttctgcacaatggaaagataaaggaacaaggaactcatcaagagctcctgagaaatcgagacatatattttaagttagtgaatgcacagtcagtgcagtga

SEQ ID NO: 24955 - DNA, 3332 bp, Homo Sapiens
acagaattctctgcaggaaaacactccttctcctgagaaaactcctcaggggttagatgcagggagttatgttgtgatttgtgtaggggtggctttggtgagctcatcctggcattttaaaaataatgtgaatggtgtatccctttgtgatcatcatcactttttccctgcgagtcccaatcaatgcgggtgtgactgctgtatgaagtctcaggaagcccaccccagtggagaagaaggcttgcaggaggcaggagatgctgtccgatgaccacgtgaatgaaatcatcatacaggttgagaatgtttcctctggggtccaaagccacccatcctcaaatcagatttttcaagaaaaggtgctgctagactcaagcatcaacatggttttgtcaatatctgacattgatgtgatagactctcagacagtcagcaaaaggaatgaccaaaagggtaaccaggtgctgcggttttcaacatctttgaatgagtcgatgtctcagacccttcatagcctagaatgcatgggcatagacactcctggttcttcacatgaaactgttcaaggacagaagttaatcgcatcccttatacccatgacatccagagacagaattaaagccatcaggaaccagccaaggaccatggaagagaaaaggaaccttaggaaaatagttgacaaagaaaaaagcaaacagacccatcgtatccttcagctcaattgctgtattcagtgtctgaactccatttcccgggcttatcggagatccaagaacagcctgtcggaaattctgaattccatcagcctgtggcagaagacgctgaagatcattggaggcaagtttggaaccagcgtcctctcctatttcaactttctgagatggcttttgaagttcaacattttctcattcatcctgaacttcagcttcatcataatccctcagtttaccgtggccaaaaagaacaccctccagttcactgggctggagtttttcactggggtgggttattttagggacacagtgatgtactatggcttttacaccaattccaccatccagcacgggaacagcggggcatcctacaacatgcagctggcctacatcttcacaatcggagcatgcttgaccacctgcttcttcagtttgctgttcagcatggccaagtatttccggaacaacttcattaatccccacatttactccggagggatcaccaagctgatcttttgctgggacttcactgtcactcatgaaaaagctgtgaagctaaaacagaagaatcttagcactgagataagggagaacctgtcagagctccgtcaggagaattccaagttgacgttcaatcagctgctgacccgcttctctgcctacatggtagcctgggttgtctctacaggagtggccatagcctgctgtgcagccgtttattacctggctgagtacaacttagagttcctgaagacacacagtaaccctggggcggtgctgttactgcctttcgttgtgtcctgcattaatctggccgtgccatgcatctactccatgttcaggcttgtggagaggtacgagatgccacggcacgaagtctacgttctcctgatccgaaacatctttttgaaaatatcaatcattggcattctttgttactattggctcaacaccgtggccctgtctggtgaagagtgttgggaaaccctcattggccaggacatctaccggctccttctgatggattttgtgttctctttagtcaattccttcctgggggagtttctgaggagaatcattgggatgcaactgatcacaagtcttggccttcaggagtttgacattgccaggaacgttctagaactgatctatgcacaaactctggtgtggattggcatcttcttctgccccctgctgccctttatccaaatgattatgcttttcatcatgttctactccaaaaatatcagcctgatgatgaatttccagcctccgagcaaagcctggcgggcctcacagatgatgactttcttcatcttcttgctctttttcccatccttcaccggggtcttgtgcaccctggccatcaccatctggagattgaagccttcagctgactgtggcccttttcgaggtctgcctctcttcattcactccatctacagctggatcgacaccctaagtacacggcctggctacctgtgggttgtttggatctatcggaacctcattggaagtgtgcacttctttttcatcctcaccctcattgtgctaatcatcacctatctttactggcagatcacagagggaaggaagattatgataaggctgctccatgagcagatcattaatgagggcaaagataaaatgttcctgatagaaaaattgatcaagctgcaggatatggagaagaaagcaaaccccagctcacttgttctggaaaggagagaggtggagcaacaaggctttttgcatttgggggaacatgatggcagtcttgacttgcgatctagaagatcagttcaagaaggtaatccaagggcctgatgactcttttggtaaccagacaccaatcaaataaggggaggagacgaaaatggaatgatttcttccatgccacctgtgcctttaggaactgcccagaagaaaatccaaggctttagccaggagcggaaactgactaccatgtaattatcaaagtaaaattgggcattccatgctatttttaatacctggattgctgatttttcaagacaaaatacttggggttttccaataaagattgttgtaatattgaaatgagcctacaaaaacctaggaagagataactagggaataatgtatattatcttcaagaagtgtgtgcaggaatgattggttcttagaaatctctcctgccagacttcccagacctggcaaaggtttagaaactgttgctaagaaaagtggtccatcctgaataaacatgtaatactccagcagggatatgaagcctctgaattgtagaacctgcatttatttgtgactttgaactaaagacatcccccatgtcccaaaggtggaatacaaccagaggtctcatctctgaactttcttgcgtactgattacatgagtctttggagtcggggatggaggaggttctgcccctgtgaggtgttatacatgaccatcaaagtcctacgtcaagctagctttgcacagtggcagtaccgtagccaatgagatttatccgagacgcgattattgctaattggaaattttcccaataccccaccgtgatgacttgaaatataatcagcgctggcaatttttgacagtctctacggagactgaataag

SEQ ID NO: 24956 - DNA, 3504 bp, Homo Sapiens
gcggcggcggcggcggcggctggagagggtcctcggcagcctctgaggagcgcggggcgcggccatgagcgagtccagcggcagtgcgctccagcccggcaggcccagccggcagccggcggtccatccagagaacctctctctagactccagttgcttctcttctccacctgtgaacttcctccaagaattgccaagctaccggtccattgcacgtaggagaacgactgtccattcccgggacaagcaaagcggaactttgctaaagccaaccgactcttacagctcccagctggaggacagaatcgctgaaaacctcagcagccattctcttcgaaattatgcactgaacatctctgagaagcggagactaagggacattcaagagacacaaatgaagtatctctccgaatgggaccagtggaagcggtatagcagcaagtcttggaagaggttcctagagaaggctcgagagatgacgacccacctggagctgtggcgggaggacatccgcagcatagaagggaaatttggcactgggattcagtcctatttctccttcttgagattcctggtgttgctgaatttggtgatatttctgatcatctttatgctggttttgctcccagtcttactcacgaaatacaagatcaccaacagcagcttcgtgctcattcctttcaaagacatggataaacaatgtacagtctatccagtaagcagttctggactcatttacttttacagttatatcatagacttgctttctggcactggtttcctggaggaaactagcctcttttacggacattacaccattgatggggtgaaatttcagaacttcacctatgatctgcccctggcgtatttgttaagcacaatcgcctccctggccctgagccttctttggatagtgaaaaggtcggtggaaggattcaaaatcaacctgattcggagtgaggagcactttcagagttactgcaacaagatatttgccggctgggacttctgcatcactaaccgcagcatggcggatctgaagcacagcagcttgcggtacgagctccgagcagatctggaggaagaaagaatgcggcagaaaatagcagaaaggacctcagaagaaacaatacgcatttactctttgagactgtttttgaactgtattgttctggctgttttaggggcatgcttttatgcaatatacgtagcaactgtcttctcgcaagagcacatgaaaaaggaaatcgacaagatggtttttggagagaacctcttcatattgtatctaccgtctattgtgatcacgctggccaattttatcaccccaatgatctttgccaagatcatccgctatgaggattattctccaggctttgagatccgtctgacaatccttaggtgtgtctttatgcggctggccaccatatgtgtcctggtgttcacgctgggctccaagatcacatcctgtgatgatgacacatgtgacctttgcggctacaaccagaaactctacccgtgctgggagacccaagttgggcaggaaatgtacaagctgatgatcttcgacttcatcatcatcttggctgtgacactcttcgtggattttcctagaaagctcctggtgacctactgttcctcttgcaagctgattcagtgctgggggcagcaggagtttgccattcctgataacgtcctggggatagtttacgggcaaaccatctgctggatcggagcctttttctcaccccttctccctgcaattgcaaccctgaaattcattatcatcttctatgtgaaagagtggagtctgctttacacctgcagaccctcccccaggccgttcagagcatccaattctaatttcttcttcctgttggtgttgttgatcgggctgtgtttggcaataatacctctgacaatcagcatatcacgcatcccttcctcgaaagcctgtgggccgttcaccaacttcaacaccacctgggaggtcatccccaagacggtgagcaccttccccagctcgctgcagtccttcatccatggtgtcacatccgaagcctttgcagttcctttcttcatgattatttgcctcatcatgttttacttcattgccttagctggagcacacaaacgggtggtcatccagctccgagagcagctatccctggaaagtcgtgacaagtgctacctaatccagaaactaacagaagcccaaagggacatgaggaactaactagactgagcgtgaagatggtgctgcctgttgcttctaagctgacctagtgattctgctgagcctacagagtctacctgggttttgagtggacatttaaaaatatatttttcttgagtttaggcttttccatatgtgcagctgtgtttacctaacccagcccttaattagggcttcagtgacttagaaaagcaggggaaacccaaggctttgcctgcagaccggccactctgtgacaactctaccaaaaaccaacaagccattcaagcttttacaagaatgaaagagcggagacggtagtttagtatttgagccacgagtttatgtgcacaagtgttttgggttgtggactgaagctcagcctgttaatcagaccagcccatgagtgtataacaaacagaattggaggctggtttcttaaacacacacgtccacattttttagggttgttttcctgtgcttacaatttttaatgcatgtgcctttatttcacaaaacatgtggctgggcgcagcggctcacgcctgttatcccaacactttgggaggccgaggcaggcggagcacctaagttggggagttcaagaccagcctgaccaacgtggagaaactccgtctccactaaaatacaaaattagctgggtgtggtggcacatgcctgtaatatcagctactcaggaggctgaggcaggagaattgcttgaacccaggaggtggagtttgcagtgagctgagatcacaccattgcactccagcctgggcaaaaagagcaaaactctccctaaaaaaaaaatgtagaatatctcttaagatttccgttatggtaaaaaccatatgcaataaatacctcattgtaagcttacccaaaattgatagatgtcaaccttttaacagaagaacagaagtttaagttattgtttaatgtaatcagttttcattttaatatctttgaaatctttttcaaaggactgtagttttgtaatggacttttcaagccttccttccattgtttttcttccgttcactggctccacacgtttcctggggagtagcctggaatttaaagttgggtgcaggttttagaaagctgttgctgttaacaataattctcccggccatctccactccactactcaaaaatgcctgaatccttgctcagaggagcaaaggtatcttctcgtccctttcttacagccattttcctgcttttccacaaagatataatttaaagtggaatatttttgtaactgggaaaaaaaaaaaaaaaaa

SEQ ID NO: 24957 - DNA, 4683 bp, Homo Sapiens
gggaagcagccgtcggcggctgccctgagccttcctggggaaggaggagggaggtaggcgcagagcgcggtccacgcctgctcgccccgaaccatgggaagatgagacaggaatctgtgccatccaaattgcttgatccagtgaatctgctaggaaaggtctctgaggcccccgtctgctgactgcatgacaaaccctaaaggaaatgccaatcgtgatggcccgggacctggaggaaacagcatcatcctcagaggatgaggaggtcataagtcaagaggatcatccatgcatcatgtggactggaggctgcaggagaattccagttttggtattccatgccgacgctattcttacaaaggacaacaatattagagtaattggagaacgttatcatttgtcttataagattgtacgaacggacagtcgcctagtacgcagcattctgacagcccatggatttcatgaagttcacccaagcagcactgactataacctaatgtggacaggatcccacctgaagcccttcttactgcgcaccctctctgaagcacaaaaagttaatcactttcccaggtcttatgaacttacccggaaggaccgactgtacaaaaacattattcgaatgcagcatacacatggattcaaggtttttcacatcctcccccagaccttcctcctgccagctgagtacgcggaattttgtaattcatattcgaaggaccggggaccttggatagtaaaaccagtggcatcttcaagggggcggggcgtctacctgatcaacaatccaaaccagatctccctggaagagaacattttggtctcccgttacattaacaaccccctgctcatagatgatttcaagtttgacgtgcgcctctatgtgctcgtgacttcctatgatcctcttgtcatctatctctatgaagaaggattggctaggtttgcaactgtgcgatatgatcaaggagccaagaacattcggaaccagttcatgcatctgacaaactacagtgtcaacaagaaaagtggagattacgtcagttgtgacgatccagaagtggaggattatggaaacaaatggagcatgagtgctatgcttaggtacctgaaacaagaaggcagagatacaaccgcattgatggcccatgtagaagacctgatcattaagactataatctctgctgaactagctattgctactgcctgtaaaacctttgttcctcatcgcagcagttgttttgaactctatggctttgacgtgctcatagattctactctgaagccatggttgttggaagtgaatctctctccttctttggcctgtgatgcgcctctggacctaaagattaaagccagtatgatttcagatatgttcactgttgtaggatttgtgtgccaagatcctgcccagcgggcatcaactcggccaatttatcccacctttgagtcttccaggcgaaaccctttccagaaacctcagcgttgccgtccactctctgccagtgatgcggaaatgaaaaacctcgtgggctcagcccgggagaaagggccagggaagttgggtggttctgtgcttggtctgtcaatggaggagatcaaagttttacgaagggtgaaggaggagaatgatcggcgaggtggatttattcgcatatttcctacatctgagacatgggaaatatatgggtcctacctcgagcataagacctcaatgaactatatgctggcaacacgcctcttccaggacagaatgactgctgatggagcgccagaattgaagatagagagtctgaattcaaaggccaagctgcatgctgcactttacgagaggaagctcctgtctctggaggtgcgaaaacgtagacgacggagtagcagattgagggcaatgaggccaaaatacccagtgattacccaaccagctgaaatgaatgttaaaactgagacagagagtgaagaggaggaagaagtcgcattagataatgaagatgaagaacaggaggcttcccaggaggagtctgcaggatttcttagagaaaatcaagccaaatatacaccctcattgacagctttggtagaaaatacacccaaagaaaattccatgaaagttcgtgaatggaataataaaggtggacactgctgcaaacttgagactcaggagctagagcctaaatttaacctgatgcagattcttcaagataatggcaatcttagcaaaatgcaggcccgaatagcattctctgcctatctccagcatgttcaaattcgcctgatgaaagacagtggcggtcagacgttcagtgccagttgggctgccaaagaggatgaacagatggagctggttgttcgtttcctcaagcgagcatcaaataacctccagcattcactgaggatggtattacccagtcgacgattggcacttctggaacgcagaagaatcctggcccaccagctgggtgactttatcattgtatacaacaaggaaacagaacaaatggctgaaaagaaatcaaagaagaaagttgaggaagaagaggaagatggggtgaatatggaaaactttcaggagttcatcagacaagcaagtgaggctgaactggaggaggtgttgactttttatacccaaaagaacaagtctgctagtgtcttcctggggactcactctaaaatttctaagaacaacaacaattattctgatagtggggcaaaaggtgatcaccctgagactataatggaagaagtgaaaataaagccacctaaacagcaacagacgacagaaattcattctgataaattatctcgatttaccacttcagcagaaaaagaggcaaaattagtttatagcaattcctcctctggtcctactgctactctgcagaaaattcccaacacccatttgtcatctgttacaacctctgacctctctccagggccttgccaccattcttctttatctcaaattccttcagctatccccagcatgcctcaccagccaacaattttactgaacacagtctctgccagtgcttctccctgcctacatcccggggcacagaacatcccaagccctactggcctgccacgctgtcgatcaggaagtcacaccattggtcccttttcttccttccaaagtgctgcacacatctatagccagaaactgtctcgtccctcttcagcaaaggcaggatcgtgctatctaaacaagcatcattcaggaatagccaaaacacaaaaagagggagaagatgcttctttatatagcaaacggtacaaccaaagtatggttacagctgaacttcagcggctagctgagaagcaggcagcgagacagtattctccatccagccacatcaacctcctcacccaacaggtaacaaacctgaatttggcaactggcatcataaacagaagcagtgcttcagctcccccaaccctccgacccatcatcagtcctagtggcccgacatggtctacacagtcagacccccaagctcccgagaatcactccagctctcctggaagcaggagcctgcagacagggggatttgcctgggaaggagaagtagaaaacaacgtgtacagccaggctacaggggtggtcccccagcacaagtatcaccccacagcaggcagctatcagcttcaatttgccctgcagcaacttgaacaacaaaaacttcagtcccggcagctcctggaccagagtcgagcccggcaccaggcaatctttggcagccagacactacctaactccaatttatggacaatgaataatggtgcaggttgtagaatttccagtgccacagctagtggccagaagccaaccactctgccacaaaaagtggtaccacctccaagttcttgcgcctccctggttcccaaacccccacccaaccacgaacaagtgctcagaagggcaacatcccagaaagcttccaaagggtcctccgcggaagggcagctgaatggactccagagcagccttaaccctgcagcctctgtgcccatcaccagctctacagatcctgctcacactaaaatatgaaccacaaacacacagagaaacaacctgttcaccactcctgggtgcatgattgagggtgaagcatccaccagcacttcaaggggtccatagtatttttttttttgctgcctcaaagtccccaaagccttcgagcagaagtggcagtagatggttgccaatcagccaatgcagactttcactgggacaacaagaaagcagatcttctgggttttgatggaacttggcagtggggacattcagctgatgcattatataccccgtcagagcacacttgtatcttttaccttccctttgccccatgcccccaaactgcttaggtcttctctgtccctttactgctgctgcacagagatgatataaaagaggctctttggctatttgcattttgcttcctcttcttttccagattacagtatgaagctttattttctttgtacaagcttaaaatttcaacatcatcatccgccaaagttgttcctcccttttcggaggatctagggggaaagaggagcattcatcacaagtttcctagagagaggagacaaatcggtgtgccattgacaacatgagccagggtaaaggcaccctttggaattactgatttcaaagattaataaagtaattctattttt

SEQ ID NO: 24958 - DNA, 4444 bp, Homo Sapiens
gcagatgagcagagtcctgctagagaggtcagctcagcgtccaggagggggcgcctgcccccgaggaggccacggacatgcctgggaagttgctgccggagaagtgtgctctgatgtggctacatttggggacgcgggctccccagaggcccaagcgagaaagccgggggttcccaggctgggggtgcaggacgggccaggcactgccctgcagggcccgcccccctgcccctgcaccctcacacccatcttcctctctcagcctgaccccagggcctgggagcccccggcagaccggccctccttgccaaacagtggctgccctttatggactcggcgcctggcagagccactgtggaggaggagttggctgtcatggtcaggggaggcagcccttgggttgtcaaggttggtggtcaacgttgaacccatatctgctggaatctcccggtctgttccacacacgatcatgcgggaagctctgggacccgaaggctgttctgatctcgggggtcacaagttctcacagcagcctggggtcaccagggaccagacccggcgttagcctctgtaaggagctgcctggctgctgggctgagctttgttgcaggcccaggaagatgaccaagaaggacagagcagagccccatctaccactgctgggagggcctgagggagcacgtgcacagcagagccccatcctccactccctgggctcgaagaggcttcctcggtgtggatggcagctgttaacgagcagtggtggtgcagctggaggcctctgtcccatggggcacagacgggagaaggatggcggacgggtgtgcacgcttgggaggacgggcgggcggcataggcctgagcaggtggcatgggcgcacgagaagggtgtgtctgagacaggatgtttatcccaaatgccaggagtggacgaggcggacgagtggcagtgaggtaggcatgtgaggttgttgcctggcccactctgccgaccccagaaacccagcggcctgggcccagcacccggctacacatggggtgagctcacgcccacactgtggcctgtgcccgtcacggggctgcttgcttctcctaggcttgggaacaagctggcatgaacgctgtggccgcattcacagctcaggcacttccactttgggttttatgaagaaacagacttaaagagcatttgttcctaatgggtgggctgaagcttgggaggagcattcagcttctctccacagtatggcttcacctgttcctgagcgccctgctaccctcttgctaacctgggtggctgaggtcctctgctttggtggcgttgacttcccgtctgcagccagcgccaggtgccagcccccgcctctgctcatcgggaagcgctggcctgcaggtgctttgtggttgccacggacccttgttctgtccctttccagcacccaccccccacccgctgtgcattccgtagttcattttcaaggcagggggcacatggtgaaaatacagcctggctttttttcaacaaatgcagctgcactcttccttgcttgttttgaaggctgagccagcaacctccttggcacctggggacagtcgcttcctcagtttctgcgtaccgactgcctcacctgacacgcggcctgggcgcgagagaagccaaccaggtgcctgagttgactgactccttccgccctccagcttcctccctccgccctccaacctcctccctccaccctccaacctcctccctccgccctccaacctcctccctctgccctgcaacctcctcccctctgccctccaacctcctccctccgccctccaatctcctccctctgccctgcatcctcctcccctccgccctccaacctcctccctccgccctccaacctcctccctccgccctccaacctcctccctccgccctctgccctcctccctctgccctccagcgttctccctcctccctccaccctgtttcctccctccacctcttctctcctccctccaccctcttccttctaccctcttccctctgccctcttcttctgccctcctccctccaccctctttcctccctcctccctccaccctctgccctcctccctctaccccctgccctcctccctccgccttatctggaatcggggtcttggtcctgggctggaggcagaccctggcccgggcgaggttaaaggtactgcaggagggcggcatcatgatgtcctgaagcttgttgcgcccggtgctgtcggccggctgaaggcagaaacagtcacagcacctgcagctatggaaggcgacgactgaaaatctaataggcaccttgatgtcaagtttccaagaccaaaggcaagaacagtcagatcaaacttcggaagagtcagagaaagtgagcatgacctagaggagggagacggtccttccgctgtctcctgcagagcgtctgtcgcacgtatgaggtgaaatccgcactgtcccatgaagactgtgaggggagttgccacccgcacacggcccaggagcgccagcagcttggggaccaccacaggcctcagggtctcttcagtccgacgggtccagctgtcaataaaacctcccggggaaggagtaaaggacaaccaagaacctgaactgcaaaagtatgaaaaacatttcatttccctcgagttctccacactttaggtctgcagcgccttgggggtgactgatggccctccgtgagacgcggtggccatgtgcttctacaagtgaaaaggagcaagtgtggttagagcctggagtatggacgtcccggggaccgctggcccatggcctggcttggggccttacaggggagcgagctgagtgaatgcaggggagggcccgtctttctacagtgtgtatcttgtttttgagacagactcactctgtcgtccaggctggagtgcagtggcgcgatctctgctcactgcaacctctgcctcccgggttcaagcgattctcctgcctcagcctcctcagtagctgggattacaggcacctgccaccacgcctggctaatttttgtattttttttttagtagagatggggtttcactatgttggtcaggctggcctcgagctcctgacctcaggtgatccacctgccttggcctcccaaagtgctgggattacaggcatgagccaccgcgcccggccctgccctgcttttctacatcaccactgtcttgtcagttagctcggctcaggcattgcatgcctgatctgtatctttgggaatcctgtgaggtaatggttctagatccaaaagaatggataaagagactgtttcagttcccgaaattatccaggcacattctgtgcgctactgaacttcagaaagcaccagtccatccagtgtgcagaggctggtaagtaaaacaggccagccgtgggcacagacagtttcaccagaggccccggggcagagggtcttctccagctcttccagggcggggctcatctgttcctgggccagaggtggacctgtctgcaggcttgtaagggtggggagacgccagcctggcccatgggctgtccacacccaccccccgcagaccgcgctgctgtctgcaggggatgccaccacttcctcctggcctcgggtgcacaggtgaaacatgaagaagctattggggcggaaaatggctctcaccaggctgctctcgggttaatgaaaactcgtcaaattctccatgcagcagcagccagccgggcacatgctgtcctgccctgcccgactgtgtgcagggaagcaggtcccctgggcctgggcggagggactgcgtgcctgtcagggaaggccgaggctccggacaggcgggaagcagccttctccttaatcaccccatgtggaaaccaattaaagattcgattctctcagacccggggcattttagccttggttgaatcctcctggaattcacagggaagtggctttgccctctgccctcgctgctggaaggcaaggggccgttctcgccttggttttctaggttgtgttgcggcaggagctgactgcccctaggcctagatctctgcacaacttcgctcagggacacctgcctgtgtgcatgtctcatggtgtgaatgtgtttcctgctcacaggtaccgttttgtgtcatgcagttactggaatgtacaaaagcagctgtgatctttgtgagagctgcacagagcaggagtctgagagctgcacagagcaggagtctttatttggttcacttctggtctgcagcaaccacttgctactaaaagatggaaaagatgtacaaaaatgtcacagccctttagaaagcgacattatcagaaatgtatgaccttcagtcctccctccctctcctatgcccccaccagaccaggcggcgagaaggaacagggagtgaacatgtaacggaaaacaataaaactgaatttaactgg

SEQ ID NO: 24959 - DNA, 1607 bp, Homo Sapiens
ctgccctctggaccctgcggaccccagccgagccccttcctgagttccacaggcgcagcccccgggcggtcgggcggaggggtccccggggcggtgccagggcgcaatcctggagggcggccgggaggaggaggtgcgcgcggccatgcacaccgtggctacgtccggacccaacgcgtcctggggggcaccggccaacgcctccggctgcccgggctgtggcgccaacgcctcggacggcccagtcccttcgccgcgggccgtggacgcctggctcgtgccgctcttcttcgcggcgctgatgctgctgggcctggtggggaactcgctggtcatctacgtcatctgccgccacaagccgatgcggaccgtgaccaacttctacatcgccaacctggcggccacggacgtgaccttcctcctgtgctgcgtccccttcacggccctgctgtacccgctgcccggctgggtgctgggcgacttcatgtgcaagttcgtcaactacatccagcaggtctcggtgcaggccacgtgtgccactctgaccgccatgagtgtggaccgctggtacgtgacggtgttcccgttgcgcgccctgcaccgccgcacgccccgcctggcgctggctgtcagcctcagcatctgggtaggctctgcggcggtgtctgcgccggtgctcgccctgcaccgcctgtcacccgggccgcgcgcctactgcagtgaggccttccccagccgcgccctggagcgcgccttcgcactgtacaacctgctggcgctgtacctgctgccgctgctcgccacctgcgcctgctatgcggccatgctgcgccacctgggccgggtcgccgtgcgccccgcgcccgccgatagcgccctgcaggggcaggtgctggcagagcgcgcaggcgccgtgcgggccaaggtctcgcggctggtggcggccgtggtcctgctcttcgccgcctgctggggccccatccagctgttcctggtgctgcaggcgctgggccccgcgggctcctggcacccacgcagctacgccgcctacgcgcttaagacctgggctcactgcatgtcctacagcaactccgcgctgaacccgctgctctacgccttcctgggctcgcacttccgacaggccttccgccgcgtctgcccctgcgcgccgcgccgcccccgccgcccccgccggcccggaccctcggaccccgcagccccacacgcggagctgctccgcctggggtcccacccggcccccgccagggcgcagaagccagggagcagtgggctggccgcgcgcgggctgtgcgtcctgggggaggacaacgcccctctctgagcggacccggtgggaatccgagcggctccctcgggagcggggactgctggaacagcggctattcttctgttattagtatttttcttactgtccaagatcaactgtggaaatattttggtctcttgtgacgttcggtgcagtttcgttgtgaagtttgctattgatattgaaattatgacttctgtgtttcctgaaattaaacatgtgtcaacacaggactttctggatcattccagaaagtgtcagacgttttctcattgtcttg

SEQ ID NO: 24960 - DNA, 17719 bp, Homo Sapiens
ttcttctttcttaactcaggaaccatcctctctgctagcttccagcttttcttttgcaattccctcacctctctcagcctccatagaattgaagagttagggccttgctctggattaggctttggcttaagggaatgttgtggctgtttttatcttctatccagaccaactagaactttctccatatcagcaataaggctgtttagctttattgtcttttgtgtgtttactggagtagcatttttaatttccttcaaaattttttcctttgcattcatgacttggcttttctcctttgcactcacaacttggctaactggagcaagaagcctagctttctgcctaccaacattacttcctcactaacttaatcatgtttgcttttgatttaaagtgacaggctcttcctttcatttggacacttagaggcctttgtaggattattagttggcctaatttcaaaattgtgtttccaggaatagggaggccccaggagggggagagagaagggaaagttcggtggaacagtccaaacacatacagggcttatggattaatttccccttcctttatgagcgcggttcatggtgccccaaaacaattgcaataatattaaagattactgatcacagatcacaacagcagacataataacaatgaaaaattttgaaatattgcgagagtaccaaaatgtgacacagagacacaaagcgagccaatgttgaaatacaggcagtatctgctaagcggtataaaacaatctatgcctgtacctctagaaagtacaggcatagcaaagtaaggaatagcaaatgtttggggcagctgggattaaatgagtccgagctcacacaagtgatgtgaaattgcctcgggctaggcggtctgtgtgtccccccgggtggcaactggcatgtccccagggcacggttagtcccagcgggcctggaggcgaagaccgcgtacctctccctgcccccgcgctcttggtccccgcgggctccggagcgactgggaggagctttaactctgggaaggaccagcccgatccacgggagcccgggcggcgcgcaatcagaaccaactggccccacgctcgggggcagggggcggggccgccgaggaagggccgagggcggggccgggcccgggagcctgtggcttcaggaagaggagggcaaggtgtctggctgcgcgtttggctgcaatgagctcggcctcggggctccgcagggggcacccggcaggtaggcagggggcgtcgactgggcaccgagcaggtctgcgtcttgctccggctggaggggaaacgagggttagtggaccgggcgcgcggaccggagtggggccgcgggttccttcggctttgcagggcggcctggagaagttgcactcttggattgaagcgctcagggcgggtggggacggtttcgcgcttcagtctaagaaacactcggggacctggctgccgcctcctggcggtcccgagtagcgacgccggcgccggggcgtgcccctgccgcctttgtcctccggggcgatgagcgctttcggggcgccccggctgtttaaaccttaaaaggctgtccccacgcgggcctggcgttcccccacacctggccgtttgaaatgttgggggttggatcttttgtttgctcacttcgaaaagtgaaaaggaggggttgttccgccgagtcataatgaaaacataacaggcccgcggggtgcccgggccaagaccctgggtcctcccgggcttcagctggaggcggccagttcctggcggccagcacaccccggtatctctcttcttcatccaggaaacctgctgctgtctgtcggtttgagccaaaaccacaataacttttttctgcaaagtaatcaactgctaagagcgtacgttctgtcacttattactggtaaagtttagaaacttcaagcctggccagagtgaaacaaacaaaaaggtcgaaacgcctgcagttggccggccgtggtggctcacgccttgtaatcccaacactttgggaggccgaggcgggcggatcaccagaggtcgggagttctcgaccagcctaactaacacggtgaaaccccgtctctactaaaaatacaaaaaaattagccaggcctgggcgcaagctactgaggaggctgagacaagagaatcgtttgaaccctggaggtggaggttgcagtgagccgagatcgccccactgcactccaacctcggcgacagagtgagacttcgaatcaagaagaaaaaaaaaaaaaaagaacgaaacgcctgcagttggttagagtgcctttgtttaagaactctttatattttgctgcacaaaggaaatggtgctccagaggcaagctgtaaaagtcacatggtcgtagaggaggtagataggtagccttgtcctggaggcacagtgcagggtccagttgcagtctctaggggcgggaagccggggctttccttcactcacctgctcccttcctcttcttcctccaccgcactccccagtgcatgttctaggcctgatggaggttactctacatagggttactaaatacattgttgatggagccgatgggtagattttcatagagagtgcagtgaatgaagacgatgacagtagaatgaccgaagtcgtttgggaagttgaacaaagtttagaaaggtagccggtctcgggtgggaggggctgcgtggggatgggcctacagagactttggaatctgtaggtgggctggctttcaatcccagcttcactttgccgaccttggcacgcctggcccactttctctgtccctgttcctgagctgtggagctgtgagataaggtatctaaggcgtcaggccatcaacaaatggtagctggcaggattatctggagggactatcaaattagagtgaggtgaaaaaaggaatgattagttttgtaaaacctaagctgatttaaggaataaggaggtggcagttacattatcctgcaaaggaagagaagtgaaaagagggccagacacagtggtgggcgcctctagtcccagctactggggagactgaggcaggagaatcgcttgaaacctggaggtggacttgcagtgagccaagattgcgccactgcactgcagcctgggcgacagagggaggctctgtctcaaaaaaaaaaagtgaaaagaggtcaagaatcaggtttaaagaagggcacatttttgataagtagattgcagatgaaaaggaatttctatatctgttatacagggtagctccttcattaaaatttattttctccatatcaataaagctatttcttactttatccaggtttttaaatattaacgcaggccgggcgtggtggctcatgcttgtaatcccagcacttccaggaggctgataggcaggtggatcacttgaggccaggagttcaagaccagccaggacaacatagcaaaaccctgtctctactgaaaatacaaaaaaaaagtagctgggtgtggtggcgcatgcctgtaatcccagctactcaggaggctgaggcgggagaatcgcttgaacccggaggcggaggttgtggtgagccgagaccacgccactgcactccagcctgggcaacagagcaagactccatcccaaaaaaatagtaataaaaaataaatattaatgcggcataatgatacttaagtgcccccttctggaaagcttgtcttcttgggatacacagctcaaggtggtcatgatgtgttattttctctcaatctgtgggtaaagtttatcaactccagaaaagtattggaacttaggtcctggcatctgtctccatagctttttgttctgattcagtgtttgctagagtggccactggacctggtcattaactggtactgcaggatgcagggtgcactttgtgagagtgaaggtaagttacagctggccagcatcagaattgggatgtccagagcctaggtttttttctacatccgtagcattaacaaacaacaacaacaacaaaaaacttaaaaaaaaaatccctcactgaggttgccaaatctgttaactttgaaactgaatgtattaagagatggggtctagctctgttacccaggctggagtatggtgactattcacaggggcagtcatagcacactatgtcctagaactcttgggctcaagagatcctcctgccttggccttccaggtaaccgggactataggcttgccactatgcccggccagaacgtcattttaaacagattttcttgagcagctacttaatactagttagccattcctaaacctgtaggtcttgactaatgtgagggcatatttgagacaacccaaactcacatcttaagttattaattttaatgtgtcagctaacaactgggaagctacttctttggcaatatgagaaacaagagttttaaagacccaagcaagaatacatctccagtgttttcaccctgagggatatgagttagtttgctgagcagccatttggcacagcttccatgagttaggttgtgagccgccttcggctcagcagtcagtatggagcagaagccacaggaggtgagccgctggcctgctgccaccgaggaggacactgagacatgagtgctttccaagttgtgcagaattttggcatgtgaggaggatggttgtgacatatggatttaattttcttgaagttattgtttctttatactctaattggttaaaagataagcaggtgaggttatcaaaaggcagtagattccgacagcttttgaaaatgggaagagtgaaatccctgtgctgtcttcatagagcagtgtgtggagtaggaagtacctcgttactgtgctcacctagggcaaaggtcggattaaacagctttctcatctgccatgcagcggggaggaccagttggagaggttgcttttggctctcacaccttagtgtaaaaatcactttgtgaaaaatgcagctgtcacctccttcctccaagattctgattctgcctcagttaggatccaggaatctgcattttaacatgcacaccaggaattctgatgcccaaggttgagcaaaactgacttagggcgtacagacagaggatgccttagtgtggggtcttagttgggtctcattgcttggggcagttccaggaggaataggctaaaagggacttgaactgaattccccaccttgtattttttttgaggagaagtgaggttagatcaatcaggtgatgggggctagtaatggggagatctctaaggagaggggaaccaacccttttggctaggagatgatgggtaagagtccgtgctttagggtcattcttcctcaactgaagggtgcatcttgctatactgctaatatttcagtttattcattgctgtctcccctctaagctgttgagctatcaggtaaaaacagatgcatgagtggatggggcctttattgtagaagatgccacactttgcactgtccagtgtagaagccactggccaattcatttaaattgacaataaaatcgagttcctcagttgcattagctgcatttaaatgctcagtagacacatgtggccagtggctaccttatgagacagtgcaaatacggaacaattccaccatcacagacacttccatgacatagcactgctctagagagtagagaggaattcagtggaaggctgtccagggagtagggagtccagttgagaatggagagcagagggctccccttacagggttggaaatgcagatgtgtcatgcaggagatccaaggtccaagtctttgcccttgcccttcccttcctccacccaaacttctacctcttccaggcttacaccactgctaatccagcattaaccacaaactatatttcagttttcctgtaggacttaattctttttcagaaaatgtgcaaaaacattttctgcataacaaagcaacttcatatttcaactccgtaatcacagaactgttactctaggcatattttgcagtgaatgcatttgtgtaatattttctccatttctgtttataagattgttattttgcaggtcaagttgggggtgagaaagcatagagctgttatagtttgtttattagtaagcagtttcccttcatttccttttcttcacatactttggcttttaaactaaccaaaacagaagggtcttaagagtttgggagtcagaagggggatgggagttcctactatattttactgccataagtcaaaaataattaacaaaaatcaactttttttaataggtggggaagaaaacatgacagaaacagatgccttctataaaaggtaaagctgtgctcttttctaataaaggtctcttcctttgatggtcatgatcagcctacagaaatcaaagcaagaatgggtcctgggagctaggaagtaaaactgagtaggccaagttttagcctttggggagctcatttgtagataggcaggttgtgctgcccctggttgtcgagggacccggagtgatgttcagaatgcatattaattggcatggcatgagcctagagctagaacttggttctgagcctcgtggttattcctggttgctggatcctgggggccaggggaaagacatcaaggcagagggttagggatgtgtcaggatggcacatggctgctctttaccaattggcagagagatatttcaggactttccttattagcatggcctttcctggagcacacccatggaacatcagcctggcaaggaggaagctcagatctctatctacatgttgacctagaacttggaggggctcattatttaatatgacttgaagtgattgtttttcaacttttcattaacagagaaatgtttgatccggcagaaaagtacaaaatggaccacaggaggagaggaattgctttaatcttcaatcatgagaggttcttttggcacttaacactgccagaaaggcggggcacctgcgcagatagagacaatcttacccgcaggtagtagttttatctacctatcaagatgaggcagttaagtgataaaattacttttggccaggtgtggtggttcatgctggtaatcccagcactttgggaagccaaggtgggaggatcacttaaggcaaggagtttgagacaagtctgggcaacagagtgagacctggtctctacaaaaaataaaaatcaattagctgggcatggtggcggtagtcccagctactctggaggctgaagggggaggattgcttgatcccaggagttcaaggctgcacggagctgtgatcatgccactgcactccaggctgggcaacagagtgagaccttgtctctaaaataaaaaataaaataatttttttccatgtttccaaatgaaaagttaaaaaaaaattaaaaattaaaaaaattccagacttctagatgtagggaaaagttacttatcataacttgtcaacactaatgaggtaacaacagatcaagagtgttggagcatgggccttgctttgatgcagcctcccttaagaacttgcctgagttggccgggcatggtggctcactcctgtaatcccggcactttgggaggctgaggcgggtggatcataaggtcaggagattgagaccatcctggctaacatggtgaaaccctgtctctcctaaaaaatacaaaaaattagccgggcgtggtggtgggagcctgtagtcccagctactcgggaggctgaggcaggagaatggcatgaagccaggaggcggagcttgcagtgagccaagatcaagccactgcactccagcctgggcgacagagtgagcctctgtctcaaaaaaaaaaaaaaaaaaaaaacttgcctgagttattttccttactctgttctattaaatgttgacaggcttttgcatttgtactaacatttgcatagtagacaacaacactctaaattgaatcggctgtcattatgattaaatcctttccgaccatggtgaatgaagggaaaaccaccattgttatatttcatttcttttctcctaaagaaagcaaatttatgtgtcgttaaaatgtgtatagattcttccaaagtaagggtatttgacaactttgaaaagtttataggctaacatttcatttaatataccactaggttttcagatctaggatttgaagtgaaatgctttaatgatcttaaagcagaagaactactgctcaaaattcatgagggtaggtagttttgctatcatatagttcatcttcctctaatgaaaccgagtcctttatcctatctgtaaagacaggtacaagtaattacttgtgtgacaaaaaaagtattaatttagcacaggttacaggttttgggtatgctgctgtgtttccgttacccagcacatttagagacccttgcaaataattatgcctctaaagtttatatttagcataccactagttacagtctcttgtagaaatgaatgaaatgaccccttcaattggcagtaaaagcctaaaatgcaagtactacaggtgctgggcagtcaacaggctcattttctcattgactcctttcatgcctcattttctcactggtttccaaatagtgttggtttacatacattacctcctttaattctcacagcgtcaatagggggtaggtattctaattataacaacctatattataatcatcgctgcatgccaaccattatatttgcataattactttaaactttcttcagagctcttctttaaactgcacatcattctaactttggctgcttttaccagcttttctactttgctcagaagctttggaggacatcagtctcatggcaccgcacctggctttgagtactcttttggaagctctaagtgctataatcttttttttttttttttgagatggagtctcgctgtccgccccaggctggagtgcagtggtgtgatctcagctcactgcagcctccacctcctgggttcaagcaattctcctgcctcagcttcccaggtagctcgcccccatgcccagctaatttttgtatttttagtagagatggggtttcaccgtgttggccaggctggtcttgaacactggcctcaagtgatccacctgcctcggcctcccaaaatgctgggattccaggcgtgagccactgcgcctggccctaagtgctgtattcctatagtgaaagtgcagcaatgcgtggggagctgttgagcagcagtttctgggtctttccactctgctctaaggtctctgctgattcaaggaaatttttagtttattgccaaaataacttggatcttaagtgagattccctatcgtaatccctttatgttttccacatcattctgtgttttagaaaggctaatgaaatttggtcaaactctattactctgaactttaataaatttggatttttttaaaaaaataagatacagtacggtatattgtttgattaaagactaagttgtttcatcacagatattttacacttattaaagagtaggccgggcatggtggctcatgcctgtaatcccagcactttgggaggctgaggcgaggtggatcacctgaggtcaggagttcgagactagcctggctacatggcaaaaccccgtctctactaaaaatacaaaaattagctggatatggtttcaaatctgtaatcccagctacttgggaggctgaggcaggagaatcgcttgaacccgggaggtggaggttgcagtgagccaagatcgcgccactgcactccagccctgggcaccaagagtgaaactctgtctcaaaaaaacaaaaaagacaaaaccacaaattttcctcctccccaatcatgtggatgtaactttattcttgtgttaataaactgaatttttatgtgtagataacaagcatcatattttcatttctatattctcttttgggtcctttatagtgtcaactgttagccacgcagatgccgattgctttgtgtgtgtcttcctgagccatggcgaaggcaatcacatttatgcatatgatgctaaaatcgaaattcagacattaactggcttgttcaaaggagacaagtgtcacagcctggttggaaaacccaagatatttatcattcaggtaagactgagtacattatcatcttaattataaagtctgtcattctgaacatgtgataaaggtctaaaagccagttttgaaagtaactttctccagtaattggacaggccgtttttgaattctggccaatcatagttgcactttgagctgttagtaataattctttgacactctcattgtctatattacaaaataacagcatttggattgagatttgaagtgactcacaaagtaaccaatgtgctactccctgtccgagcctgataccaaggagagccattggaaagcgtacctgctgattgaagagtgccgcacaaggcaacctcatcagactaggtttgcttctttgggaggtggagagcatataaaccagtggaaagaatggaaaaataaagccttctagtcttatcctgtctcatccctttcacattgccccttaaaccaagattgtttccccgctgccaaattggttttagggataaaagtattttttacaggcgtgatggctcacacctgtaatcccagcactttgggaggccgaggcaggcagatcacctgaggagttcaagaccagcctggcaaacatggtgaaaccctgtctctactaaaaatacaaaaattagctgggcatggtggcaggtgcctgtaatcccagccattcgggaagctgaggcatgagaattgcttgaacctgggaggcagaggctgtagttagccgagagcataccactgcactccagcctgggcgtcagagcgagactctgtctaaaaaaaaaaaaaaatttttttttttgcatgaatattacttggcacatcattaacgattttttttttttttttgagatggagtctcgctctgtcccccaggctggagtgcaatggtgcaatctcggctcactgcaacctccgcccccaggttcaattattctcccacttcagcctcccgagtagctgggattacaggcacctgccatcatggctggctaatttttgtattttcatagagatggggtttcaccatgttggctagtgtggtcttgaactcctgacctcaggtgatctgcccgccttggcctcccagagtgttgggattacaggcgtgagccactgtgcccggccaaagattttgaactacaaaagagaaacctgacatgccagtgtcacaattctgtatttccatgaatagcatggaggacatgaaataacattatgttagtctattcttgcattgctataaagacctgagactgggtaatttataaggaagagagatttgattggcctacagttctgcaggctgtacaggaagcatggtgctggcatctgctttcggtgaggccttaggaagcttacaattatggtggaaggtgacagagagccagcatatgacttgttgggagtgggagcaagagagtgccaagggagaggtcccagactctcttaagtaaccagatttcatgtgaactgagtgggagctcacttacaccaagaggatgatgctaaaccattcatgagagaccctccccgatgatccagtcaccttccaccaggcttcacctcccacactgggaaccacattttaacatgagatttggaggggacagacgttcaaaccgtatcaaacatgaaactgcatttcgcatcctaccataaagccttgttttggggtgaggaagtggctgtaagtgaagaatgactgcctcgtttctggtttggacaactgcattggaatgtctgtgggacatggaattggtcatacaggtgtagaacctaagacaggtggcctcggctggagaaataaatcaggaggtggtcgtggaagccatgggattagatgagtttactcgtgttgaatacagcctgaaaaaggagcataaaacaaaaccgaggggcacccatgaggaatgggctgaagagggaagatactgaggaggatggacaccaggagagaaacaagaaacaaataatgacatgattgttttgtgaaaaggggagtggccaacactgtcaaacacaagagaattggaaataactaatgagctactgtgggaagaaagccacaaatgaaatcgttttccaagttactttctctctctatgccttagattcttggtaaaaagagcacctgcctcatggggtggttgtgtgggcaaaatcacctgactgatttaatgaatgcaaaccacttagaacagtgcctggcatacagcacgccctcagtaaaggctcgctcttactcttattgcagttgactgggcaggtgatgtcattaggttaaaggtgttctgttatatttaggaaggacagtagaaaaaaggcctgaaaataagcctgctgatacgaagattaaaatctgcctataaaaacgggatagtagggattttctatttattttatgatttgaaatcattcaggactttcttttgatgctcataattctttaaccatttcagaactgattgatgcatttataatgctacaacagaatcttattggctggctgtattcgtgtatagggtgaccataacaaagtaccacagactgtgtggtttaaacagcaggaatttatcgtcacagtcctggagctggaagtctcagatgaacgtgtggggaggattggtttcttctgaggcctccctttttggcttgtaggtggccatcttgtccctgtgccttcatatggtctttcttctgtgcatgtctgtgtcccaatttcttcttatgaagacactagtcatgttggatttggtttcacccgtatgacctcattttccttaatcacctctaaaggccctgtcttccaatacagtcagagttgaggtattggggctaggacttcaacatatgaatttttggggaacacaattcagcttgtaaaagtcacttatgagaagagtttaatgttagcctctgagtgagtcagaatttaatgttaattatgagtctaaatttaatgtaaattctgagtgagtcagaattagtgggtaaaaatttgagacctcactttttaatgggcacacaaggaagatggtgcattagtaggtatctcctcaggtcaggctggatgtcattttaactcctaacaatttatagcagcagccaggcaagcaaaagtcaatctggaaatacactgcctgcctaaatagaaacacttaggtcaatactatagctttcaaaagggaaggtaacaccgtgtgccctgggtgtggttaatctgtaagaaattttaaaaccacaagctttttcctctacagtatacccttctaccaacataatttgatgtatacttggggatgccaattttttcttaaaacattaactaaaagaaagcctaagtaaggaaacaactttgttggcttttgtgccctccaaacctgaatgtattgcttctgaactgctcagaatgtggtttctgttgtaatgaaggggtactggcttacacattcactgcacacattaagcactgggaaggaaacagtaggcaaagaggtgggtttttcctccttgtcttgtaggcatgtcggggaaaccagcacgatgtgccagtcattcctttggatgtagtagataatcagacagagaagttggacaccaacataactgaggtggatgcagcctccgtttacacgctgcctgctggagctgacttcctcatgtgttactctgttgcagaaggtgtgtggtgtttaaaacaaacatataattgcctctcttggctaaggtcctgtaagtttcacctttgattggtttgggtcagatctttcggttgggacatggtgattccatcctgaagctcacagacttagaatttctttgaccacatggcacagagtgataaatgaaagtgtaaagtaccttacagaaaaataattcctgagagttatgttgagtaaagcaacagtctaattaattatattagtattagcagcctaccatcagttactgagggtggtagtgccattgtggtaattgtcatggaaagctttaattttttttttttttgagacaaggtctcaactctgtcactgaggctgaagtgcaatggcatgatcatggctcactgcagcctcaatttctcaggctcaagcaatcctcccacctcagcccccctgtagctgggactataggcatgcaccaccatgcttggctaactttttaatttttcggtagagattgggtcttgctatgttgcccaggctggtctcaaacaatcctccagccttggcctcccaaagtgctgggagtacaggtatgagccattgcgtgcgtgcgtgcgttttttttttttatagtctcactctgttgcccagacgtgtgtgtgtgtgtgtatttttttttttttttaatagtctcactctgttgcccaggcgggagtgcagtggtccaatgtcagctcactgcaacctctgcctcctgggttcaagtgattctcctacctcagcctcccgagtagctgggaatacaggtgcctgccaccacgcccagctaatttttgtagttttagtagagatggggtttcaccatgttggccaggctggtctcgaactcctgacctcaagtgatctgcctgcctcagcctcccaaagtgctgggattataggcatgagccaccatgcccaactgaaaaatattttgataatggttctttgcttttgtagtaaataattttgacttctttttagtaatctcatgtctcaatcattgtctatcttgggaattttttaggaaatggaagaaattatacagaattaaccccgtgtatataaaactatatagaattaatctcttttcccatttgaaaagagtcaaaaaaatttaaaagccatttatatcatggacacatcttaagactcttctaaggatttttaagaacttatacttctgtaactaaaaagaatacacacagtaattgaaagccagaaaactgcagcaacattttccttctcacttttttaggatattattctcaccgggaaactgtgaacggctcatggtacattcaagatttgtgtgagatgttgggaaaatatggctcctccttagagttcacagaactcctcacactggtgaacaggaaagtttctcagcgccgagtggacttttgcaaagacccaagtgcaattggaaagaagcaggttccctgttttgcctcaatgctaactaaaaagctgcatttctttccaaaatctaattaattaatagaggctatctaattttacactctgtattgaaaatggctttctcagccaggcgtggttactcacacctgtaatcccagcactttgggagtccaaggtgggcggatcacctgaggtcgggagttcgagaccagcctgaccaacatggagaagccccgtctctactaaaaatgcaaaaaaaaatttagctaggcatggcggcgcatgcctgcaatcccagctacttggaaggctgaggcaggagaatcacttgaacccaggaggtggaggctgcggtgagccgagattgcgccattgcactccagcctgggcaacgagtgaaactccgtctcaaaaaaaagaaaatgtctttctcttccttttatataaatatcgttagggtgaagcattatggtccaatgattcaaatgttttaaagtttaatgcctagcagagaactgccttaaaaaaaaaaaaaaaaagttcatgttggccatggtgaaagggtttgatatggagaaacaaaatcctcaggaaattagataaataaaaatttataagcatttgtattattttttaataaactgcagggttacacaaaaatctagctgatttaacttgtattttgtcacttttttataaaagtttattgtttgatgtttttaaaggtttttgaaatccaggaattaaatcatcccttaataaaatattcaaaattcatattttattacatttttctaactcacattcttgttcatttgtgtaattgatagatgttttttactcggtcatttaaatgtttaatatttcatctacatatgaattaccacattttgtgtatgactttaattcctactttaaaaaaaatcagcattccagaattgttgtatggcattctgaggatgaaatagaaaacataattcttagccactataggttgaacacctgcaaaatctgattctgtcagcatcttccatgttaagttcctacaaacagtccaacagtcatcatcagacccattcacacacaatcacattaatagaataacagatgttactttcaaggttcaattcttattaatatgatatagaatctgaataatactgttttgttaataatctgccagaggctgaagaaagttaactgttttggcttcgatacctgaaacttgtgatttgcaggttcaaaagcaatcgtttcgtttatatacactgtttcagttgaagttcaaaaagtaccaactatactttatggttggtggaacatttatgcctttttgataaatgataaaaagatcttactcccaactactgcatattaaaaaaagaagttaatgacaagacgattccgtgggaggttgaggcaggagggttgcttgagcccaggagtttgatttggcaagacctggtctctgatttttttaaaaggatgattccaaattaagtctaagaatggaagtgaatgccaagcacagaccctttcacctccacatagagaataaacgtgggacaagctgacaaggatttttagctaacagcagccactgttgctttgatagacgcatacaagccctttctaacattagcaagtcataaaaatccaaaaagtaaaaatctcagttgagaacttcaaacaatacttctgttttacaagaatttaataacaaagattaaacaatcaaaatgaaccatgggactcaaaaacatcctaagttgcaaaatcaatacataatggaaaatctgacgacatttaaaactgtaagattaattcttttcattgagttcttctacttgcatttgcaaacagagagaatgacgcgcctgtttcagggattctttagcctgtcatgggaaaaagaaaaagcatgtgatcagaaagaagagaaacataccaacattactgcttgagaggaattctataaacttagcgtctccttacagcaataaaatgtttaaactattagtggcaaatggctgaaatatatatatatttttcttgagatggggtttcattctgtcacccaggcaggagtgcagtgctaccatctcagcccactgcaacctctgcctccctggtgcaagtcattctcctgcctcagcctcccaagtagctaggaccacaggtgcccaccaccatgcccacctaatattttttggtattttttgtagagatggagttttgccatgttgctctggctggtcttgaactcctggactcaagtgatttgcccaccttggcttcccaaagtgacgggatataaatatttcaattttatatgtggatctttttaaaagatgagtttaagtttactaattcatccttatgccttaaaaaaaaatacagtttataccctttataatggttttccacttaatattcttaaaaaaaaaacccttaacctaccactttatctttttatctccactttattaccttaaacataattaacaaggtgttatat

SEQ ID NO: 24961 - DNA, 8331 bp, Homo Sapiens
agattaggactcagggctcccctcaggaagctgggcccagctgggattgccgaggggcccctagccctggcagcggtcctgggctagtcggctgcctggccggggaacctgcaggctcccacaggaagaggtgtggagacctgccctcgggggcctctcccagggtccagcctgagcccccaccaggggtctctgcccagcacaggaagctgaccctggcccagctctaccgaatcaggaccaccctgctgcttaactccacgctcactgcctcgtgagtggcctggactggggtagggcaggtggctcagggcactggcatgggggcccactcatgcctgggagcatcgcatttggggagggtcatggcggagggagcctgaaccctgcccagtgtctgggcgcagggggctgtggtgggcagcagtgaaggggcctgaggagtgccgtggggaagagagggtgaccagagccactctgaatggcgtcagccaaagaaggactctgtcccctccccaccctgtagggaggtctgagcagagggaggcccccaagagtgccattgaccaagagacagcagacagcctgcctcctggggcgtgccggcacctgcttcagctactgcctcctgtatgcatgagccggatgctgggcaggatccctgcctacgcccgggcccgatttgcgctttgccggactggatggagtggaggaggcccaggccacagtaccaccccacctgcccaggcagcccctcgtcacctactccccgaagttaccagctcagctcgagtcttcagggctgggctcctaggctgcccatcctacttctaccctcactggcctccagtgggattcactcctgccctgcccccaccttcccagtcccacaggccacccctggcttgggctgggttctgtgaagttacgtatttattgagcttttggttcttttataaagacttgtctagactccactgggaagagtcctttgctttggggcccagtgactcggggcacttgagttcagggcggcctccttgtgttcctgtgctcctccacttgccacggatgggccacggatggagcttgccatgggaagcactgggaagtaatggggtgtggggtgccaccagaccaacacccccagacttccccaccttcagccaccatcagagcctctccccaggtgccccccggggattcagggctgaatctgcccagttcccacactcaggccagccctcttgggaaggtgggtcctccatgggggtcccttcaggaactttttttttttttttaatacagagtctcactctgtcacctaggttggagtgcagtggtgtgatgtcggctcactgcaacctctgcctcccgggttcaaacgattctcctgccccagccactctagtagctggaactgcaggtgtgcaccaccacgccgggctagtttttgtattttaagtagagacggcatttcaccatattggtcaggctggtctcgaactcctgaccccaagtgttccgcccgcctctgcctcccatagtgctagaattacaggcctgagctactgcgcttggccccttgcggtacttttggcccaacctcctccatggctggggacgcggaggccgagagagaagtcacttgccctggctctaccttgaagtggttctcagggttggggcgagagtcggggtggggaccgagatgcagctctatcctgtgcccctggtcgcagcaggcagcccagcgcttcgcgtgttctacttggcctgtccgctgccgcctaatgagctcaggtctaggccgagcagagggggcacctggtcggactcggttgggctcgggcggccccgcctccccccgcccgccaggcgggcccttctcgacggcgcggggcgggccctgcgggcgcggggctgaaggcggaaccacgacgggcagagagcacggagccgggaagcccctgggcgcccgtcggagggctatggagcagcggccgcggggctgcgcggcggtggcggcggtgagttgagacgcaggaggctaggggcagctttgagccctgtcccaagagcctcggtgaaggaaggggccccgggcgcgtctccactccaagcctcactgggggctgggttggccgccctttccgatctcgttaaaggctcctccagggcgtagcccttccactgagaggaaacccctcccaggagggtctgggggccccaggcagagcattatcagtgtccctcccccaacagaaagcatgggtgggggtgggggcgctgctggattcctgctctggtggaggggaaacttgtgaggggctggtaagcgccccctccgaagcctggtgtgtgcgcggggggaaggaagttagtttcctctccacccatgggcaccccttctgcccggggcctgggaagtgggctgctctgtgggcaaatgctggggcctctgaaatggaggagacgcagcagggagaggccccacgtgggcagctgcgctgagagtcagcagcacctgtcccccaggcgctcctcctggtgctgctgggggcccgggcccagggcggcactcgtagccccaggtgtgactgtgccggtgacttccacaagaagattggtctgttttgttgcagaggctgcccagcgggtaagtggccacaggggtgggagaggcatggggcaggcagggctggagaggtggcgggcaggcccgggaggtaagaggaggctggcaggggaggtaggggtaggctgacagagaagtagggagctggagagaaagagggagggagggcagggtgggaagcaggtcgggggttgctgggcagcccctctgcctgcctgacccctgcctggttccacagggcactacctgaaggccccttgcacggagccctgcggcaactccacctgccttgtgtgtccccaagacaccttcttggcctgggagaaccaccataattctgaatgtgcccgctgccaggcctgtgatgagcagggtgaggggcttctcagtgcttggcagggagttcctaaggacaggcctttctgaaggaagtggctggctcgggcccaaacttggggtgtgagggtcctgcacccacccttgccagaaccctccaccctgatcctccttcagggtgcccttgccccttctctcttcctggtgaccttcccatctctccatgtgccttggcctctggtcggccttaatctctgagcttctctcttttttagggtagccctgtacctgtctgtctttcgcctatttctgtctccattatcttgggataatgcctctgcctctccatgggagcctttggccctgactaactctccactccccatctccctgcacccccaccagcctcccaggtggcgctggagaactgttcagcagtggccgacacccgctgtggctgtaagccaggctggtttgtggagtgccaggtcagccaatgtgtcagcagttcacccttctactgccaaccatgcctagactgcggggccctgcaccgccacacacggctactctgtgagtacccccacccagggctctctactcccagacccccttctccctgcctgacccactcctgtcccatggtgacgcatgcctctcctggattgcaggttcccgcagagatactgactgtgggacctgcctgcctggcttctatgaacatggcgatggctgcgtgtcctgccccacgtaattcctagctgtcgtgggatggagggaagggcggctgggagcagagcaggggcctggggtggggcaggtgctgctggttcaggaataggaagaggggatagggaggagggagccttggccctgtgatgggtgggccccacttcaggcaaacttagatggcaaaagagcaatctggatccgccttagccagatacataagggtatttgccttcactttcagccagcattccccccagcgatcctagccagatattacagatgatttgtcacttacacagagagtcacattgatatagctttaaaacttgggctgaaggaggttgaggctgcagtgagctatgatcgtgccactgcacttcagcctgggcaacagagcgagacctattaaataaataaataaatattaaatctattaaatattaaatattaaatctattaaataaataaatacaaagggctgagagtcaggactgtgctgctagttctctaggggatcttgggcaagtgcagagaattcgcgtctctgatgtgtggtgtccctttctcaacatgggatgttagcagctaattcacaggcctttgatcagaggtaagggactttctgtagctattcaagtcttttttttttttttttttttttttttttgagatggagacttgctctgtcacccaggctggagtgcagtggcacgatcttggctcactacaacctctgctgcctgggttcaagtgattctcctgcctcagcctcccaagtagctgggactacaggagcccaccaccacccccggctaattttttgtatttttagtagagacggggtttcaccgtgttagccaagatggtcttgatcacctgacctcgtgatccacccgccttggcctcccaaagtgctgggattacaggcatgagccaccgcgcccggcctccattcaagtctttattgaatatctgctatgttctacacactgttctaggtgctggggatgcaacaggggacaaaataggcaaaatccctgtccttttggggttgacattctagtgactcttcatgtagtctagaagaagctcagtgaatagtgtctgtggttgttaccagggacacaatgacaggaacattcttgggtagagtgagaggcctggggagggaagggtctctaggatggagcagatgctgggcagtcttagggagcccctcctggcatgcaccccctcatccctcaggccacccccgtcccttgcaggagcaccctggggagctgtccagagcgctgtgccgctgtctgtggctggaggcagagtaggtggtgtgctgggaatgcgagtgggagaactgggatggaccgaggggaggcgggtgaggaggggggcaaccacccaacacccaccagctgctttcagtgttctgggtccaggtgctcctggctggccttgtggtccccctcctgcttggggccaccctgacctacacataccgccactgctggcctcacaagcccctggttactggtaagtacacacacccacacacgcacccagaagcctggggtcaggatgggtagcccagagtctactcaaccctgatacagaaggggaaactgaggcagggagtgtggggtgcagaggaaccctagaggagctgtaccagcacccaggtccaggaggcttgcctggtggctgaccgcaatctctctgtgtctgtcagcagatgaagctgggatggaggctctgaccccaccaccggtaagaacctcactgtgtgattctgggctgccttctggagctggaagatcaagccttactatgatccctggagcttggcacgcggccagcaccgggtagccctagtggacagaggtgttgggagcagagtcatcagtggatgagaccagcacagtgcctgccctcaaggggtgctcagtcagctggagttcagattcgtacacaggagctaacagttcaatggaaggagagccccatggtgctgggggacaagaggaaggaggcgggggcaggggactcaaggcagaagcaagagttctgctgggctacagtgagagcagggccaactgtgggaggtgtcattgcgggggtgtctgctgactgaaccagggactgtcccctcctggagaggcactgcgggtaaggggccttacttggcaagcagggctgacctggggcccctcttggcttccaggccacccatctgtcacccttggacagcgcccacacccttctagcacctcctgacagcagtgagaagatctgcaccgtccagttggtgggtaacagctggacccctggctaccccgagacccaggaggcgctctgcccgcaggtgacatggtcctgggaccagttgcccagcagagctcttggtaagggacatcagtggcctgaggccttgaccccattctcctgtctgcggtgggaagttgtggtttcacaacgtgttccctttctgccccctaactgacggagtccgccctatgccctgacccaccggatccagcgggcttcagccctggggtacccgcacgaacgcccctgactctgcctcccgaccgcggcccacgtaccccaattggctctctctggccctgccccaggccccgctgctgcgcccacactctcgccagagtccccagccggctcgccagccatgatgctgcagccgggcccgcagctctacgacgtgatggacgcggtcccagcgcggcgctggaaggagttcgtgcgcacgctggggctgcgcgaggcagagatcgaagccgtggaggtggagatcggccgcttccgagaccagcagtacgagatgctcaagcgctggcgccagcagcagcccgcgggcctcggagccgtttacgcggccctggagcgcatggggctggacggctgcgtggaagacttgcgcagccgcctgcagcgcggcccgtgacacggcgcccacttgccacctaggcgctctggtggcccttgcagaagccctaagtacggttacttatgcgtgtagacattttatgtcacttattaagccgctggcacggccctgcgtagcagcaccagccggccccacccctgctcgcccctatcgctccagccaaggcgaagaagcacgaacgaatgtcgagagggggtgaagacatttctcaacttctcggccggagtttggctgagatcgcggtattaaatctgtgaaagaaaacaaaacaaaacaaaaacggcttcttggcgtttctgcggggctggggtgttaagtggactggacttttctcgagggattcgaaggggacgggaatcttgtcaccccgggatctggcacccatggtggagtccagtgtggccttagctcccaagcctgcccctcccgagtccactctggctcaattaccccgagaaggagagagcaagtcgcggccacagcgagtgagtgaaccggagcccagatgagagcgctttaatggggctgcgaggtggcggagacagggtcgggatggggtgcagcagttggagacacagggtcagggcccctcatcctctattcactccaccggggcagtgaaagggtcccggcagcgagtgggtctggctggggacggggcgcagacttgagggaggtggggccagaggtggggtcccgggggccacaagtgcggcccggccagacaggcagttttcatgtttctggtaaacaaatgactgagaggaaacccttggcggggataagaaatgaggcccgggctaggccgcgcgcagatctgggtcagagaggaagggaaaaccccttccccgagctcggggcctgcctccacccaggatgcgccagcgacgccggttccggggtgcgggggagggggctgcatcctggagggggctgagccccgcaggaaaacaaagtcaccacccacggggctggggagagctctgcactctttgatagtcaacgaacatgcaaatatatgtaagtcggcatgcaaataagcagcatttgttgttgtttgcgtcagcagcttgggcactttttctgggcaaccgtggcggcgtgtgcactccagtgttgccaagggctggggatacggggggccagggtgggggtcagggagggtttccagcgcaggaggggagggctgtgcggctcccagcctttccaccagggcctggctggctggggctggggcggagggccccacggagctgcgaggctgcggacaggagtctgcggcctctagtacttagcgatgtcccccttcttcaggatgacctgtcgctgccagggcgccagcttgctctcatcgtagcccagcgtccgcagcttctctgactgttccttctcccgccgcagctcctcctgcttctgtcgctcctcctctttcctgaggcagtggggaggggggcagacccggtgaagtctggggccagatacccaggctggcagaaagggtggggccaggcaccaggcagaggccaggtcacccatgcaaggggtgggttactgagggctggggctcggttgctgaagacagaggggctagattgggggcagaatggggttactggagcacaggggagctgggtgagtgggaggttaaggctggattattgtg

SEQ ID NO: 24962 - DNA, 8974 bp, Homo Sapiens
cggacgcccggcgagtggcggaaagcgagaccccggcgccgagtgaggtcggccaggctgctgccgacttccccgctggcccctttgttcccctcccggggccctgccggcggcggttcccggttgcccgcgccagagcctcaggccggctccttttgcccttgagaagggttcgctgccaggccttcgagttccgggcgcagctcccgggagagccggcgccctgcctggcccggcggcctcctctcgggcacgaaggcttgctgctgcttctccagaacttcccttcctcgtagacacagcaaagagacttttaaaaaaccatggcagatgtggacccagatacattgctggaatggctacagatgggacagggagatgaaagggacatgcaactaatagcccttgaacagctatgcatgctgcttttgatgtctgacaacgtggatcgttgttttgaaacatgtcctcctcgcactttcttaccagccctttgcaaaatttttcttgatgaaagtgctccagacaatgtattagaggtgacagcccgtgccataacatactacctggatgtatctgcggaatgtacccgaaggattgttggggtagatggagctataaaagcactttgtaatcgtttggttgtagttgaacttaacaacaggactagcagagacttagctgaacagtgtgtaaaggtattagaactgatatgtactcgtgagtcaggagcagtctttgaggctggtggtttgaattgtgtgcttaccttcattcgtgacagtggacatctagttcataaagacaccttgcactctgctatggctgtggtatcaagactctgtggcaaaatggagcctcaagattcttctttagaaatttgtgtagaatctctgtctagtttattaaagcatgaagatcatcaggtttcagatggagctctgcgatgctttgcatcactggctgaccgatttacccgtcgtggtgttgacccagctccattagccaagcatggattaactgaggagctgttatctcgaatggctgctgctggtggtactgtttcaggaccatcatcagcatgcaaaccaggtcgcagcaccacaggagctccatccaccactgcagattccaaattgagtaatcaggtgtcaacaattgtaagtctgctctcaacactttgcagaggctctccggtagtaacacatgatcttctgaggtcggagcttccagattcaattgaaagtgcattgcagggtgatgaaagatgtgtgcttgatactatgcgtttggttgaccttctcttggtgctattatttgaaggacgaaaagctttgccaaagtctagtgctggatctacaggcagaatcccaggactccggagattagatagttctggggagcgctcacatcggcagcttatagattgtattcgaagtaaagataccgatgcacttatagatgcaattgacacaggagcctttgaagtaaattttatggatgatgtaggtcagactctattaaactgggcctctgcttttggaactcaggaaatggtagaatttctttgtgagagaggtgcagatgttaatagaggtcaaaggtcatcatcattacattatgctgcatgttttggaagacctcaagtagcaaagactctgttacggcatggtgcaaatccagatctgagagatgaagatgggaaaactccattagataaagctcgagaaaggggccatagtgaagtggtagctattcttcagtctccaggtgattggatgtgtccagttaataaaggagatgataagaaaaaaaaagatacaaacaaagatgaagaagaatgtaatgagcccaaaggagatccggaaatggcacccatatacttgaaaaggttattgccagtgtttgcacaaacatttcagcaaactatgctgccttcaataaggaaagcaagtcttgctctaattcgaaaaatgattcatttttgctctgaagcactgttacaagaagtttgtgattctgatgttggtcacaatttgcctacaatactagtggaaatcactgcaactgtccttgatcaagaggatgatgatgatggccacttgctagctttgcagatcataagggatatagtagataaaggtggtgatatatacaagcatcagctagccagacttggtgtaataagcaaagtgtcaacgttggcaggtccttcctctgatgatgagaatgaagaggaatcaaaaccagaaaaagaagatgaaccacaggaagatgctcaagaattgcaacaaggtaaaccatatcattggagagactggtcaatcattaggggaagggactgcttatatatttggagtgatgcagcagccttggaattatctaatggcagtaatggatggttcagatttatcttggatggaaaacttgccaccatgtattcaagtggtagtccggaaggtggatctgacagttcagaaagccgaagtgaattcttagagaagttacaaagagctcgaggccaagtaaagccatctacttcaagtcaacctatactgtcagcaccaggacccactaaacttactgtaggaaattggtcactgacatgtttgaaagaaggagaaattgctattcataattcagatggtcagcaagctacaatattgaaagaagatttacctggttttgtatttgaatctaatagaggaaccaaacattcatttactgcagaaacttccctgggttcagaatttgtgactggctggactggcaaaagaggcagaaaactgaaatctaagttagaaaaaacaaagcaaaaggtacgaactatggctcgagatttatacgatgaccattttaaagctgttgaaagcatgcctcgtggagtagtggtgacactcagaaacatagcaactcagttagagtcatcttgggaacttcatacaaatagacaatgtattgaaagtgagaacacttggagagatttaatgaagacagctttaaaaaacctaattgtacttttgaaggatgaaaacacaatttcaccatatgaaatgtgtagcagtggcttggtacaagcacttcttactgtgttaaacaatgtaagtatatttagggctacaaagcaaaaacagaatgaagtcccaaaggtgattttaagtgttttcaagactgcattcactgaaaatgaagatgacgaaagtcgaccagcagttgcgttaattcgaaagttaatagctgtactagaatctattgaacgtctacctctccatttgtatgatacaccaggatccacatataacctccagatacttacaaggagattacgatttcggttggaacgtgcacctggtgaaactgcattgattgacaggactggcagaatgttgaagatggaacctttggctacagttgaatctctggaacagtaccttttgaaaatggtagcaaaacagtggtatgattttgaccgatcttcatttgtttttgttcgaaaattaagagaaggacaaaattttatatttcggcaccagcatgattttgatgaaaatggaatcatttactggattggaacaaatgcaaaaactgcttatgaatgggtaaatccagctgcctatggacttgtagtagtaacgtcatcagaaggaagaaatctaccttatggccgcttagaagacatactaagtcgtgataattcagctttaaattgtcatagcaatgatgataagaatgcctggtttgccatagatctgggtctctgggtgataccatcagcatatacacttcgtcatgctcgtggttatggaaggtctgcactgagaaattgggttttccaggtatccaaagatggacagaactggacttctttgtatacccatgttgatgactgcagtctcaatgaaccagggtcaactgcaacttggcctcttgatccaccaaaggatgagaaacaagggtggagacatgtgagaattaaacagatggggaaaaatgccagtggacaaacacactacctctcattatctggattcgaactttatggcactgtaaatggagtatgtgaagatcagctagggaaagcagctaaagaagcagaagctaatcttagacggcagagacgtctagtacgttcccaggttctgaaatacatggttccaggagctcgtgttatcagaggcctggattggaaatggcgagatcaggatggcagcccacagggagaaggcactgtcacaggagaactacacaatggctggattgatgtcacctgggatgctggtggctcaaactcttaccgtatgggcgcagaaggaaaatttgacctcaagcttgcaccagggtacgaccctgatacagtggcatcacccaaacctgtttcatccactgtttcaggcacaacgcaatcatggagcagcttggtgaaaaacaactgtccagacaagacatctgctgctgcaggctcctcaagtagaaaaggaagcagcagttctgtgtgtagcgtggccagtagcagcgacatcagcttgggttcgaccaaaacggaacggagatcagaaattgtaatggaacacagtatagtttcaggagctgatgtccatgaaccaattgttgttctttcatctgctgaaaacgtccctcaaacagaagtagggtcatcttccagtgcaagcaccagcaccttaacagcggaaacgggaagtgaaaatgctgaaaggaagttaggccctgatagttctgttcgtactcctggggagtctagtgcaatatccatgggaattgtcagtgttagttctcctgatgttagttcagtatctgaattaactaataaagaagcagcttcacaacgacctcttagctcttcagcaagtaacagactgtcagtgagttctttgttggctgctggggcccctatgagctctagtgcaagtgtacctaacctgtcctcaagagaaacatctagcttggagagttttgtaaggagagtggcaaacatagcacggactaatgccacgaacaacatgaatctaagccgaagcagcagtgataacaacactaatactttggggaggaatgtgatgagcacagcaacttctcctcttatgggtgctcagagtttccctaatttgaccacacctggtactacatcaacagtgactatgtcaacatccagtgttactagcagcagcaatgtagctacagcaacaacagttttatcagttggtcaatctttaagtaacactttaaccaccagcctcacatcaacttccagtgagagtgacacaggtcaggaagcagaatattccttatatgatttccttgatagctgccgtgccagtactctattggctgagctcgatgatgatgaggacttacctgagccagatgaagaagatgatgagaatgaagatgacaatcaggaggaccaagaatacgaggaggttatgattctgagacgcccatccctgcaacgtcgagctggctcccgctctgatgtaacgcatcatgctgttacctcgcagctaccacaggtacctgctggagcagggagccgacctattggggagcaggaagaagaagagtacgaaactaaaggaggacgccggagaacatgggatgatgattatgtgctaaagagacagttttctgcattggttcctgcttttgatcctagacctggtcgtactaatgtccagcagacaactgatctagaaataccacccccagggacccctcattcagagctcttggaagaagtcgaatgtactccgtcacctcgattagctctcactttgaaagtaacaggtcttggaacgactcgtgaagttgaattaccactcaccaatttcagatcaaccatcttttactatgtacaaaaattgcttcaattgtcctgtaatggcaatgtgaaatcagataaacttaggcgtatttgggagcccacatacacaatcatgtacagagaaatgaaggattctgataaagaaaaggaaaatggaaaaatgggttgctggtctatagagcatgtggagcagtaccttggcactgatgaattaccaaagaatgacttgataacctacctgcagaagaatgcagacgctgctttcctgcgccactggaaattaactggcactaataaaagtattaggaaaaacagaaattgttctcagctcatagctgcatataaggatttttgtgagcatggaacaaagtctgggttaaaccagggggccatttctactcttcaaagtagtgatattcttaatttaacaaaagaacaacctcaggccaaagcaggcaatggacagaactcttgtggagtagaagatgtccttcagcttctgcgtattctatatatagttgcaagtgacccttattcaagaatatcccaggaagatggtgatgaacagcttcagtttacttttccaccagatgaattcactagcaaaaaaattacaacaaaaatattacagcagattgaggaaccattggcactggcaagtggggctctgccagactggtgtgaacaattaaccagcaaatgtccttttctaataccatttgaaactagacagctttatttcacatgtacagcatttggcgcctcaagagcaatagtatggttacagaaccgacgtgaagccactgtggagcgaacgagaaccacaagcagtgttaggcgagatgaccctggagagtttcgagttggtcgtctcaagcatgaaagagtaaaagttccacgtggcgagtcactgatggaatgggctgagaatgtcatgcaaatacatgcagatcggaaatcagttcttgaggttgaatttttaggagaagaaggaactggcttgggacccacattagagttttatgctctggtggcagcagaattccagagaactgacttgggagcttggctttgtgatgataattttccagatgatgaatctcgtcacgttgatcttggaggtggattgaaacctcctggatattatgtgcagaggtcatgtggactgttcacagcaccatttccacaggatagtgatgagcttgaaaggatcacgaaactgtttcatttccttggaattttcttggccaaatgcattcaagacaatagacttgtggacttacctatttctaaacctttttttaaacttatgtgtatgggtgacattaaaagcaatatgagtaaactgatttatgagtcacgaggtgatagagacttacactgtactgaaagtcagtctgaagcttctacagaagaaggtcatgattcactctcggtaggaagctttgaagaggattcaaaatcagaatttattcttgatccccctaaaccaaaacccccagcttggtttaatggaattttgacttgggaagactttgaattagtaaacccacacagagccagatttttaaaagaaattaaagaccttgctatcaagaggcgccaaattttaagcaacaaaggtctttctgaagatgagaagaacacaaaattacaggaactagtgctgaagaatccatcaggttctgggcctccacttagcatagaggatttaggtttaaatttccagttttgcccttcctcaagaatatatggttttacagctgtggatctcaagccaagtggtgaagatgagatgataacaatggataatgcagaagaatatgtggatttgatgtttgacttttgtatgcatacgggtattcagaaacaaatggaagcctttagagatgggtttaataaagtttttccaatggagaaattaagttccttcagccatgaagaagtccaaatgattctttgtggaaaccagtcaccatcctgggcagcagaggatattatcaattacactgaacctaagctgggttatacacgtgacagccctggtttcctgaggtttgtgagggttttatgtggcatgtcttctgatgaaaggaaagcattcttgcagtttaccactggttgttcaactctacccccaggtggactggctaacctgcatcccaggctcacggttgtacgcaaggttgatgctactgatgcaagctatccatcagtcaatacatgtgtgcattaccttaagttgcctgaatattcttccgaggagatcatgagagagcgcctgctagctgctacaatggagaaaggctttcatctcaattgagctttgaagtgcaatgggagacatcagagactttaaaaatactagtgaagcctcttgtgtttgtgtgcagagaagtatatgatccaccatgctaatgacacttgcctttttttccaccattaaggctttaagaacatgtggaataagttttttagctgctaatgacaaaacaaatcctgtaactacccagccagcaagtatatagcacagaacactgtgttactttacaagggcttatgtgactggaataaggtggtcccacttgactgttccaaagagcagcttctcagatcttcagtgttcactggtaaatttctaacagtgtatttgtgtaaagtttgtcatttcatactccatacactacagttgctgtcactgatccctgttttgctggcttttaagctacttggtcaaaaatcctgcttccttaaaacatagagaattaatgagcatctcaagctttttcttttcctttttaatgatgcctgcactatcaagagtattctagtgttctctctttgtttggcatataatcatgcaccaaactttttatttctttaaggtgggagtatatttttatttcctaaatgccatactatgaagatcaaagtcttaagtgtgtttgcagctcaaaaataaagatgtattaaggggggaaaacctggtctaagtgcaaggcacacttacagcgagttttactttcggttgtattttctttgtatattataaacatttatttaacttgttgccgtttgaagtaaaaaatttccaaaatgtatgctcaacaataatcattaaaatgtttgcagcgt

SEQ ID NO: 24963 - DNA, 3223 bp, Homo Sapiens
ggttcgggcagcgctctcccgggagcggcggcacgcgcggagcgccgggtgcggccatgcggggaccgggcccgaccccgagcccgaccccgagcccaagcccgagccggagcccgagcgagaccccgagcccgagcccgagcgcgacccccggtgcggcgcggctaccccggcggaggcggcgggcgcggggcgcgctctgaggcccgggggatgcgccgccgcctcgaccatgggcgccgccgcctccaggaggagggcgctgaggagcgaggccatgtcctcggtggcggccaaagtgcgagcagcccgagcgtttggagagtacctgtcccagagtcaccctgagaaccgcaacggcgcagatcacctgctggctgatgcctactctggccacgacgggtcccccgagatgcagccggccccccagaacaagcgccgcctgtccctcgtctccaacggctgctacgagggcagcctctcagaggagcccagcattaggaagcccgcaggcgagggccctcagcctcgagtgtacaccatctctggggagcctgccctgctgcccagccctgaggcggaggccattgagctggcggtggtgaaggggcggcggcagcggcaccctcaccatcacagccagcccctgcgcgccagccctggtggcagccgggaggacgtcagcaggccctgccagagctgggcgggcagccgccagggctccaaggagtgccccggatgtgcccagctggctcctggccccacccctcgggcctttgggctggaccagccacctctgcctgagacctccggtcgccgcaagaagctggagaggatgtacagcgttgaccgtgtgtctgacgacatccctattcgtacctggttccccaaggaaaatcttttcagcttccagacagcaaccacaactatgcaagccatctcggtgttcaggggctacgcggagaggaagcgccggaaacgggagaatgattccgcgtctgtaatccagaggaacttccgcaaacacctgcgcatggtcggcagccggagggtgaaggcccagacgttcgctgagcggcgcgagcggagcttcagccggtcctggagcgaccccacccccatgaaagccgacacttcccacgactcccgagacagcagtgacctgcagagctcccactgcacgctggacgaggccttcgaggacctggactgggacactgagaagggcctggaggctgtggcctgcgacaccgaaggcttcgtgccaccaaaggtcatggtgaggcccagcccgggcagtgctcctctacaccccgagcaggactccgccccaacccgagtccagccagctctgcctgggaccacgcagccttctccagctgcctgggggagggtgtctcacagggctatacccttgggctgcctggcagccagaaggtagcctcatgggggctcccacagccccttggcttttggatgggcctggggcccctgagcagctctttgtctccgcagctcatttcctccaaggtgcccaaggctgagtacatccccactatcatccgccgggatgacccctccatcatccccatcctctacgaccatgagcacgcaaccttcgaggacatccttgaggagatagagaggaagctgaacgtctaccacaagggagccaagatctggaaaatgctgattttctgccagggaggtcctggacacctctatctcctcaagaacaaggtggccacctttgccaaagtggagaaggaagaggacatgattcacttctggaagcggctgagccgcctgatgagcaaagtgaacccagagccgaacgtcatccacatcatgggctgctacattctggggaaccccaatggagagaagctgttccagaacctcaggaccctcatgactccttatagggtcaccttcgagtcacccctggagctctcagcccaagggaagcagatgatcgagacgtactttgacttccggttgtatcgcctgtggaagagccgccagcactcgaagctgctggactttgacgacgtcctgtgaggggcagaggcctccgcccagtcaccatcaggccactccctctgcaccgggacctggggctgggccgcctcgtgctccccgggactgtgtggctccggtctcgcctggagccacttcagggcacctcagacgttgctcaggttccccctgtgggttccggtcctcgctgcacccgtggccgcagaggctgcagtccctgggggccgggaggatcccgccctgtggcccgtggatgctcagcggccaggcactgacctgccatgcctcgcctggaggctcagctgtgggcatccctccatggggttcatagaaataagtgcaatttctacacccccgaaacaattcaaagggaagcagcatttcttgttaactagttaagcactatgctgctagttacagtgtaggcaccccggcccagcagcccagcagcccacatgtgttcaggaccctccctgcccaccccctccctgccgtatcgatcaccagcaccagggtggcccgtgtgcgtggggccagcgtcgccgggctgcccagcctggctctgtctacactggccgagtctctgggtctgtctacactggccgagtctccgactgtctgtgctttcacttacactcctcttgccaccccccatccctgcttacttagacctcagccggcgccggacccggtaggggcagtctgggcagcaggaaggaagggcgcagcgtcccctccttcagaggaggctctgggtggggcctgctccccatccccccaagcccacccagcactctcattgctgctgttgagttcagcttttaccagcctcagtgtggaggctccatcccagcacacaggcctggggcttggcaggggcccagctggggctgggccctgggttttgagaaactcgctggcaccacagtgggcccctggacccggccgcgcagctggtggactgtaggggctcctgactgggcacaggagctcccagcttttgtccacggccagcaggatgggctgtcgtgtatatagctggggcgagggggcaggccccccttgtgcagagccaggggtctgagggcacctggctgtgttcccagctgagggagggctggggcgggggccgggcttggaacgatgtacgataccctcatagtgaccattaaacctgatcctc

SEQ ID NO: 24964 - DNA, 3399 bp, Homo Sapiens
gcattctaatccgtttcacacacggtgctgctacctcgtttgcttcgtgcgtgcgtgcgcgcgcagatgtgggccccgcgggagcagctactgggctggactgcggaagctctgcctgccaaggattctgcctggccctgggaagagaagcctagatatctgggaccagtgactttcgaggatgtggctgtgcttttcactgaggcagagtggaagagactgagccttgagcagaggaacctatacaaagaagtgatgctggaaaatctcaggaatctggtctcattggcagaatcaaagccagaagtccatacctgcccttcttgccctctggcctttggcagtcagcagttcctcagccaagatgagctacacaatcatcctattccaggtttccatgcaggaaatcaactccacccaggaaatccctgcccagaggatcagccacagtcacaacatccttctgataaaaatcacaggggggctgaagcagaagatcaacgagtggaaggaggcgtcagacccttgttttggagtacaaatgaaaggggggctttagtgggtttctctagcctgttccagagaccaccaataagctcttggggaggcaacagaatattagagatacagctcagtccagcccagaatgcaagctctgaggaagtagacagaatttccaagagggcagaaaccccagggtttggagcagtcacgtttggggagtgtgcactagcttttaaccagaagtcaaacctgttcagacagaaggcagtcacagcagaaaaatcttcagacaaaaggcagtcacaggtgtgcagggagtgtgggcgaggctttagcaggaagtcacagctcatcatacaccagaggacacacacaggagaaaagccttatgtctgcggagagtgtgggcgaggctttatagttgagtcagtcctccgcaaccacctgagtacacactccggggagaaaccttatgtgtgcagccattgtgggcgaggctttagctgcaagccatacctcatcagacatcagaggacacacacaagggagaaatcgtttatgtgcacagtgtgtgggcgaggctttcgtgaaaagtcagagctcattaagcaccagagaattcacacgggggataagccttatgtgtgcagagattgaggccgaggctttgtaaggagatcatgtctcaacacacaccagaggatacattcagatgagaagccttttgtttgcagagagtgtgggcgaggctttcgtgctaaatcaactctcctcctacaccagtggacacattcagaggtgaaacctcacgtgtgtgaggagtgtgggcatggatttagccagaagtcgtcgctcaaatcacatcggagaacacactcaggggagaagccttatgtgtgtggggaatgtgggcggggatttagccggaggatagtcctcaatggacactggaggacacacacgggagagaagccttacacgtgctttgagtgtgggcgaaactttagcctcaagtccgctcttagtgtacatcagaggatacactctggggagaagccttatgcatgcacggagtgtgggcaaggctttatcacgaaatcacagctcatcagacaccagaggacacacacaggagaaaagccttatgtctgcggagagtgtgggcgaggctttatagctcagtcaaccctccactaccaccggagtacacactccaaggaaaaaccttatgtgtgcagccagtgtgggcgaggcttttgtgataaatcaactctcctcgcacacgagcagacacattcaggggagaagccttatgtgtgtggggaatgtgggcggggatttggccggaagatactcctcaacagacactggaggacacacacaggagagaaaccttacgcatgcatcgagtgtgggcgaaactttagccacaagtccactctcagcttacatcagaggatacactcgggggagaagccttatgcatgcgtggagtgtgggcaaagctttaggagaaagtcacagctcatcatacaccagaagatacactcggggaaaagctttagaggtgcaaggagtgaggatgtgattttagcaacaagtcagccatcagccacaccagcggaaatgcttagggagaagccttgtttgtaaggtaatgtggacagagctgtacgtggacatcattacttgtcacgtgtcagaggacacactcgggagaaaccttcatggagtgagagtaaggtgttggctggaagtggccccttaagagatacttggagtcaaatctatccactgtacgcccaccccactcttgttctaagagctttggggacagtcttttgaccccttacattcctttagatgtgaagatgacagagatctaacttctgagagcagaggtgtcaagtgacggtccccttggaggaatggtctttgcatctgactacttccttctgcaactgtgttcttccattagcttccatgacactctcctgctttatttttttctacatctctagcctttgctgtttcctctcctaccccacctttagattttactcagagttcagtctccagccctacaatctgagggacacctttaccaggtccccttcctaaccctccagtcccaaatccaagattctttaaccacactctaaaagttcttcagactcaggacttaaacatagccacgccaccttggccttcaatgacagggatctagcaatgctgcatcatcagccttccaataccaggtttaagggtattttaaacacagctcctcttaaatcctccaatctcagtacccagtgttttagccatgctcgggtggctaaattacatccaggaatggtgccagggcctttagccatttgtctctcctcacactccagggcccatatggcccaggttctgacagtttgccttactcccttgggctggggctagccctacctgataccctgtgtcaatgagtgtaccttggagagctatccactcaggccccagtgcctctatttgctaagggactctgccacagaaaagaaggggagagatgttcatgtaacctcaaaatacttaggcttggttttgatgctagagaggaaaaaggacttggagagagagaaggaatggctggtccagaggcttttgtccactccctctcactggaagtggttgatctccagggaatccccaaggttagcctgcttaggggaagggctaggggtacctggaatgtaggatctcccccatgcctggcctaccaccctaatgtgtctggaattggtgggttcttggtcttgctgacttcaagaatgaagccgtggaccctcacggtgagtgttacaattcttaaaaaaaaaaaaaaaaaaaaaaaaaaaaaaaaaaaaa

SEQ ID NO: 24965 - DNA, 7401 bp, Homo Sapiens
gaagagttctgcactttgttccttccctggcacacctgtgtctgcattccttctatctcccggcattctccactcctgtctctgtgtgtttaaaaaccggtgtgggaagtgtgcacgcctgtgacgtcagactccagaccatgtatttcctgactcccatcttggtagccattctctgcattttggttgtgtggatctttaaaaatgccgacagaagcatggagaaaaagaagggggagcctagaaccagggccgaagctcgcccctgggtggatgaagacttaaaagacagcagtgacctgcaccaagcagaagaagatgctgatgaatggcaagaatcagaagaaaatgttgaacacatccccttctctcataaccactatcctgagaaggaaatggttaagaggtctcaggaattttatgaacttctcaataagagacggtcagtcaggttcataagtaatgagcaagtcccaatggaagtcattgataatgtcatcagaacggcaggaacagccccgagtggggctcacacagagccctggaccttcgtggttgtgaaggacccagacgtgaagcacaagattcgaaagatcattgaggaggaagaggagatcaactacatgaaaaggatgggacatcgctgggtcacagacctcaagaaactgagaaccaactggattaaagagtacttggatactgcccctattttgattctcattttcaaacaagtacatggtttcgccgcaaatggcaagaaaaaagtccactactacaatgagatcagtgtttccatcgcttgtggcatcctgctagctgccctgcagaatgcaggtctggtgactgtcactaccactcctctcaactgtggccctcgactgagggtgctcctgggccgccccgcacatgaaaagctgctgatgctgctccccgtggggtaccccagcaaggaggccacggtgcctgacctcaagcgcaaacctctggaccagatcatggtgacagtgtaggcagggccccccaagggagtggcagggagatggcgcccctgcttttccctgagcctctcgcctgctcctcttgggtctcttggctgctctttctccaggtgtcaggtcccctcattgctcttctcaggtggccacactatgtcaagaagcctctccacactctgtggcacttccagtcccataaatcctgtttcttatccactttggaaatgcatgaacactttacaaagaacatgcccgggtttttacattttaaaagttattctagacaatcactattggcttttttcttttatttttaaaaaactcacatagaggagacaatcagaaatttaccatagtcccaagaattcagctacatgatgactcgaatttaaatttagattaatcaaatggtctcctgttctctgatttctggtggcttttagacactaatttttgagaactacttttttttttttaccaaacttcagggacactctgctagttttgaataagtaaccatcaaagttactaaaacatggccaggcgcagtggctcatgcctgtaatcccagcactttgggaggccgaggtgggcagattgcctgagctcaagagttcgagaccagcctggccaacatggtgaaaccccatctctactaaaaatacaaaaaattagctgggcatgcacttgtaattccagctactcaggaggctgaggcaagagaactgcttgaatccgggaggtagagattgcagtgagtcaagatgctgagatgccaccactgcactccagcctgggcaacagagcgagaacctgtctcaaaaaaaacaaaaacaaagttactaaaatgtcaccttcacagaacaggacagggtacccttgggtcgcacgggcctggctggcatgtaaacggtcagttgcactgcctagtggtttggtagatctgacttgtaagcagttcatagaagctgctcaatactcaagaatcttgcaagacagttattaaacattcatagcttgaaattgcccatggtgggagagtttacatcacaaccactacaaatcagcacttgctttcttcttcttaaagagagctgcttaccatacatagcacccacagtgtctcccttctcttctaccccaacccctgaaacacactgacccctattctccagatgacagcacagctgtttgggactgatagggtcacagttgccaggttgggaatgctagatgtagtcttcacccatcaccttctgtcgtcctcccaggggtgtcatatttacagaggcaaactcttacagcttggatgatttctcatcaagcaactctactcacctctttttcccctttccctgtgcgtttcttcttcttgtcctcattttccttgagaaaactctctctataaaaaatttccatagagtatgtggctgataaacaacagaaatttgtttctcacagttctggaggctggaagtccaaggtcggggtgccctcatggtcaggtgctggtgaggaccctgatctgggttgcagactgctgacttcttattgtgtcctcgtggtagaaagagggttagagcctctggcatgccttttataagggtactaatcccatcatgaggccccgtccttatgacctcatcacctcccaaaggaccccctcctaataccatcacattgggggttagggtttcaacatatgaattgcgggggacacaaacattccgtccatggcacctacttcatagggtttggcatgctgctcggtacatggttaacattcataaatggtgggggcccttactgtggtagaaaccattgtcactgcaaggcagccctgcttgggattcaggtgaacaaatgtaacgtgggtgggtgagggactccctcctcttcagagaagccctcctgtggctcaggggcagctgcagggccagatggagttggcctgcagggagtcagccttaccccatcagagaccaacttgaaagatttttttctctgtgtagttcgtgttatcaatctgatctgcagccaggttatttacttctgaagcattggagttatcgattgccattgccccatggttctcactctttgcaggcactcttcaaatttttattttaaaaattataatgcaaacatctggccatcaccttaaccaagtgacaaagtcctagcacaccattaatggtaggataactgacattaagtgttcctgctgggatgaattatgaagtattccttccaaagatgtcaatggaaactaatcgagtcttacacctaattttcagtttacagtaaatacagaggataaagaagttaatggcatggtggaataaccaaaatgtgtatcattctacaaaaaaataggcctggactatttaaggagtgagtgtcactgtgggaagaataagagggggactgtcttgtccttgctactcaaagagtggtcctgggcctgtatcatcattgggaccacctgggcgcttgttagaatcaaagactctcaggcctcacctagacatccagaatcaaaatctgcattttaacaagatgcccaggtgatctgcatgcctgttaaagtctgagctctgttgcagataaccagagacccaacaaccaaaggcaaagcgtaagccttgattggattttggtttaggaaaaatctcataggtataaaagacaactgggaatgttgaatgtggatctggtggtaggtgatattgttagtgatgtgagtgatgcctgctgaagtactgagagatgaagcatcatattgacaacttactccaggaaaaaaggtgtgtgtataggtgtgtgtttggagagtgtgagcgagaactaacatggtaaaatgttaggtggagcatatacagttctcattatactcttattttaaatttatatttgaacacagtcaaatctgaatggaaatacatttaaataagcatttctttcagtcatataagtaatttgcctaaaaatgccctctaagtccatcattaggttaagcgatttactgaaggtgcagatatcatgcttatttcattgggttgttttggaatgtcccccacttggagagtttgaggaatggaaatgagaatcggaggagaaataaggccagaggctcacattgcttgcagggaaccgactgagtaatgaagaagaggaaggaagcccttggaaggaacgtaaaatccatttcagcctgccgccccttggaatggagggtcttctagggaccagaaacaccagacacttcttctgccccaagcacaccccacactaatttctgctgcagcatcacgatcagggcaaatcagcacagccccccagccatcagtggtgtctagaaaagtaaggataattttcttccttctcactgcagccccaagctcttattaaccttcttttatgtgttcattaaatgcagtcatgtgacaactgtgttcaaagttagaaatagtggtcggggaggcttatagatcctcttgctgttctgaggccttaaaaccaaaaaaataatggaatgattgcatcactgcgaggaagtatacttaattaagaaagttgaaaatggtttgtgtcttactaataggactcacctgaagactctactttgccaagagggaatttttaactcaaagttgtgtcagccagcacggggtagagccatggtcctcatacttgctggcatccctcatctggtggtctgttaaagcacagattgctgggccgcaccctcagggtgtgtgattgtgtgattcagtattgctgggtggtgcccaaatgctccagttctaatgtattcccaggtgttgctgatgctggtgattgggtaccacattttgagaaccatggggcattggcaatcaacaaatgcaatgcttgtgacttgacgtgataaaagttcatttattgggcaggcaaagtcctctgcaggcctggaaaccctccgagacaattacttgcatggggtaacccagtaatactgtgggatgcaacttctagggcatggctgcctccttcctagaggcagcagggggagaaaacactggaagaggtcaccccaacaattccatcgtaccttggcctaggagtgacctcctcagtctcacaaccctttggctagaactagtcatgtgacctcacaggaggtggagcagtgtcgtcaatgttatcatccccctgcacctgcaaggaaggaggcccagatgtgtgtaggtgctggatgtctcttccccaaaacatataactctggatttggaaaacaaaactggatataacagaaaagaaaaggaggggagaaggaaagttgaagaaattggtgaaatcagaataggacagtgaaaggcataaagattttcttctgaaacgctaagatcggttgatatttgtctaatacagctttaaatagagtatcactttgggccaaagaaaattgatataaacatacataaagtggaactaagattgacttcttcctagacatctctgcctctgtccacaaaatggaaacttccatcaaggagtactggaggacagttcagtatttcttcttatttgctcctccctatgaaaggaagagtgacttctctgctgcatgatattgggggtaaatagttattgcacatttgctcaaaccccagcaaagtgcaccccattttaagccaaatttacaaacttacaaagatgatccaccaatagttttctctatttactttattcttgctctgtcacccaggctagaatgcagtggtgtgattatagctcactgcagcctccaacttctggactcaagtgatcctcccaccttagcttcccaggtagctgggatacaggtgcacgccaccacacccaggctagtttttctaaatattggagttcccaaagagtattcaaactgatgtgatattttaaaagacattttgtaagcatcttttaggaatatcagtaagtggaagaaaaacacatagttatcagtggatattatgccagagaggcatgagaaatataattttattttgctaggtatcagcagagtgccctcttataatttgtgtgaaatggaaacaaaggtaacatcgtgttttcaattcacacatatatacaagtaatgagaggtccagaagaaatgtggcttcagctctgctgctactgtgcctcccttctcctgccccactcagcccacaaaataggctggacactcaaaaaacgttgcgtttatctaccttttagagagggtgaatagcagagaactggaggtgggaatggtaaggaactcccagcagggtagtggagggaatgggctgacgcatctaaggctgatgccaggtctgctccctatctgggtggcctcagcaaatgacgtccagcacatccaggggcaggctcaagggagaacagcccccaaagctaagatcctgccaagctaaatacagtagttctaatgaaatgtgagaggctataatcccatttgggaaattcctaaaaagtcatgaggcaggggattggtttatgttattatcatgacctgagagtcatggctcagagccaaatgttcaggattgaattcaacagcatttaaatgtctttagagcaggatggaaatatgttagcaatgcctgcagagtgccaagtaaacgcaaaagccaatgagatcataaaggaagttgttagctaacctaggtggagtcgccaacttccttctactctaataattaaaaataaaaataatacttgggaggtaactggaataaaggttctaaaatcaaaaccctctgaagggtgaaaactgggagcctcctgttcccatagtaaccacagcactcagggcactgtctcccagcgctggagtactgtcttatgaccagagatcctaagcaacctctgctcatctgagttgtccaccatattgtgggcatgagtccttgacaatagtaaatagcacctctgttcccttattgggtaaatgattttccaactctgggaatgtgtagaattcattatggaaataatgcaataattcaaatccataatattgatactttcatgttaagtttaggactaatcttgtgtatgctccttaagtgatttgaatctttaaaaagcttatgattccaatttgaaatgtgaaattgattttacgtttgtgatttgaagttgaaaggtataagaatatttaacttagctcatgaaaagtattagactagatttactataagtttaatgtattagatttacaagagatgcttaaatatatgagaatgttttgtcttaattggttataatcttgtcatatcaatgatttgaagtgctaaaatagaaaattaaatatgataaattacacaagaagtttagaatgtttaaaagattttaataaacaaagcctataactaag

SEQ ID NO: 24966 - DNA, 3629 bp, Homo Sapiens
gggagaggactctgcgggcgaagtggctgcgcaaggagagaacttttcctgcacaaggaacgcctcgtggggagacccaaggcaggagcggtccggagccggctgcggcgtgtgcggccggccttgggacagcgatcgccgcgggtggcaacagagagccccaagcaaaagtgggagcaggagcttggaggtgagcacaggaagccccacttgaggcttttacgcagcctctagtctctgtttcttctggaataggcaagtgtcctttcaactctaagagaccagcagaggccactgtcccttaagactgccggagtcctcaccacttctccaggattccagaggagactgtggcgatggtgaatgaaggtcccaaccaggaagagagcgatgacacccctgtgccggagtccgcactccaagcggaccccagcgtctcggtccatcccagcgtctcggtccatcccagcgtctccatcaaccccagcgtctctgtccaccccagcagttcggcccaccccagtgccttagcccaacccagtggcttggctcaccccagtagctcgggccctgaggacctcagcgtgatcaaggtgagcaggcgccgttgggccgtggtcctggtgtttagctgctactccatgtgcaactcctttcagtggatccagtacggctccatcaataacatcttcatgcacttctacggtgtcagtgcctttgccattgactggctgtccatgtgctacatgctgacttacatccctctgctcctgccagtggcttggctgctggagaagttcggcctgcgcaccattgctctcactggctcggctctcaactgcctgggggcctgggtgaagctgggcagcctgaagccgcatctctttccggtcaccgtggtgggccagctcatctgctctgtggcccaggttttcatcctgggcatgccctcccgcatcgcttccgtctggttcggggctaatgaggtttcaacagcctgctccgtggctgtctttggcaatcagcttggaattgcgattgggttcttggtccctcctgttttggtacccaacattgaagaccgggacgagcttgcctaccacatcagcatcatgttctatataataggaggtgtggccactctcctcctcatccttgtcatcattgtgttcaaggagaaacctaaatatccccccagcagggcccaatccctgagctatgccttgacctctcctgatgcctcatacttaggttccatcgcccggctcttcaaaaatctcaactttgtgctgcttgtcatcacctatggtctgaatgctggtgctttttatgccttgtccactcttctgaatcgcatggtgatctggcactacccgggggaagaagtgaatgctggaagaattggcctgacgatcgtcattgcaggaatgcttggggctgtgatctcaggaatctggctggataggtccaaaacctacaaagagacaaccctggtagtctatatcatgacactggtgggcatggtggtgtacacgtttaccttgaacctgggacacctgtgggtagtgttcatcactgctggcacaatgggcttctttatgactggctatctcccactgggatttgagtttgctgtggagctcacgtacccagaatcagaaggcatctcctccggcctcctcaacatatctgcacaggtatttgggatcatctttaccatctcccagggccagattattgacaactatggaaccaagcctgggaacatcttcctgtgtgtgttccttactcttggagcagccctcactgcattcattaaggcagatctccggagacagaaagcaaacaaagaaactcttgagaacaaactccaagaggaggaggaggagagcaacaccagcaaagtgcccactgctgtgtcagaggatcatctctgagaggaaggtggtgacaactcagggaacacgaacaccccaccttttccttcagcacagctctcaccgccagcacaaagggcttcgctagagatgctttcggagggaatcagtgggactatttgtggcatggatggcctattcctcctagaacccacgtaagagcttggatgatttagttggagaaaattgcacctatcaccaaatgcaaatttgattcccacctccacccccttttaggttatgggagttggtgttgggacagggtggcagagaatattggagtcaatcctagcttggtctcttgccttccctcttttcctccatccatcgtggacaatgcctgcaaaattttcacaggaagaaagcctattcaggatattaacttgaaatttccagtgtcctaagagcctctcatgaagcccagttctaataagtggcaagctgctctgccggggtcatctcctgggtcatcggactgattgctcaagttctgcaggagaggaagcaccattagaacaactccatcagaacagctccaccgggacttgtgggcctaaattttcctggcctaacgggtctgtctccaaaccctctttcctaagagctgagcaaaccaaccataataaacttgacaaaagactttgttgtggccatgacagagataccgactcaggagggctacctacctaggtgtgatcatgctgggggctaccttctgagtatatttgtgaaagcacatatttgggaactctggtagcttgagttgggaatgggaaggttcttttttacagaagtacttccccagggacttctgtgtgtcacagtcacctctgatgcctttatcttgatgttgcattgggaatctcagccatcagcccaagtgcttgttttattccaaggcagggtaatccccgtcaacttactctaacctttgctgaaaactaatcttgattcattctactctgaaaatccaaaggtgcttctgagagataagagggaaggggtagaaggaaaggtgccccttgaaatgggaattgagcctgttagaattaaaagcttatctcacctctgctggggacagtatttgcaccaccaacccctctcctcacctgctttgagcgataatctttatcagatattctaaacttaaagggattccctttaaaccaactcaagctgatctttcctatctagcctgctgtttggctgtactcatgggctttggtaatatctcctaaaaatgaggttttggtaatttttcctatgcattgggcaactgtgatcgtgaccactgtgctgtcttgctccagccactgccctggcctcagcatatcagggcagcctgtgctggctgcaatactgtggtgcttgggccactgcctgagaggagccaggtttgtgtgtgtctgcatgtgtgtgtgtgtgtgtttgtacagattcaagcaatggatgcaaggaacatgctgtatgtaatagaagaaagaagtccacgttttcggcagaagtagtgagtcagtgtggaagagaggtgagggtgtgctttactttttgataaagagaaagatgtttactcataaacccttcaaaaggtattaacaaaatgtttaccaaacctattgctttattttaaaaacataatttgtgttttctatttgtaagatctgacatttcgaggcaataaaaacttctcag

SEQ ID NO: 24967 - DNA, 2759 bp, Homo Sapiens
tgcccctccaccccagccagctcatgggccacgtggcctggcccagcctcagcacccagggccagtgaacagagccctggctggagtccaaacatgtggggcctggtgaggctcctgctggcctggctgggtggctggggctgcatggggcgtctggcagccccagcccgggcctgggcagggtcccgggaacacccagggcctgctctgctgcggactcgaaggagctgggtctggaaccagttctttgtcattgaggaatatgctggtccagagcctgttctcattggcaagctgcactcggatgttgaccggggagagggccgcaccaagtacctgttgaccggggagggggcaggcaccgtatttgtgattgatgaggccacaggcaatattcatgttaccaagagccttgaccgggaggaaaaggcgcaatatgtgctactggcccaagccgtggaccgagcctccaaccggcccctggagcccccatcagagttcatcatcaaagtgcaagacatcaacgacaatccacccatttttccccttgggccctaccatgccaccgtgcccgagatgtccaatgtcgggacatcagtgatccaggtgactgctcacgatgctgatgaccccagctatgggaacagtgccaagctggtgtacactgttctggatggactgcctttcttctctgtggacccccagactggagtggtgcgtacagccatccccaacatggaccgggagacacaggaggagttcttggtggtgatccaggccaaggacatgggcggccacatgggggggctgtcaggcagcactacggtgactgtcacgctcagcgatgtcaacgacaacccccccaagttcccacagagcctataccagttctccgtggtggagacagctggacctggcacactggtgggccggctccgggcccaggacccagacctgggggacaacgccctgatggcatacagcatcctggatggggaggggtctgaggccttcagcatcagcacagacttgcagggtcgagacgggctcctcactgtccgcaagcccctagactttgagagccagcgctcctactccttccgtgtcgaggccaccaacacgctcattgacccagcctatctgcggcgagggcccttcaaggatgtggcctctgtgcgtgtggcagtgcaagatgccccagagccacctgccttcacccaggctgcctaccacctgacagtgcctgagaacaaggccccggggaccctggtaggccagatctccgcggctgacctggactcccctgccagcccaatcagatactccatcctcccccactcagatccggagcgttgcttctctatccagcccgaggaaggcaccatccatacagcagcacccctggatcgcgaggctcgcgcctggcacaacctcactgtgctggctacagagctcgacagttctgcacaggcctcgcgcgtgcaagtggccatccagaccctggatgagaatgacaatgctccccagctggctgagccctacgatacttttgtgtgtgactctgcagctcctggccagctgattcaggtcatccgggccctggacagggatgaagttggcaacagtagccatgtctcctttcaaggtcctctgggccctgatgccaactttactgtccaggacaaccgagatggctccgccagcctgctgctgccctcccgccctgctccaccccgccatgccccctacttggttcccatagaactgtgggactgggggcagccggcgctgagcagcactgccacagtgactgttagtgtgtgccgctgccagcctgacggctctgtggcatcctgctggcctgaggctcacctctcagctgctgggctcagcaccggcgccctgcttgccatcatcacctgtgtgggtgccctgcttgccctggtggtgctcttcgtggccctgcggcggcagaagcaagaagcactgatggtactggaggaggaggacgtccgagagaacatcatcacctacgacgacgagggcggcggcgaggaggacaccgaggccttcgacatcacggccttgcagaacccggacggggcggcccccccggcgcccggccctcccgcgcgccgagacgtgttgccccgggcccgggtgtcgcgccagcccagaccccccggccccgccgacgtggcgcagctcctggcgctgcggctccgcgaggcggacgaggaccccggcgtacccccgtacgactcggtgcaggtgtacggctacgagggccgcggctcctcttgcggctccctcagctccctgggctccggcagcgaagccggcggcgcccccggccccgcggagccgctggacgactggggtccgctcttccgcaccctggccgagctgtatggggccaaggagcccccggccccctgagcgcccgggctggcccggcccaccgcggggggggggcagcgggcacaggccctctgagtgagccccacggggtccaggcgggcggcagcagcccaggggccccaggcctcctccctgtccttgtgtccctccttgcttccccggggcaccctcgctctcacctccctcctcctgagtcggtgtgtgtgtctctctccaggaatctttgtctctatctgtgacacgctcctctgtccgggcctgggtttcctgccctggccctggccctgcgatctctcactgtgattcctctccttcctccgtggcgttttgtctctgca

SEQ ID NO: 24968 - DNA, 2062 bp, Homo Sapiens
ctctccctccttgcgcgttccgggtctcgcaagcgcctccaaggtttgtcttgaagcatagctccagctggagggtaccttttaagctgttcaaggtcaagatgaatacaaactcaaaggaggttttatccctgggtgttcaagttcccgaggcatgggaagaacttctgacaatgaaagtggaagcaaaaagtcaccttcaatggcaggaatccagactgaaacgcagtaatccactggcaagggaaatcttccgaaggcactttcgacagctgtgctaccaagagacccctggaccaagggaggctcttactcgactccaggaactttgctaccagtggttgaggccacatgtgagcacaaaggagcagattttggatctgctggtgctggagcagtttctatccattctgcccaaggagctccagggctgggtgagggaacactgtccagagagtggagaagaggctgtgattttgctggaggatctggagagagagctcgatgaaccacaacatgagatggtggcccacagacacagacaagaagtcctctgtaaagagatggtgcctctagcagagcagacaccactgacccttcagtcccagcctaaggagccacagctcacatgtgactctgctcagaagtgccattctattggagagacaggtgagggacagcatttatttgatgttgaacgaatcccacctggtcaagcaaaaacaaacaataaacccagagctgggaaaacaggagacccaaagactccttaccagatagcagtaatggtcagttcttctgagagcctagtgtgctcatctttgacccttctccctgcgtgcagacttctccctgagtaccaccctggaagctttctggacttctgatgcatggtacatgaggaaggctttcagggatcgctgtggagcacagcttcagagaatggacttcaaggtttgacagacaggttcagatcctggcatcgcctcatggaagctgcttgtattgggcagattacttaaccacttgacctcagatccctcatctacaaaatggggttgataatagctttggtttagtctacttgcgctgccttaagagaataccacagactggttgtctttaacagaaatttattttctcacattttcaaaggctagtagtccaagatcaagataccatcaggtttggtttctggtgaggcctcttcctggcttatagatggccatcttcttgctgtatcctcacatggcctttcttctgtatgcatacagagagagagcaagctctctcatcttataaggacagataccattcctacccgatagggcccttccttataacctcatttaacttttaataccttcctcaaggccctatctccaaatataatcatattgaggggttaggacctcagcatatgtgagggaatacaatttagtccgtaaccagtatgtacctcagaaagtcattgtgagtatcaaatacaatttatgaaaagcacttggcatgcattatgcttaatacatggtcactattgtcacaaatcaccagtgccacccttgctgatttgggttcatacttggagtagaaagatatcagatatgcttagtaagtggcagaactgtatgggagaatccagtgaaatcagactttgccatttccttctctgtaatcttctgagtggtggcagtgaccacccttgtggatatagtactgagcacttgggactgagtcagctgctttcccattctagccctccctgcaggaattggctctagcttgtctgatttcccacacataaaatcatgccctcttactgactttttgttaatgttctgacaatcaatctgtagcaaggttctactgttttcagtttcatattacccctatatgcatcaaagctgcaacttcccttgcctctttgtccctaggttctgtttatttcatttaccctagcaattatggatttctattacatggaactcatctcttgatttaaattaaagtgtatgtgttgagtaaattctgtgcagaccttcttatagcttctgtgacttta

SEQ ID NO: 24969 - DNA, 38945 bp, Homo Sapiens
agattgggtcacactgagagaaaataaagctgtctaaggagtgtagccacaatgagaaatacctggtggtgctcagctcaccagctctagctgtttctgagaactaatgcaagcctgcccttgtcatctcagattgttccacatattctagaataaataaactgatgatccaaatttgtcagagctggtttctaatcctagcacccaacgaaagtctaaagtactaagtttaggcaataccctaggctgccattttttaagacaggaacttgctgaatttagagccctctctctcaagggcttcagcaggcccccaacctcagcctgcttcctgaactgtgtgatgcagagtacactctgtattttatactcaaagtatagcaggatagtatatttcaaagaatcaaatggaaataaatgaatctctgaaaaacatgtgttcaaaaatgcgataaggattagaagtttagtttcaagattcttcaaaatcatgtatctatataaatatatatatatatttgtgaattcaaatggtttatggtatgatttacaagatatatgagatctctactgactaaaaatcaaatgtatgttaacacttgcaaagtgttgtgagaaaaaaaggttatgtatctcactagtgattttaatgaaacttaaagcataataacatttattacttaattattatatggctacccacaatggtgtatattgcagctgtgatctgctacagacaaaaccagataattctctagattgtttttgatggagtatctgtccctgcatttgtgaatgtttgctgataagatctcgctttccttcctgactggaagggcactggtggctgagaacaggaaggaagcaagtgttctcttcttttatttttctgtgttgcatgatcattacacttttccttccacctttaaatccaaagaagaagtcgtctttaaaaaaataaaggtgacttacttctttcttttcttttttttttttttcctttttggcgatagatctttaaacaacgttgaaacaggaaaagtctcactctcctattgaaatctgattcctttagagtgtaagagtgatggcttatcacttaagagtcacttttctgtgaaactttttgaatcagataactccctaaactgcggaataatgaactgggaaagaggactaactcgaatgtcagacacttcttttgtcctctgttttggctgtctgctatctcacagaaaacctggttaggaaattgatgtaaataatgtattttttaaaggaaacaaagatgaaaattctgaaaatgtgtttcctttttaaaagaagaactagagcagagggaaagataaatcaggaattaaaagttgcattaaagaaataatagaaaaatgcctaaataattattggttctgactgagaaagaatagctgtgcgaaagatgtggaaagtaaaattgcacatggaaatggactttaatacatacttcgccatattgatcagcgtttacccatgtctctcaattactgtcctttttatttatattttcaaagttgaaatatgacctgtttgcttgaatattaataaatatatgcactgaatgtgtttgcccataattctgaatactacatatacattttaagtatgactcattgagtatgcacagagaaatgtatgtgtatacacataaaatggcatagaaatttgcatatgaggtacacatatgatgtttactagtctgtaaatgagtgcatattaacactttatttattagatatgtatgggttctgtatttcagagatgatttacacaatgaagaaagtacatgcactttgggcttctgtatgcctgctgcttaatcttgcccctgcccctcttaatgctgattctgaggaagatgaagaacacacaattatcacaggtaaaatattagaagcaattatctttttaagctagttaaagctctcaattttaatctaaaaaatctaccatagttttccattgtggagggaaattagttgttattgaagtgatatttttctttggaaatttattatacctaatgtatgtgtgtgtgtgtgtgtgtgtgtgtgtgtgtgtgtgtgtacatgcacatgtgtgttttaaacagtccgaaaccaagtaactttagctgaaacacttctctcttttttttcagcatacaatattaaacactggagtagctccgggctattgcaaggagcaaaatgttgtaaaaacaactccctatgacatttgatgctaccctttggctaggaaaagtgtgaggaggaaagggaacttcagacatctgaggtttcagctattctctctttcttccccatatttccaaaatcaaaacttcccagttgagactaatataaaaatctagtcaaccaggacaccaaaggatctagtaatataagttagatctaatcccataaaactctgtgtctaaaaatgagaatattaacaataaaaaatagagcaaggagaagactgtatggtgatggttattgtggatatatacctttcttaaagtaacattttgtggcaaattagtaaattgttgacagaaatctcaagcattggtattaatgagagaatattaacaaaatgatagcttatttttgtatagtggtttaagatgtaaaaaagatttccataaatgcattcttatttgatagctttaatagctttttaaaatgactgtgttcagtgtactttaataaagtttgaataaatacatcttctgggcctgaatctgtggaaggtgctagagaaacaggtatggctgagatgaggtgctcaagaatctcactgtttcctaggggagtgtgaagggtggacagtttatttccgtataaagtagtacacaaagtgacagaagcatggagagtgctgctgttgatgggaagaggaaggagattcaatcaagcttggctctctgagggctccacaaggggaagtcatgttataaaaatttcctagagatgaagcattatttagtaaaaaccctaatgtacctttttgaaaataagaatttgaacattatgagtttcaatccctcattcggcttttttctcaaaaggtggtgggttaaaattctaacattctggaggttacagaaacaaggaaggtggaggataaaataagtcttaacagggaaaaaacaggcaatctcacttgtgggaagtgagaagcaaatagatccaagtgttccctgtatttgtcccagtccaattttcctcaactggactgagaaaatgaatattggttaaccaggaagttcctgaaattgtggctgctgccactgtcaatcaataatccagaattaagttatcagtaattaagccagaatttaaaattactataaggtagcttccaaacctaggtggtaacaaagaattttgatatttaagctagacttaaagacctcttcaccaactagttgcagttttatctagttttattttgtttttgtttaaaattaatttttataataaccttatctcacatctgaaaaaattctatttaggagatacaatttatcacatgatgctaagatcataacatcattttatagaagtatattatttaattgaaataaggtactcttattaatagaaaaatacatcaaattttattgcttctctcacaagcaaatagtagatgatttttttaacagtcaaatcagcagggaggataatctagaattaacgtctagataaggcaaaaatgataataaaaagagtagtgataagctttttaaaacaattccattgggctaggagagagaaaattaagagtgaacatttagtgaaaggcaagtatcttttgtaggatttagaatcagacagacctgagtttgcaggtgtagtttgccacctagtacctttgtgagactgaataagttaaactttctgactaccagtgtcctaagctgtaaatgaataatgtaaataactaatttcctatgatttttatataaaaagtggaaaagcatctggcacattttctgacacagagaaggcaaaaggtacatgtgtttgttcttccctgccagaaaataaaataaaataaaataaaatcctttaattagagtctagcagcatgtggattcttagatggtaagttacctgaaagccctagatttgcaaataagttccaagaggatgagtattcttacagtcaagggcatgatatgttttcaggcagcaaatattatagtaagcttctatccaacatcccaggacatggggcggggggagggaaggggaaggcaggattgtaacctttagactatgagacataaaattcatgacatcaaaggcaaatgattcaatataaaccataattctatttatatgactggatcagattaaattccttttagattgccctctatgtgttttgctttctcatggccgctggcagataattattacctctgtaaacatttccttcaagtctcaatttcaagtctcaggaaagttatcgctgaccccttcaggctaatttaggtatcctactgttcactcgcacagcacccaggactttctgaatgtttatgtaagtccttagtgtctatatgctccatgaacgaggggttgctgtcatctaatttactgtcatatctgtagtgacagcacagtgcttgacgcatggtcaatacccaattattaacattcaaaagggtttattcaaaataagaaatgaaaaccgaggcagatttccatcccttttgggtgaagtggcatggcactgtgggtcacacagcacacctggccattgcttgagtccagggatgctgtgcttaggtgtgggctgcaagatcactgcacaaagaatattctaatacaggatttctataagaaatacattaaagtgtgaataaagacaaataatcacctaataattaacaaaatataattcataaaagttaatacttagtgtttctcctagaaaatttctataaaattatcacctacttccattattgaaaccatttttagtttcataaaggtgaatgtttgaaaaaaaatgttgttgattgagtggaaattatataattaaaaccgtatgcttgatccaaatgctactttaggaatctcagtcacatgtctgtgacaatatcatgtagttattaagaatgtgtgagatagctgttgtaaaaccatatgaggatcaattttaaacccatcatttatggtatgaatttaagttatttacttaatttctgaaagctattttataatttataaaatgaagataataatgcctaactcagtaggtggttatgatcattaaagggtacaggtacaattacaaaaatgtcaagggtattgtaattactcagtgagcaacattagctattgttgctaggtacaactactacagcgagtttatcagcttttgcctttgtggtgcactgccaccacctgctggcaaaattactcaatagcagattgaactagaggtgattatatctttaatgcagaaaatggaaaaaagatttagcttgataataaatactatcaaatatattaagaataaaaagtagaaaaatcatcaattagtatctgataaaattattgatttatgaaaaatgatttttctgaatatacatggcaatgcaggtattaggtaaagttccctgtgttctgcagatacagatctttattcaagttttctatctgaaacactacctcaataacttgtctctaaagttctaaagtcatgttaacttgggaatgaataacatcacattatatgagaatttctacagcaatttgagataatggtatatagctgtaaaattaaaaatgccagaatatttttattcctgctttgttatgtgaattctggggtcccatatttaaggagctgataggtcacatttttattggtttcaaaacaaacatgtctagagttcagaaactcacgatacgtaatttgatgatacttactgtgggcctgctgtaagtcagacacaccacttagggtcttcacaccaaattttctggtttctcataaaaactcaaaatgtcagcttggcattctaaaatccttaagtaaagacaaaaagatataaacagcatttacaattattcataaatgtgccactcagaaaaaaaacattcaatgatttttaaaactgacaattataacttcagtgatagagaaaatgtgttttaacaagtcattttggttcatacatttttcgatttttagaaagtatttttagcaatcctcaattatatttgttatgaatttctattaaaaagtacttgtgtatctaatttaagaaaaatggaaaattttaccatgaagtgctcatatttataggtaccagaaactctctatatgcctgagagaccttctaaagcaaattatcgtattttagatatgttcatcaacatgaaatgttagataaaggatttgaaaaaaaaaagaaatgacatttaaacttgtcaatgttcaccaatatttcttaactcactttgatacaattatttgtatatatactatagatatttattggatttagtgacactgttattggtttaaaattattttaaaaatcatgttggtaaacacaaacattatattttgtcaattgaatataactccagaaaaatttgaagacacacaaatgcatatgtgcataaaactcaactttagttaaagatttgatcaacattcttacttgctaattagctattttatgacaattgtgtttggtgctgaaactatccccgtatcataataattctctgtcatatgttattctaagttaacaaattctggacctgaaaaacatactcttctatcagttctgtcagctcaatttatttcaattgaaaaaaataatcaattaacttatcaaatagatcaaaataatgagatggtattatgtaaatttaactagtatttttaaaaattgaaagcagtgttagtagttgagataaaatttacgtgttcaaaaataattagtgtcacatgaatcaaacagcatgaaaatgccaacttatgtatagaaagctgtatctttaatccttccaagattgtaaaggctacttacaattttatgactcatataaaaaattaacaatatcatttcaatcattttgttacaaaaagttttaacattactaaaataagactaatacttgctattaattcaaaattgattattagaataataatatattatgggtggagtgcaattaataaaattatctaatttaacttttattacacacatattttctgtttcaaaaaattcacattttgaaattacaggaaatttaaaactgatttcttttgagacaatcatactccaaaaacttatcctgtattttatgctttaaaaatattttatgtgaaaatattaaagtctcattctttttttgttgttgttcaaagtaaactattttagaatgcatgaaaacactttttttcaagatatttatactcatctgtttaattcaatataatactgctgccctctagaggcaaaattggtttcggtcatttataggtttcaatattccccataagagattaataaatcaattgccaaagacatagaaaatacatagactcaatatgcagaaaatattcaagaagtattatatggcatttttgtcattattcttttggttgcaccacccacaattttcagtgtctatctttactggtaaacaaatagactttacttaacattaggcttctattaattttattggacttgaaaaaaataaaatgtttaaaaaatctagttgagtttcccctatttctatgtccattcccaggatagaaaattctgttatgaaaattaggagttaaatatttaaagaaaaaatatataacgtgaagtcaaaagaattgcctcattctatttaaaacatagaaagcattatttacattatttcaacattattaaaacccaagcatggtatggtaagttaaaataaaaagcaccatgaagtatatttttcagaacatcaaacacataaatttttataattagggaaaatggtttaatatagtgttatatacatatgtgtgtgtatatatatatgtgaatgtgaatatgctgttgcttttaaagggttgttttatgtgtaaaaagtgacacaagtgtgggttagggagagaaattcaaagaactgtccattagctgagttaaaagaggtctattgtggacacatccacttgaatgaagttgccttacaactactactcaattccctcccagttcggttggtacgatttaagcaatacctccctaacaagagtctagaagttgtgtttcatttggtgaatttattaactttatctaccattttgataactgaataactttttatagtttcttagtatgttttattgtacttttccttaaaatcaggacatattaaaaaggaaataaagaacattattacagtgttgatggagattacatgttatatcttttatttttactttatagatacggagttgccaccactgaaacttatgcattcattttgtgcattcaaggcggatgatggcccatgtaaagcaatcatgaaaagatttttcttcaatattttcactcgacagtgcgaagaatttatatatgggggatgtgaaggaaatcagaatcgatttgaaagtctggaagagtgcaaaaaaatgtgtacaagaggtaggtttctgggaacccttattactcaagaccctttagggctattgagtctaattatggatttgataatttagggagaaaagtaatttcatgctgttttaatatttccaaggaatcttttatttccacatttttagactttcagggaatcctaaaaacatttaaggaaaatgataattctgaattgtaccatgaaatacccacatttataggtaccagaaactctctatatgcccgagagacattttaaagcaaattatcaaattttaggtacggtcaacttgcatgttcaactatcatttttcattttcttcatatcagtgaattataaaatatgaggccccatttattgtcttatactcttatccataataaagacagaagaaaaaaacctcaactcatgttcaaagaattgtgaagtatttttaaaataaagtgggtgtaattcggcctcccagacttgtaatctcagttggcagaagaaaaactgttagtcacattgacttagtctttcctttgtcaacacaatggtctcatcgctatactctctcaagatcatgaatctggaaattgaagctctatggctcttaattacaaaattgtaagctgcataaaatagtagaactatatatgaaatttaagatttttttattattggaaccttaaaatactacaggaaataaaaatagaataccatagaaaagaaaaatcatccctgatgacccttgtggactttactaaacccaatgttttatattaatattactaagttataaatttcaaaagtacgtcatattatattaaacttttactctgcattaatcctactaaaatttaacatttttgcaaattttgctaattactttattgtatgggattttatatcttctcactaagataaattacaaataattactgaccaaaattttgaatgttttttttttaatgtcaggctaattcttccaaattgtaagttactcaagggatagaataagttgagttgcttttatttccctagtttctagaccaatattctaccatagcatgttcgtagagctggttggatacaattgaggtgatacagaaatgatatctctggttagtaacactagatgtcttgttttttgcaaatcaggcagctctgcattctcactctgttactgctttctaaatagcttttactaaacagccttggcatcatggtgctcttggcctgtgggaaaacttccatgtggtgaaaagagtgaacttctctcctctgtggctctgtaagatgtttagttgtatgctcccaagctgaaagaagagaatagacacgaatatatttctttaacctcacagcactgatttctctgtttcctctccatagatgccctaggaatgttactaacacagtttaggcagctcagtggtcctcagtggtgcttttggtttttgtgattgcttggtcttttcccattcatcacagatttctataccccattttcttccatacatattgggccaagtatccttttgtgttgagttgaaaatcattcttagttgtcagtaccttggctagaagcctggttgcctcattctttgtaatccccactctttcatttagcaggctatttattttcatcaactggcctctttcctgaaatatatacctgttctttttatatatgtgtatagttcaagtcttatggtttatcattgtgcaaaacttactcttttctttaaaggttagggaaatgtaatcattttgctcatcagtgatagccttgcttatcatcatttaaaatatcatttctggctagcatgtaaatgtaactctcttacccccatctcctcattatctatcaaaattcacttgaggctgggtgcagtggctcacacctgtaatcccagcactttgggaggctgaggtgggtggatcacctaaggtcaggagttttagaccagcctcaccaatatggtgaaactccgtccctactaaaaatacaaaaattagctgggtatggtggcatgtgcctgtagtcccagctactcaggaggctgagacaggagaattgcttaaaaccaggagccagacgttgcagtgagccaagattgcaccactgcactctagctgtgcaacagaggaagactccatgaaaaaaaaagaaaagtcacttgcaattattgtatgaatgtctgagtgttttatacagcagactactgataaggatataactggtatatggaaaaaatatggctagacttttaaaaacgcacctaaggagagaatttaatcggcagccatgatggataaatagaacaagactttctctccccaacataaagaactataaaactggacaaaatgtaaaaaactactgtttgcaagcattgaacaaaaggcagtgcaggattgtgacctctgggagaaggtaaatacataagatgagccctgcagtctcccctgcttcctgtgtgaaggcattcagaaccaccattacatgaaagaaacccaagtacagcatggtggtctctctgaaaagaggagatggctattagagattagaaagcagaagtggttgtggtttttctaacaatgtgtgttatatggtttcactctgtgtccctacccaaatatcatcttgtagctcccataattcccatatgttgtgggagggactggtgggaaatgattgaatcatgggggatggggcgggggggaaggtggtctttcccatgctattatcgtggtagtgaatgggtctcacatgatcttatggttttaacaaacaggagtttctctgcataagctctctctttgcctgccgctatccatgtaagatgtgacttgctcacagtaaattggtaccagtagaatggggtgttgctggaaagatacctgaaaatgtggaagtgactttggaactgggtaacaggcagaggttgcaacagtttggagggctcagaagaagacaggaaaatgttggaaagtttggaacttccaagagacttgttgaaaggctttgacaaaaatgctgatagtgatatgaacgataaggtccagcctgaggtggtctcagatagagatgaggaactttttgggaagttgagcaaagctgactctcattatgttttagcaaagagactggcagcattttgcccctgccctagagattcgtggaatgttgaacttgaagaaatgatgtagagtaattgacagaataaatttctaagcaccaaagcattcaaggggggtttaggtgctgttaaaggcattcagtttcaaaagagaaacagagcataaaagtatggaaaatttgcagcttgacaatgcaagtgaaaagaaaattacattctctgaggaaaaattcaagccagctgcagaaatttgcataagtaacaaggatctgaatgttaatcaccaggaaaatggggaaaatatctctagggcatgtgagacatttgtgccagctcttcccatcacaggcctggaggcttaggaggaaaaagtggtttcctggacccggcccagggtcctcatgctgtgtgcagtctagggacttcgtgccctgtgtcccagccactccagccatgattgaaaggggtcaacgtagagctagggccagagcttcagagggtgcaagcctcgagccttggcaacttccacatggtattgagcctgagagtataccgaagtcaagaattgaggtttgggaacctacatctagatttcagaagatgtatggaaatgcctggatgcgcagataaaagtttgctgcatgggtggggctctcatggagaacctctgctagagcagtgcagaagggaaatgtagagtcagacccccgacacagattccctactggggcactgcctagtggagctgtgagaagaaagccaccatactccaggccacagaatggtagatccattgacagcttgcaccatgcacttgcacatttcaaaactgatcatgccttcccaatagtcccccaaattcttaactcatttcagcattaactcagaagtccacagtccaatgtctcatctgagacaaggcaagtcccttctgcctaggagcttgtaaaatcaaaagcaagttagttacttcctagatacaatggggggtacaggcattgggtaaatacagctgttccaaatgggagaaactggccaaaacaaagggtctacaggccccatggaagtccaaaatccagcagggcagtcaaatcctaaagctccaaaatgatctcctttgactccatgtctcatatccaggtcacgctgatgcaagaggtgggctcccatggtcttgggcagctctgcccttgtgactttgcagggtacagcctccctcctggttgtaacacttatttacagccaactgttctttgacaaaatcaacaaaaacacacagtggtgaatgggcactctattcaataaatggtgttgagaaattggataatcatatgcagaagaataaaactggaataatgtctcttgccttatacaaaaatgaactcaaaatagattaatgacttaaatgtaaaacctgaaactataataattctagaggaaaatctgggaaaaaccctcctacatattgacctaggcaaagaatttatgactaaatcctcaaaagcaaatgcaagagaaacaaaaatagccaaatgagagttaaattgaagttgatccacaagtaacttaaattaaaaatgttctgcacagccaaagaagtatcagagtgaacagataacctaaggaatgagaaaaatatttgcaaactgtgtattggacaaaagactaatatctaaaatgtacatgtaactcaaacaattcaacaagaaaataacaaaccatttaaaaaatggacaaaggacatgaaaaggtatttttcaaaagaaacatatacacaaccaacaagcatatgaaaaaatgctgaaaatcactaatcatcagacaaatgcaaattaaaaccacaatgagataccatattataccagtcagaatggctactattaaaaagtcaaaaaataacagatgttgaagattaggagaaaaaagaatgcttataaattgttgctggaaatgtaaattagtataacctgtatggaaaacagtatggagatttcccaaagacctaaaaaatagaactaccatttgttccagcaatcccactactggctgtctacccaaaagcaaatacatcattatatcagaaagataactgtacttgtatgtttagcacagcactatttacagtagcaaagatataaaatcaacgtaagtgtctattaacagatgattgggtaaataaaatgtgatatttatatatacacatatactccatggagtactactcagccattaaaaataaaatcatgtcttttatagcagcatggatggaactggaggctattatcttaagtgaaataactcagaaacagaaattcaaataccacatgttctaatttataagtgggggggtaaatagtgcatacatgtgggcatagtagaataatagacaatggacactcaggaagatgggaggatgaaagggaactggggaatgagaaactatctaatgggtacaatggacactatttgggttatggttacactaaaatccacttcaccactatgcaatataaccacataacaaaatcgtacttctagcccctaaatctatgaaaataaaaaagaaataaatttttaaaaagaaaaaacaaagaactgaaagagaaaaaaagtgccaatcagtaatctacttcttaaaataagggcttttcaaatcagcattatctggggaaatttattcctggtagagcagcagtacaattagtattaaaggatttagaattaaagcacacaggaaggaaggagaaaaatatgagattattgttgtaaagttctgaggtttctacaggtgacaatgacatacattacttggcactagactgtaatggattagtacattataatccttaaagcaaccattaaaaaaatgaaacaagcagaaataacaaataggcccataatgaagatgaaattattattaaaatattcaattacagtaattctaaagaagacatgaacagagggaaacagaaacaaagaagaaatgagaaacagaaatcaaattgctagtgatatttatactcaactttaatgataattagattaaattaaaatttaatggtccagtcacgccagttaaaaggtagatattatcactctgtatgcaaaaataaatcaagaactaactacatgttgtctataggaaaggccctttaaaaataaggacagagagattaaaagtgaaaggatagaaaaagatataatatgtaagcactaatcataagaatgattagtaaaagtagactacaggataaaaaatactacctggtggaaagaaagatatttataatgggggtccattaataaaaaagacacaacaatccttaattcctatgtgcatggtcctaattacaaaactccaaaatttttaaagaaaaagttggcagaagtgagagtatacaattattcagttcagtttacatacttcaagacaccttttttcagtaactgacagaaaaagtaaacaacaatcactaaggatataaaagatttgaacaacactctctaccaacttcacacaattggtatttatctaacactctccttgcacacccagaagaaaatatcattatttacatctggcacacttttgaatggatttagaagcaaaaataaataagtcagtttgaggtataaatatcatatgccaatgtgtgtcaaccaaatgcaaattttgggatatttttgcttgtcagtcttacatcttaatattcataatgaaatattaaaacaaattcatataaattgaaattcaaaagagtactagaatggaaattagtctaacattctctcattgctccttaaaaagcattgataaatgcttcgtcctgtctaaatctaagaaaacttgataatttgctgtaaatcttttctaactattaatcgctttcatactgctattgccatacaaattatcgtgtccaaggttattattattagtcctcaaagacaattattggtaatataaatacacttaaaattctagtgtgctaaaccacattgagttaattggcatgtatattacctgaattaatcctatttacaatgtaacagtaaacaaacaaaatagatgttcttttaaaaattgtattaatcaagcatttatatattcccatcttatgactattgtcaataggtaaatcaggaatgaaaattgcttagtgttctagtcttatgtactcattatatgtatacatttctttcttcttatcaattaaatcatattagttttatatctaaatattttaatgtcaggttatatgacagtctacaatctagttgaaaacattaatatgaagttggttagttgcagtgaaaacaaagtaaaccaaaaaacttacctcaatagatacagctatacatatacacacacacacacacacctctttttttaaaaggctattgaataaaacatagtacaattagaaaagaagtttgggtccgttagtttcactttcatagacattttactctccatagaagaattaactatttcaagaaaaaaaggatgatgcagttgctgaaagaggcttataacccaattcatattatttctctcattctttcttcccttctctctctcgctccctttctatctctctggtcatataacgaatgctaacctgctttgaccaaagattttctctgcaaaacaaataattccacaacaaaataaataccactcaactttcctaatgtctatgcgagcaaattaaaacttcatagatttattttgtcaatttaaatttcattacctatcatttaaattagaacttagaattcatacttggaatatggtaggacaaagacaactaacattccagttttagagggaaatgattccgttaatcaaatgttaaaccaaacaacgtgtcccagatgccttttgtttcatttcttctctacattggtaataataatgaaacttgcaattggattgagacaacgaagcaggggaaagaataaggaaaggaaataattctggttaatttcacttttattcccagttatctaacaaattatttttatatgtaatgtaggctgcttgaattactttcatatttcacatttttaaaataattgttttaagtatagatatcctgaacagtaaacatagtcactatgaattctcagctttgtaagtgtgttagaaagttttatcatagtttctaaaacattactctattgaaatgaagtggcttcatggttacaataaatagaaaagattaatttttagagaaaagaaaaagaaattcaatttttattaagacattctgtataagaataattttaatggtaataaatatgtcactcttgtttgttaaattcaaattcatagtattactttataaattgtgacaattgatatgcatatattcttttgattacagataatgcaaacaggattataaagacaacattgcaacaaggtgaacatttatttgtctgtaaatttgaagcatttatgtaaggcatttagatattcaattttttgtttgtttgcttgtttgttttttctggtccctgattcagtatagatattcaattcttaagtttctctgagattgatttaaaaaaatccataaaagagattgatcataaacccatatgacagattgatcatgtcatttttgaaatgatttgttgcatgattcaatggacataatcaaaaattaggaaaatatatacattatatttgtcagaggaggctccaaacaccgtatttactctaattctaatgtagtatgatatttagttttagttcaatcatagtccagagccacacatgctattttaacaccttccagatagagatttagatattttgagtcttaactttatttctctgatctctaatcacttgttaatctaatcaacattgtgtggctttagcaagtttcaccaaatattcccttgaatggatgtatgtctctgagttgtcagcagttatacatgcaaaagtaagtagagatatttaaaaataaatatctagcatgtatgtgtatgtttaattgtgtaatttaaatcatatcatttattgtttttagctaaaaataattactttttcacaaatatatcagcacaagaaaaaatgttatcaatggatcagggaaaccaacgtccttttaataaaggcctggaaactgatttggtccaattgtcagttatggcatttacatttcaatgagaaaatattgaacaaagagattaaattgtttaactcaggacatgaaagaccgcaacatgaaagaccacaaaattcaaagtgcattttaattttatttattttgatttatttatgtgggaaagagttgaaaatttctgtgacacattgataatctttaggctcaattcactgaccagaattggaatcaaaatgtataaaataaagataatagcaaagtttgtacaagaaacataactaaatgtatgtacttacaattttaaaaaatagattcctataaatattaaaataatcttgaccaaaatgtttagtactttaattaaatgaaggccttatctgtaatatcaaaatggcatatttataataaagaagtttttgtctacaaaggagaataaatatttttgtgaaagaaaataccaacctttaaatattaggaccttttaccaaaaacataaaattagagaaaaattaaatacaggtactatttttaggtaaaattatgctataaagtgtatatttataattcagaattcaatcattcttatctcatattatatatgaaagttagagaataaagctgtgttcacatgaatgttaaaaatgcttacatgttaacacctatttgtaacaaagacttgatcaatttcgagtgaactttgtattatgcttcctagcattggaccattataaagagatttgagatttaatacaatcccttagaaagaaagtttggtccaagacaattcccaagtattcaggcccaaacaaaagttgacagtgataatgctttagcttatccagtctgcattctgtgttactcaagtgcaactgagcaccaacttagagcaagggttatgtatgcaaattcaataagaaggttaatttatttacctgaagaaaatgggaaattaattttttgatttgcaactgtagtttaaactgcaggccaaaaaaagaattattttacatgtgtccattttcaactttgtcttcacataagttcatgtttcccaatgtagtttcatatgaaaaataacaactttcagttgtacagtttattgtttgttgtggttttgtttgtttatttttaatttttgtgggtacatattaggtgtatatatttatgtacatgtataatttcttaattatacttatcagcataattttttatacctttatgttttttatatgcaatatttttcctccatccacttttggcaaacataaagttcttgtatcctctgttcagatcatttaaaatttcataaaaagtacacattaagactaaaacaaatcatatgatagtaattcaatgtatttttaccttataaaatgttataacattttaaagaattgttttattcctttcccccacatattattacaattaactaaaaatcataaaaacattcatttgaaagatcaagaggcaatacagaagaaacaaagttaactttcaaattaatacattgaaaagttacagaaaatagacttttaaaactatattatagtaggaagttttacttaataaaataacttttcaataaggagtttgttcttttgcagatctgcaactgttgcagaaatcattaacattattaaatacatgttcttttttattgtaaaatacttgtgggtattgcttccctgacatagaagaacaagttgctttaagatgaaaaaaggttaccacagttcagttttgccaatatggtaatatacttgcaggaaaaaaattgagaaattggaattttgttctaaaaattcaagcccaatacgcctgtgagcataataattttgaaaattagctcacttcttttcacagtgcatgcatgtagacagagctggtgatgtagatcacagtggcacaacttttatgacagctgtgtttagcctgctttggagcactatcaaagaagaagtattagtcttttgcaaaagcctctccaatccttgaacatgtatttcctttctgcctctgcattattgaagtcattccaatgacaagaagaaggaaaaaataaaaatgacacagcagtagaggatgtcctacctagtacagatattaattcccgcataagaattcaggaacttctaaggctagccatgaaaacttcctacccctcaaatattctttttcaacttttaaaaatttaaaccattcttaatggagcaacgcactacaatgcttttcctgagaagccaccctcaatagcttgaaatgttcatagaccttccctaaatgttaatacacatgaacatattaaaaataattaaaccacatttttgccataatgttttgtaatttcaaagcaagagtggtacatggtaaaataatcttttattccttaaatttgtaaaaaaatgacagttaattccctattaatttactatgagaaatttagaatttgaaatgccaatcccaaaatatggtagataattttaatagtgtatatttatggataaagttagatttttactttttaatttttatgcttactccttcaataacttagccaggtatttataaattttattaaaatcagtaatttatttacacaaaagaatattgctttctgacatttttataatttctagaaaagccagatttctgctttttggaagaagatcctggaatatgtcgaggttatattaccaggtatttttataacaatcagacaaaacagtgtgaacgtttcaagtatggtggatgcctgggcaatatgaacaattttgagacactggaagaatgcaagaacatttgtgaagatggtcgtaagtttatttcttatttcattttagttcatttataggcatccttttaaaactaaggcatctcagatggcattctatactcaggttttgtttgagccatgcaaatgaagatatatttgtgtgcattcaatgtgagatttgtgactgtagttttttaaaaagcacagaaaattaagaaattattttcatagatctaatactttttatgttgcattatttaattcttcttcctgagaatactgcagtacaattttggcacaatagaattgctgaaatctttcacatttatacaaatatgagagcaaacagttactgaaaaccaccacctaaagtcactcagttttatctgcctataacatttattaaagggatgacttaaacattaactgctacgcttttttgaccaagaactacagttactcatggaaatattaccttacaattatatttaaagattcactgtttgctaatttaacatagcaatgtgaatgaaattgccagaagtctgcttttttaactgttgtacgcttcatgagtccaaatatgagattgtgacaatgtttatctattttaattggctgtatttttttccagcgaatggtttccaggtggataattatggaacccagctcaatgctgtgaataactccctgactccgcaatcaaccaaggttcccagcctttttggtaagaatcttgtggattttattgcttccaggaaactattatcatgctaacaatgaagtggattgtgtattagaagtatgtctttaaatatatatatatacctgcgttgttgcttaataatgtgtttgttgaaatactgagattcaaattgtttaagacatttaatctcataaaagcaacaattttcctaatctattttaaagtatgctttgaagtaagcttttgattatgtatcacatgaaaaactttcatatgatatttaactctatgccaaatttattttgtaaaatggtgctaggaattatcagcctcagtgtaagatggtaaatcattgtactggcacagcagtgcatcaaaggcagtctaaagtgcttttaaagtcagtatgacactaggcaaggtctctggtgttactcacaggacagattagaaattgattgaataaccatgcctaaatgttatgtcactctggagggaattttcttttgaattctgcaggactcttttttatgttcttgtctgttaacctatttatcagatttaaacgaatatacaggaaatatttccacaaaatgcagagctgagaaaatagtgaaaatactggaaaacataatcaggaaccacaaatatctgggcagttagaaataacataaacagctaaaaattaccagtgtaaaattgttagatcctagctaaattataaaaatcacatattcttattcagatattgaagattttgtttagaagtagtccatgtgaacatgtcaaaggtaaacttggcatgtttatatataaacttagcctgagtgtgaagaattctgtaactattaaaattgcaatcttaggattaaaataataataaaaaaaaaagaaacagtgtttgggccaggaattctctaccttggccatttatcagaatcagattggctttgagctactcctctttacaacaaacaaacaaacgaacaactaagcaagcaagccaacagaacgcaaacaaaatccctgcccacgtggatttgaagcattaaaatgttgactccgacttttctagaaagagtctgtgaatgttcagctgagtcccacagtgatctaatcatttgtgggtcttgcttcagcactgaatgtcacaccttggaaatcacaaggaggatttgaaacatgattaaagaggaaatgaaaagtgtaaagagacatgagatctacgagggagcataatatgtgcttttaataactgaaacactattatgtgaaaggagaattaagttctctacatgacttaccctttagtcctgcctatttcacaccctccccagacccccatccccatcctcccttatccccctcaacccagcctaagcatgaggattaatgtgtgagaactaaagtataaatgcctttctataatatgtttctttcttatgtgagatcttaaaaaattgatggctgtctcaggtattaataaattccctaaattgtaggcattcaataagtgtgcaattaacacttaagaggtcattaaggggatgcaaactttcagtgggagttggaaaatacgatatattcaaaatgacttcaggtccttacattcaataggtagagcagtgaattgaatgccagatgaacttgagtctaatttttaaatactacttcgttcgtaaaaattaatacttttgtgattctgacttatctgaaaaattaagtactatcgttgcattatttctttatgtctttccagctttgtatttttcactcgtattttgttttattcagttattatattttcaaaagcacgttaaatcttactgctgtaaaagaaaatttagaatgactaaattaacaggtttaaatatacatgtgacacagtatatcagtaagtacaagaaatgtatgaaatcagtttgcaacatgcttgaatacttttgtttgaattattttaccaattcaagtggagatctgcagtcatttatcattaaagtgagtagagtaggttagggaataattttgccttaagtttttttgaagtataaaatttaaaatttttggtaagcatactaccaagttagaaagggcaaaataaaaattagtgtgagaaagtaatattaatgagttttaaatggcctctgatatgtcttctttagtttattgtgtagatgcacattgaaaattgtaacaaataaataaatgcttgtaaaagtaaattattaactaagcagtaagaattgacaacatgaatttaaaagaaaacaatattaacaataatttattcagaataatagacatttaaggaataatgttatcgtaactgcatttaaaattagggcaaatgtctcctttatttgtctaaaaaactgttttatttttgattgtatatattggcctcaaaatcaacattcctccggccaatttgaccccttttcctttttctaagagcatttccttcccttcccttccccgcccctcccctcccttccctccctttcttccttcctaatctaaaacatgaaacaatgttgcagtaactaggagacatttgatattaaggatggcataaggtggattgtcaatgaagctatgttgccattcttcttaaaacctacgtgatttcgaatctgccccagccaagatgcggaagtgggaatgcagatgtccctgtactctgttctaaaacctagatgaccccttgtcacttctgtctgaggggtttgctgagatctacagacacctcttaatttccccaatcaaatataattacatctgtcactgcttacaattatattaatacattctattgtagtttaagaaaatgcaattctttgtttacataaaactttgtttttcaagggttttatcaaacgtgtaaagttctctgtggtatcaggttattttgaaaagctgtaaatcctttaaagtttcaattcaatgtacaggaataataatctgccccacaacataaatggaataccagtctttaaattctttccactaaataacaatctttaagtagagtatttgaatattctaaaattcaattattattaagtgaaatatttataaatataattttaatgtttttcttcatgatattatggaagcattttagaagtttagttaaacattatcataatatgactttttaaaaattgctatttatttttaattactggaatgttgtaaatggctttcaagatatatttttccagtaagctttcttgattcgagatacttgaatacttactaagcacaattccggtgtaatttttctttttatttccacatttcaatattaacaagttatttaggtaatctcaaagacagtcttactcttccttaaagagattttaaataatgatttgtaagcatatccctgagcgtgagtgcattatttcagtttgattggctgtgttgagtatatccatgtagttaaaataaatgtgtgttctctccacctgaaatatttctaaagcaatttccctaaatgtgtgcaattttgcgcataaacgctagaactgaaagccatcacaactggttcttcttgatttcccccatgattgaaataatgatatagcagataaaaaacctttgagcctgaagacatgcgttaaattcccaactcttcaactaatagctgtgtgaccctaagatatttcttaacctgagtttcatctttccaatgtaaaatgaggatggtaatattatagtactaagttgataggttgtgttgtgaggttaaatcagtcaaaatacataactttcttaggacagtgcctgatatctagtcagttcgtgtagggttactcattattattatccatgtgattcagagtaatacacttaactcaccaggccttagattctcatttgttaaacaacttctttgtaagttcccatttgcagaagaaatttatatttcagacactcataaagtctctggttattcagataaatgcatcagtaaatatacagtctcaaaatcatgactaatattttaagaagaattcatactagaattaaattaatgcatatatggaaactcgaagagtttgaatgtgttcattagaaacaagttgagattattgtcacagaggagtatcatggggcttcaaggtcaaaagatgtttatttgtataattgttctttatcttttcgacatttccaactttccgaactttttgagttcttctactgtttttctggttattccaatttgaatgattagtaattttctttgtatcacttatattcttccagtcattcattaaatttcattgctttttatgaaatgtttatttctctctcttccattttcattcctatttatttcattcagatcatcaatccttcatggttagattccctaaacaatcatgtcatccaatttggaacactaatgatagttaaagagggtgctaaaaaattaaggtatatgtctattttaaatatatgtatgcattgacttaaaaatggaattgtcgttttggtgactctacaaaaatagttttatatttaaaagtatttcagtatttttaaatcatatatatatatatatatatatatatatatatatatatatatatgaacgtgatatccccccaaaataagcataaactaataggggcttaggcaaaccaggctgtatagacatgagacaaatagataaataaatagatatcagaaagctcagatatgactcagatattgtatatacacataatgtaattatatatctaacataagtaaactaaagcatattagagagagagagacaaaaaggaacagtcatatgtaacaaattatacatgacctttttgacatcactgtcctatttctagtcatcgatcatgtggtaatttagcttcatccacttgcctaaaatttgtctgcattgtccactagtcctctatctattgcagatattttctgtcccttaaatataacttttttccgtccattcaaattggccttttcattatcattaaacacaaattactcactcttattctaaaggatgttttatgttattttccccacctaaaattgactgaccctcctaatcttcttaaccaatctgccttttcactaccataaggaggccttctttctgtctctctcccctggcttcttactatgattccttcaatacttgtactattagatattgtgtttgctctgcctcactgtctagattacaagatttttttgaagaaaaacataatgtactatacagtttatagacttcccccaccctcagcattgaccacagtgttaaacatataaagatgactcacattttttatttatcaattttgtgatccacagttacaaaagaaggaacaaatgatggttggaagaatgcggctcatatttaccaagtctttctgaacgccttctgcattcatgcatccatgttctttctaggattggatagcatttcatgcctatgttaatatttgtgcttttggcatttccttaatatttatatgtatacgtgatgcctttgatagcatactgctaataaagttttaatatttacatgcatagtaaacatagtcttctcactgcacctcacttgtaaatgtctaactagcaaagaaaaatgaatattctcaggagttcgtgctagttgtgagtcttttgaccggacctaactattcatggaaaaaaagtcatttttttcctgatttttatacatccctttgcttccatacatcaactatttgtttttgttttgttctgttttgttttttgttgttgctgtttttgagatggagtttcactcttattgcccaggctggagtgcaatggcgcgatctcggctcactgcaatctccgcctcccaggttcaagggattctcctgcctcagcctcccgagtagctgggattacaggcatgtgccaccacgccccgctaatatttgtattttcagtagagacagggtttcatcatgttggccaggctagtctcgaactcctgacccaaagtgctgggattacaggcatgagctactctgcctggccccatacatcaactcttgagaggggccttggaactacatcagctttatgatattctggggggaagaaaattcaggtagacttaaaaagctactgccaacccaattctagtatttggccactgactgagaaagggaactcctatatacctgacccagttccacattgcctcctgccagcctccaggtccagggaaagtaattggatgacatcctgaagatccttttgctacttgaaactctatccctctcctgaatgtattcaatgtatgacctccagacatacattccatttatgtggaaaaaatagaaaataaaatctatgcatacataaatacatttttaaaagatttttgttatcactagccttctgaaacaggtgttatgttcacaaagggcctaatggacagccaaacacaatcactgatataatcaatttataaatctgcatgagattgttattatctccttgttattatctcgcctcttgttgaacgtgtgattgcatgtagaggaatactgaaaccatgagaactttctggagagaaactctccctcaccggctaaagagttccacatccagctgcataccacaggccatcacaagcactgtttacagttcttaaaaaacgaacaaacaaacaaaaaaaacccacttcatccacagtccactttcatagttctaaagaagtatcttgactttcataatgtgttctaagaccaagaagcacaggaacatccctcataatctaaagatgcctgcatagtaaatctggagcctcatattctgattttctgacaagttggctttccaaaaatagataacaagttttggacagcacccagcaagttttctacttcctgacaggaatgctgatgagaaacaaaaatgtggcacttcatctctgccaaaatcactgccatcaaaatgcagtcaccctagatgaccactgtctacttttctaatccctttcttcctggaccatctttagtcttaacacaagataatttgttgccccagtcataaaagtcctccagagaagtgtttctcaagcttgaataatatatagatatctttaaaaggaaaaaaaatcacagacttccaatttgtaagccaaattacttaaaataactttcattttgtatgaaccagtaacatagtaggaataaattcattatgatcattatacaactataaaccaaaaattgtttacaagttaatactatgcaagctacaaactaataaataatactaatttgataagacttcttttgcttaaaaaaaagaaaaatccttattgtaatatgaatttaatagtgactggtgtagggcagcttagtaatgtggtagaaatagcttagacaaacttgagctactctaagttgtgtgtaattctctaccttttttctatttgagtaatggaaaatctttgcagaaatgaaattaagaagtattaatacaaaatggtggctgggtgcagtggctcactcctgtaataccagcgctttggaaggctggggtgggaagatagcttgagcccaggagttcaagaccagcctgggtgacatgcagagaccctctctctacaaaagataaaataattagctcagtatggtggcctgtgatcgtagacccacttattctggaggctgaggtgggaggattgcttgagccagggaggttgaggctgcagtgagctgtaattgtgccactgcactccagcctggatgacagcaagactctctcataaataaataaataaaatctgttgatcaggaaaattccaactctgcctcttctagggacacagtggagtggggtttccagtttttgattatatctaatcaaaagtggggtttccagttttgattatatctaataccactacatggatctgattgaccagtgcattacatggatctgagtgaccagtgcagatatgatcacatggatgcaagactggaactttggtgtggttgtttctagaatcagtccctgttgaccatgccaactcaatacttgttactttcaaatgttcaagctctctaaatactgtttgaatcagcactgttgcaccaagatttgtttctagcctccttgtatgatgacatattttgattagaactctttctcctgttcaaacttaggaaacttcaacttcatgtttgtaactgtggactatggtacatttagcatgttctgaacctgagcttcagaaaagagggaatttggacatcagttctaaaggagaagttgtgacaattttatttttatctgataaaattattaaaatagttttgctcaggtattattttcttaattttctagttagttttcagaatgacatatcttagtggttgagagcattgacgttatagaaagaaagatgtggtttttaattccagttctgctatttgctgactcagtctgtggccttgaaaaaaagatcacaaaatttcgcttggcttcaggttcctcatttgttctatgtggcaagaagtatctcaaaacttttggaaaactgtaatgagacataaaattcttaacccagttgttgagcacacaattaaagcacaaagtattaatttttgaggttgttttcaatgatgatgatgacgacctattttcatccgaggtttatagtcaaaaaatgagtactatttgtatacattttgttattgatcatttttaatgaagctaaagtctgttaaccttgatctgacatatcttcatttaacaaattttattctaagtttctttgaaataacatatatagcacttgaaaattcaaacataattatacatattttttgtctttggatcttataactaattgaaggacatatacacctatattttcaactttatcttatgacctaaggtacagatctgtgtacttcctaatttcagttcatttcagcaaacattgagtgtctcctacacgggactaccataggtactgggagtatgagaataataaaagtgtaagtttgtcctttataggtgtttttgtcaaatagggaagaagataaataaataggtgacttcaatgcctgtgttacgtgctaagacagagacctgcacaagggttacgggagaacagagtcacaataacattttacattcattaaacaatgtcataattaaaatattctatcttctcaaaacttgagctctatcttcatcttccacttcaaactcgtttgcctggatgctggctaacccatggacatagtctacaatttcctctttatattcagatatttttctaagtaaagccacaatgaataaaagccaccaaaatttacaaaaattacaactattataagtagaatttattctataatgtttcataacatgttagacaagtattacatcttctgaatgtagaaacactagaattatttcatctctagctctctacctgcccaaattcaatctggtgcttaattttagctactcccatggtaactgcttcggttgtggtaattttatattcttctctattagaagttactggattcaacctaagcatgcctggttgagtttgcttcatgtattcaacaagatcagaacttgtattttcattattcaataatttcagtggctctttaatgtctgcattataaaaatctaaatataatagtattcaagaatcttcttaatttgacctaaatgtaattttccagccttgtatcccactatactcttttttgtgttatgttctccagatagcctggagtttgcgaagtacccccaagcaaaccagaaacattctgacctttgtgttttcactttccttcacccatatgcttctctgtattctctgcttactaaaatcccattcttcctaaaaagctgatcaacagactaaatgttaattttttacttttactaaaattttgtagggcttaaaattttacatatatgtcatgaagaaagtttttctaatgcattataagatataattatcttagaataaagtatactcaatagctgtataatctataattttaccatggctttctttctttgtggccttgcttagacaaatccctgaagaaacatgactttatggactctgtccatggattacgcagtatctaggcaatgaaatccaacccagagaacatctacccaatttatttccttccctcttaatatgtggagggagtttctgtctgggcaggttttcactcagtctattctttatgacctttcaattttaagttcactggcaaccctccttctatactttatcctcaggtaagtggcccagtatacacatgcgggggggaaaaaaaaaagctccacagtgcttgtttttccattcccttccccgttttttttttctttatagaatatcactttccaccaatttaataccacttctcctgattaatgaatagagatacatactctttcttttttacagagagagggacaagtttaccacacattcctactcagaaacagattccaatctctaatctctaggcttttatctattacctcaggacactggactcactctaacatattatttctatcatatatcttgagcattatgattgcaaagaatttgaataaaaaagaaaataaaagaagaaaaactggccatatccacattatgcagaaacaatcactgttggcattctagcatatctcatttactattttcttgtattttttttcaacttaccacaaagtaaataaagttcaagactggaagtagctgctggaggagcccgaacaatatagaataagctcagcataaaagtatctttttgtaaaatttaacctagcaaatctctaagctccctacctaataaagctatctctatagtaatcatcctcccaactgattgcatgtcctcttaaatatttgcccaatggatacatatataaattctattctcatttatatgtgcttgtatatatatgtatgtattgtgtgttggtacaaaatataaattattatattttcttgattctaacatgcaggtttttctaccttttaacatgattctaatgatgatgaaacttataactgatagtgtataacagtgtaattatgtttttctttctttttttttcgagatggagtcttgttctgttacccaggctgaagtgcagtggctcaatctcagctcacttgcaacctccacctccggagttcaagtgattctcctgcctcagcctccctagtagctgggaccacatgcgtgtgccaccacgcccagctaatttttgtattcttagtagagacagggtttcacctagttggtcaggctggtctcaaactctggacctcaggtgatccactcacctcggcctcccaaagtgctgggattacaggtgtgagccaccacgcctggccgtgtctttctttgtttatgaatagtacataaaataatagtgcatcttcaaattaatgacatttggatttcatataaatgatatttcatataacatttggcaagctataagcagtttcttgtcccacatagtactcttctacttttgttggcatggggaagaaaaaaagtgttgaataggagataaattcatagcagtaaggtccatggtttgctaaatggtttaggcactttaaatgtcgttgtaggcatataaatttgtgaaaagtttcagtggaaaattcagcaacatctaccaagttataaattgaatatagattttgcataattctaattttagaagtatgtcctctggaagcacctgaaccagtgtacatgggtgttcatgagccactgtctggtactgaaaaaaataaattataataatccatatgtccatttgactaaatatactgtagtcaactcataaaatgaaatactgtacctacattaaaaagagtgaggcctatataaaaatgtggagacacagccacaaaatattatcaagtatagtaatatagaatattatattaatacatttgaatatgcaaacaatttggagatatgtaaaccattggtagtggttaaagggcaagaatcaaattatggataaattttgttttacatttgttatacttttatattatttcaaagttttacaaagataatttgcagtaaataatttatatttctctttactacaaaattatagagaaaaaaactttaaaaaagatttgttattcaattccctaaaaagtcttagaagaataaaataaatgtacttaacaagttgtaagatatttcttaaaacctagtttgtttagtaaaacaaaagcctaagtaggcaagccaaatgggaatcataaaaaagataccacagtaaagattcaaagtgaatatatgattcaaagtttactgtacaaatctcaaagcaaatttacattaacaactttacctgtaaaactgagtttagagcaccatcttacagttcagcagtcacactagatcatgatagttcctgatttaaaaaaaaaagtgtaccctgaattctgaaacctatcaaaaaccctgtagacagaaggtacacaactggttattaatggcagaatcaagacagaatgcatttgattattaaattccctttggaaaaacaacaaaagtcaggttagtgtctttttattctatcttaactttctgtcaataattataatctcaactaaaaaaattacatttcgcaaaacctttatattttctttcattgtagatagcaaattctggattttgaatagatgagtgctgatctatatgtagaataaatttgctatttggaaacaatgaagtttttctcttcaagaagtgaaaaaaattcaaatggaactaaaatgttcttaagaaaccatttgcttcattactttaattttactgtcatttatggtatagtaacccaatgatagtcttactgctcagagttaaaatgatcttaagataaatgaattagtttacgtattaggtaaaatttatgttctgaagaataaccgccttataatgattccttaactgacaataatttattgcatctttaaaaacctctaaaagttaattacacataatacaatatccttagtgattaacttcacattttaatgcactatcgaaatattgccatttctagtgttaggaacctcactgttgatctgggtcaaaactctgttgtgttgaatgatctgcgtaagcagtggttgaaatcagggcaaagtaagatagataaacaactgacattgcatcagtcatggacaagtaggagcaagtatctgattataggtgcatctgcataccaaatcccaggctgtcagaagcagcatgccagacaccctctgattcagaagtcataaagagtgtcagtagaggcaatctgatgccttggataatttagtgaagttttctctgctggcatctatgctggtcaactgtctgtttgctctcaaaccaatcccctgctcatgtggttttatggggaactttctcctctggcttctgaaaggatttggtaaatggcaggccttgttggatgactggatagtcaaaggaagactgaagctagcatatgtctctccaccacatctgtggtgtatcttccatggtttcagcttcaatggaaaggcccaaatggttctaggattcacctgctgttcttggtctatgataacagaggctcctcttctcatacgtccaatctagggactgtagccccatatgtactagcctagctttttcccattttgaaataaccttgattttatgattgggccatgtttactataggttgtatgtgggaaaagagaagaagtttgctccctgtcatcagaaaattttctctgttctggaataagggggcttgatgtctggcattgctatttagacgtaacaactaacatttgcaaagaaggatacaacttacaaccacattcacacatattatctgcaacttactgtgggcagatatatcttacatacaaaatgctaaagtgaaattgatgtataagtcatatatcattttatcatacacatctatttcgaagttactgtgggtgtttaaacaggaaaaaaagcgatagtaatttcctgttttctctgtttctcaaattaggttaattgcatctagtgcatctcttttgtttctgaacataggtgataactggaagctcatgagatcaaagtggtggcaattaataatcattttatattctacactgtgcaaggatgatgataatacacatcccacacattggaaaagtgtgtacaatagtacaaatcaattacaatataactctcctagactgctagaaaattcctctaatataaatgattcttagtgacaggaaatgtcaacattttctagaatgtctagcacacattctcaccattcaactttgatttatgatggcatatcatcatgtcaaaggatacaaaatacaggcatgtaggataaataagcctagagatctaatgtacaacatgaagatgacagttagtaaaacagtattgtgttagggatttctgttatataagtagattttagctacccttgtcacacacacaaaaatgtaactgtgagaagatgggtatgttaatctgcttcactacagcaactattttactatctatatgtatcccataacatcattttgtaaacctcacatatacacaataaaaattattttaaaaatcacgcactataatccccacataggagaaggtaaaacataaagggctacatatgatttaaaacgatgttttcattttacaaatcctagaaggtcttcttaaaatcactgcatatatacctagtcaaagacctaagtaaaactaaatactctttatttgattatagttctgatatcttattgatatagtttggcacaaaaatatcacctgtctcaaatttcttctcataaattattctcacagtattcattccctctcatatttcccagaatattttttattacctgagttactatatcaagacactctagtccttatttaaatatctagaaggcaggaggtggtaaaaaatgtttatatcaatttgagatttttttttcatttttttctcactttgttttatttcttttcttttacagtctgttcatctggggtttatttgccaaaagactgcttcttgcttaaagcacaatctattcaccttcattaactactggattcctcaaagttctattttctgctaatattggacatttagcaaatcttcctcctctgtatttgcttgtatcacatctcaccatttgacaaagccattaaagttttcttgtattgattccttgccatacaacttacctgtagtactggtttattaacatcaagcagtttagctgtgctaccgaagagtactcggtgcccctcactgacagtaattcccagagagctaaaaactaacattcagctgaaactaatttctcttttgatttggcaaatgagtgctccttttattaccctaattgtatttttctcttctgtttttgaaaaccattgattgatcccattgacaaaccagcttatctgtctgatccaaatcaatttgcttcctttgcaaaaacatttaactcatctagaactaagcttcaaatatgagaaaaaaaaatgctaccaagacaaacaactcatctggactcattccttgaaacttaaaacttgccatacctgaattcctccactttaaactgtgcttgtattacatcagtcagcatgtgcttagtcaagagaagtaactcttcctcagcttcagtgtttttgttacatcacaaataaaaactttgctcattagaattttttaaagccaaatatttgtgaacaaatgatatgtaaattaatatatatgtgtgatgtgtgtgtgtgtgtgtgtgtgtgtgtgtgtgtctgtaagaaattttcagcagttacattgttgaagagtggtttttattatgtacaaatagtttgttcatataaagagtaatcataacacttctctttagcaaatgagattttttaattcattggagaaagatctcaatatactggacacatggttttgttaagcattttcctagaattgaaatgcacgaattttattaaatacccctttattcagattactgttttacatacacatgcaacaacattaatctataaacaatatacaatacgaaaacctgaaatccactatcacatatggcttaccatgttttcctgattgtttttagaatttcacggtccctcatggtgtctcactccagcagacagaggattgtgtcgtgccaatgagaacagattctactacaattcagtcattgggaaatgccgcccatttaagtacagtggatgtgggggaaatgaaaacaattttacttccaaacaagaatgtctgagggcatgtaaaaaaggtatagaagatactcttcccattaattgactagtgtttaagatagcaattgaattgaaatgataatctattaagatatgaaattaattatctttattataagaaagtataatctagctaataaatgtcctcttcaattacatttagataatattgctagatatgtaactgtaatttcttttaatgtcctcatagaaaaagaatcaatttaaaacaaattaaacatgttattcttttagtgttcaaatactaagcattcactttaaaagactataccaaaattgttttaagctttcttgtaatgcacaaaattttaacatatttattaatgtcttctgaatataaaagtaatgcatgtttataaaagactaagaagagtataaaaatgcaaataaaaactatctgtaacttaatcaaccacatacaaccacatttctactatttaaaaataaagcaagcatggatttgtaacagaagaggaactaataataaaaatgaacggcatgcttatccatttttattaactcatatatgcaaagtaacgtccttaaaaataaattgttctacacgaatacatggacaaattaaaggcttttaaatcaataacatcttttggatttaaatattaaaagttactttgagaagattttagataaaacatttcattgtgttattttatcacacattaatttattcctcttcctcttataggtttcatccaaagaatatcaaaaggaggcctaattaaaaccaaaagaaaaagaaagaagcagagagtgaaaatagcatatgaagaaatttttgttaaaaatatgtgaatttgttatagcaatgtaacattaattctactaaatattttatatgaaatgtttcactatgattttctatttttcttctaaaatgcttttaattaatatgttcattaaattttctatgcttattgtacttgttatcaacacgtttgtatcagagttgcttttctaatcttgttaaattgcttattctaggtctgtaatttattaactggctactgggaaattacttattttctggatctatctgtattttcatttaactacaaattatcatactaccggctacatcaaatcagtc

SEQ ID NO: 24970 - DNA, 4079 bp, Homo Sapiens
gcccttggcggggaacctcgagcaccatgctggacccgtcttccagcgaagaggagtcggacgaggggctggaagaggaaagccgcgatgtgctggtggcagccggcagctcgcagcgagctcctccagccccgactcgggaagggcggcgggacgcgccggggcgcgcgggcggcggcggcgcggccagatctgtgagcccgagcccctctgtgctcagcgaggggcgagacgagccccagcggcagctggacgatgagcaggagcggaggatccgcctgcagctctacgtcctcgtcgtgaggtgcatcgcgtaccccttcaacgccaagcagcccaccgacatggcccggaggcagcagaagcttaacaaacaacagttgcagttactgaaagaacggttccaggccttcctcaatggggaaacccaaattgtagctgacgaagcattttgcaacgcagttcggagttattatgaggtttttctaaagagtgaccgagtggccagaatggtacagagtggagggtgttctgctaatgacttcagagaagtatttaagaaaaacatagaaaaacgtgtgcggagtttgccagaaatagatggcttgagcaaagagacagtgttgagctcatggatagccaaatatgatgccatttacagaggtgaagaggacttgtgcaaacagccaaatagaatggccctaagtgcagtgtctgaacttattctgagcaaggaacaactctatgaaatgtttcagcagattctgggtattaaaaaactagaacaccagctcctttataatgcatgtcagctggataacgcagatgaacaagcagcccagatcagaagggaacttgatggccggctgcaattggcagataaaatggcaaaggaaagaaaattccccaaatttatagcaaaagatatggagaatatgtatatagaagagttgcggtcttcagtgaatttgctaatggccaatttggaaagtcttccagtttcgaaaggtggtccggaatttaaattacaaaaattaaaacgttcacagaactctgcatttttggacataggagatgagaatgagattcagctgtcaaagtccggcgtggtactgtcattcaccttagagattgtcataatggaagtgcaaggcctgaagtcagttgctcccaatcgaattgtttactgtacaatggaagtggaaggagaaaaacttcagacagaccaggccgaagcctcaaggccacaatgggggactcaaggagatttcaccaccacccatcctcggcctgtggtcaaagtgaaactcttcacagaaagcactggagttctggccctggaagataaagaactgggaagggtgatattatacccaacttctaatagctccaaatcagctgaattacaccgaatggtagttccaaaaaatagccaggattctgacttaaaaatcaaactggcagtgcgaatggataaaccagcacatatgaagcatagtggatatctgtatgcccttggacagaaggtttggaaaagatggaaaaaacgttactttgttctagttcaggttagccaatatacctttgctatgtgcagttatagagaaaagaagtctgaaccacaagaattaatgcagcttgaaggctatactgtggattataccgatccccacccaggccttcagggtggttgtatgttctttaatgctgttaaagaaggagatactgtaatctttgccagtgatgatgaacaggacagaatattatgggttcaagccatgtatagggccacaggtcaatcatataaaccagttcctgcaattcaaacccagaaactgaatcctaaaggaggaactctccatgcagatgctcagctttctggtaaagatgcagatcgttttcagaaacatggtatggatgagtttatttctgcaaacccctgcaagcttgatcatgccttcctttttagaatactccagaggcagactttggatcacagactgaatgattcctattcttgcttgggatggtttagccctggccaagtctttgtgttagatgagtactgtgcccgttatggtgtgagaggctgtcacagacatctctgctaccttgcagaactgatggaacattcagaaaatggtgctgtcattgaccctaccctgctccattacagctttgcattctgtgcctctcatgtgcacggcaacaggcctgatggaattgggactgtttcagtggaagaaaaagaaagatttgaggagataaaagagagactctcttcccttttagaaaatcagataagccatttcagatactgttttccctttggacgacctgaaggtgctctaaaagctacactttcattacttgaaagggttttaatgaaagatattgccactcccataccagcagaagaggtgaagaaagtggtcagaaaatgtctcgagaaagctgccttgatcaattacactagactcaccgaatatgccaaaatagaagagaccatgaaccaggcatctcctgctagaaagctggaagagattcttcatctggcagagctctgcatagaagtcttacagcagaatgaagagcatcatgcagagggaagagaggcatttgcctggtggcctgatttattggctgaacatgcagagaaattttgggctttatttacagtggatatggacactgcactagaggctcaaccgcaagactcctgggatagttttcctcttttccaactgcttaataatttcctccgaaatgacacacttttgtgtaatggaaaatttcacaaacacttgcaagaaatctttgtacccttggttgtccgctatgtggatctcatggagtcttccatcgcccagtcaattcacagaggttttgagcaggagacatggcagcctgtcaagaatatcgccaacagtcttcccaatgtagctcttccaaaagttccaagtctgcctcttaatcttccacagattcctaacatttctactgcttcgtggatgccttctttatatgagtccaccaatggctcagcaacatcagaagaccttttttggaagcttgatgcactgcaaatgtttgtctttgatctgcactggccagaacaggaatttgcccaccacttagagcaaagacttaaactaatggccagtgatatgctagaggcctgtgtcaaaagaacaagaactgcatttgaactcaagctacaaaaggcaagcaaaacaactgacttgcgcattccagcttccgtttgcactatgtttaatgtattagtcgatgccaaaaagcaaagcaccaaactctgtgccctggatggaggacaagagcaacagtaccattcaaaaatagatgatctgatcgacaacagtgtaaaagaaatcatttcactgttagtttcaaagtttgtttcagtgttggaaggcgtgttgtctaagctgtcaaggtatgatgaaggcactttcttttcatccattctgtcattcactgtgaaagcagctgcaaaatatgttgatgttccaaaaccaggaatggatctggcagacacctatattatgtttgttcggcaaaaccaagatattcttcgagaaaaggtcaatgaggaaatgtatatagaaaagttatttgatcaatggtacagcagttccatgaaagtcatttgcgtgtggttgactgatagattagacctccaactccatatttaccagctgaagacgctcatcaagattgtgaagaaaacctacagggactttcgattgcagggtgtgttggaaggaacactgaacagtaagacttatgatactgtgcacagacgtttaacagtagaggaggccacagcctctgtttcagaaggaggaggacttcagggcattactatgaaagacagtgacgaagaagaagaaggctgatatcacacagctttgcagaaggaaggaagaccttgatcgacattgttttttatttttttaaccttgtccttgtaattacattcattgtttgttttggccaaataaaaatgcttgtatttctttaaaaagtaagcctgaatgtagagtaaaaggggaaatgcc

SEQ ID NO: 24971 - DNA, 33168 bp, Homo Sapiens
tcagtaagcgtacgtgatttcatttatttattattcttttggatactggacataatcaggtggccccaattctttacactggcagcaaagataagcaaattcttccagcaggccaaatttgaccccgcacttgatgagcgtggtggacacagagggttttttaatagcataggaatgttttttgcttcccaccggacccactagcctctagtgccaccgattaatattaccttccttgaatcaggaggaaaccatttgtgacttctcatatgtaagatcttctaagggcagaaacgcaattgtctttgtattcacttccccgcccacccacaccccttccatggagagcctgcagccaagctcaagctttcaaaaaggcgtgagctaattcaatcatccttgccgcttttttgctcctccaggctgtagagggcgacaaaaaccgcggaggcgcattggggtgggggggtgtctactgaaggccgctcccgacgtgcgcgtctttacgtagacgtcgggggcgcagccgcgctgtgcgcggtgactggcggctgcactggcggcagctggaggtgtaatagtgcgggtagtgggtttggagaagttccgaggcggcggtggcgccggtcaggacaaggatagcggaaccgggccctgggcttgtcgctcaccatgccgacagtagaggagctttaccgcaattatggcatcctggccgatgccacggagcaagtgggccaggtgagttgagtccccgggcggcctgcagggcctggcgctccgcggcctttcgaaagcgcttcccgccgcactccccgggccgagcgggggctgcggcttcatcctcccggggcctcctagcctcctcaggccgtctcgtcggggtgggcctctctgggagtgtagactctggtttcaccagggagaccgcggtccccagggttccaggcttccttgcctcccttgcccagccttttctcaccgtggcgtaacctaactcagcccgttcaggctcacgttaattcttctcacggagcttttctctacaggattctcttaagcctttctccttttcggtggagctcagtgcttccaagattagatcgggagttttcttcatgaggtcaagatgtgttttttttgggggggaggcaaaattctgctactaattgaagaagagtgtttaggagacagaagtttgtgagaaacagaagagggactctttggtccagactttgatgagagctcacggtttcatttattcagtgcatttttttgagtgccgagcgctggagatacagatggaaaggtccgcgctctcccagaatgtacagttaggagggagtgtagtaagaaagataggcattgtgaggcccggcttggtggctcacgcctgtaatccgagcactttgggaggccgaggcgggcggatcacgaggtcaggagttcgagaccagcctgacccacatggtgaaaccctgtctctactaaaaatacaaaaattagccgggcgtggtgacacgcgcttgtaatcctagctactcaggaggctgaggtgggaggattgcttgaacccgggaggcagaggttgcggtgagccgagatcgcttcactgcactccagcctgggagacaaagcaagaccccgtctcaaaaaaaaaaaaaaaggttttttttaaaaatttattctttttaatgaaacatgtttgaagaaaataaaacagggctgggcgaaggagagtgtgagtgcgcagctctgaatggagttgtctggaagagctctcttaacgatgcttgcccccgatacacagtttctcagcagtgttgaattatccatacaagtcatttgttccctgtatgagttttcaagtactggagtacattgaacttgataagtggttgggtatgtgtgttcttgggaaaagaaccaggctctcctggaggtaaccttgatcattgttttagaaatcccacaccatagcttttcagcgcttagaactttgtgatttttctgcttacgcatcccttcttggagaaagtggaagattctagtctattaacagtcgtgggagtacctttcccgtccccttttcttaacataattcaaataggacttttctgagctgaacgaaaaaaaaaaaatttcatgttggagatttattgtagcttaatctagaattaagaatataccagtttgaaatagcaaatgattttttttccttcattccctgtcagtagggaatttcacttttatcagtaagaaatgtatacggatgttctgctgtacatgtggatagagtgtgtaggtcggttgtgaaggaggaatattctgttcattaagaaggtaaaaactgccaggcacggtggctcacgcctgtaatcccaattctttaaggggcgtggatgggcagatcagttgagatcaggagttcgagaccagcctggccaacatggtgaacccccatctctactaaaaatacaaaaattagccaggcgtggtggcatgcgcctgaagtcccagctatttgggaggctgaggcaggacaattgcttgaacccggagggtggaggttcctgtgagctgatatcgggccactgcactccagcctgggcaacagagcaagactccatctcaaacaaaaaattaaaaaaaaaaaaagatacaaactatgtgtggtcaatcagtttgaatttgttgttcctaaaaagaactagtagtgaagatattctcaatcgtataatttatctgtgacttagttgggtaactttgtagcaaattgttctacctacgttagactttgttgcatatcagtagggggatagggtgaaagctacaacagtggttgtgtcaggaatccttctaagaaacctttgaaaccgtatacataatgctgtccatcccctactctaattttgagagttgcttgcatttccttctcatgtcatctttataaaaaccagattgaattgagagttctccccaaggggtcaaaatgtctttcacagcaaaaatctactctttatttagtaagggtactttagagacaagtttgtgaaaaatgaaaaaggatacctttgtctacactttaatgaggactccatgctttattccgtacatttcacctaccatgtaccacacacccggctggacactgaaatttaacacaattctctgtaggttatgggtgatcaatgcgttctgtattgacaactgtcaagcaactatttaaacagtatctctgcataatgagatgtagtggttagctcaggcagctcaaatattgtgaattgtaggaaaaccgaagataatgcctactaattctgctctgttgggttatacttctccccttttagataaaatgcctaaaatcacttactaaaaaagacagtaggttttaggatattgcttgtaattttaactaacaaaggcaaaagccaccttagtagagaggacaccatttcacttgtttttaaggagagaaaaccgtgttcatgttcttgatgtagcaaagcctgattttcatgtcaacttatgagagatttatgatcagtactaagtttcctggcaaatacctgtctggatacttctgagactgcattcaagtttgtcagtcttgacttccttctaacttttactttgattatcaacctttaccagagaggtgagcactacaggtgttctgattgctgccactacagactattccctccccattattgtcaatactcctttcagagtagtgccttctaaatatataagggtaaacttacaagccgtctgaggttttatcggctaatttccccaaagcagatcaaatcctctttttgaaccccttggtacgatgtacttactaataatgcttcagacttgtattttattttatttatttctgtacttaaattataacgtctcaagggttaaatccttttatgtatttatttatttatttatttattgcttctcttcttgcactgtaccttgcccttcagtaagcatttctttttcatagttgaagaaatgtattggaagaaggaacagagaaaccatttacaaaagaaaagaaaaaccatttacacagattatctctaatggataaagggaactttatcatacacacacacatacatacatatatgagcatgtatattctaataagcaaactgcagatgacaaattctaagtgcagaattatttaatacctcaaatcttccagtcctatcatcttctcatgtaactgccatgttctgcctatgcgttcatcctgcctttcccccactctgcctctgctactccttcaggtctcactcttctcttgtgtgctcctttacctttctgatctccttttccactgtactctgcccagggctcctgactagccataatagagcaagctgtggcccaccattatttaaaattctgtttcaaattattatgaatttacttactttaaatatagatacttaattttatattatgtagtcaaaatcttaaaagttaaaaaatgtatccgacacctgttaaaggaccatggcagtggggctgattagatctgtataatgctgaaaccctgattcctcctgttctctcaatcattgagtatactagctttgcagggttggcgtgtaggcttcttggacttttatttcatgaaataaccactcttgtagtagggttttttgtatgattaagctaaaaccactgaccaaccaagttcgtaatccctcaaaaatatgtggaaatatttatttcacttctctgagccctagtttcctcatctaaaagataagaatagtagtaacacctattgtgatatagacaaggaatcactcagtccctggtagaccttcaataaatattgttaatgattcctttttatttgattccagatttaatatttttttcttggcaaaaggaagttttgttttaagcagggttttttttttttcatttaattttggacagtgtaaggagtttcttcaaatggctttatgagtaagtttgagttaaagaaaattagatttgtgataccctgcaaaaagtaagggtgtcagaacaaactttgattttatgaagcctgcctagaagtctgaggcaaaccacaggaatgtaaagtggtagagaagtcagcatgatttctttttttaatgtttgcggtgaaaagtatgtcatatacctttctttctttgagacagggtcttgctctgtcaggctggagtgcagtggcgcgaccacagcttaccacagcctctaactcctgggcgcgaccatggcttaccacagcctttatcgcctgggctcaagtgattctcctccctcagcctctccagtagctgggactgcaagcacacaccaccatgcctggttaattttatattttttggagagacagggtcttgatgtgtttataatacacttttcagtgatgactcctgaagactcatatatctgcatttcatgaagaagttaaccttattcacagaaatttctgttatttgggagttgttctgtaactttgcatcctgctttattttttcacttaacatagcattatcaacaaaaaagaatcactgtaaaataaatttggtaattctgtagttcattggatatttattggtcattccccgcttgatggcatgaagtaagctcatgtgtctaaagcacttagaacactccttatacataataaatactatactgtgtatatgtttggtcaagattataatttttaagttgtttttccagttactaagttttattcatatgtccaaacaatatatatgtgtagtctttctgtatttgttactgttatttaccatctttatcagtgtcatttcataaaaggactggtttggaggcaagtacttaaggaggattgggaacttattgattcctcccattatgagtatttgagggagagcacctgtgatttttttttttaaggaaacatgagctttgagtgtattgttccaataaaaggtttaaacatgtgacattagagtccgtcttaatccaaaattgtctggctatatggagtgaattgtcatggctttcatatactgctatgaggtaaaattaaactgcacttcctaacattgctggaattgctaaatttctggaatgtattcccttcaccttcttcaaggtgctaattagaaacaggtaaatttttgtttaagtaaatacagtgcaattctttgtgaattctatggtattcatgatgatttatttatttacttgtttaagatagagtctcattctgtcacccaatctggaatgcagtggtgcgatctcagctcagtgcaacctctgcctcctgggttcaagcgattctcctgcctcagcctcctgaggagctgggattacaaatgtctgccaccacacccagttaatttttgtatttttagagagagggagtttcaccatgttgggcaggctggtctggaactcctgagctcaagtgattgcccacctcggcctcccaaagtgttgagattacaggcatgagccaccacacctggccatcattacaattgttttgtttgtttgtttgttttgttttgttttgttttttggagacagagtctcactctgtcatccaggctggagtgcagtagtacgatctcagctcactgcaacctccgcttcccggactcaagcaattctcctgcctcagcctcccgagtagccgggattacaggcgcacaccaccacgcctggctaatttttgtgttttagtagagacggggtttaaccatgttggccaagctagtcttgaactcctgacctcaggtgatccacccaccttggcctcccaaggtgctgggattacaggcgtgagccaccacgcctggcccattacaaattttttaagcatgatacagtcacatggccagagttaataatcactagaatgaagaagtattggcatattaacaaacacatttgctttttccacttaaaattagactcatccatctcccccaactcaaaaatgaaacaaagatggagggagaacggaattgggaaggtaagtgtcagtttgagcagtaaacctcccaaaatcagctttatttcttagcctgtgtaaaaatttaaagcacactctaacatgtttgttatggtcttttactttgcttcccatccttcaaaatcatgtgtctttcctgctttattttttatttcagcataaagatgcctatcaagtgatattggatggtgtgaaaggtggtactaaggaaaagcgattagcagctcaatttattccgaaattctttaagcattttccagaattggctgattctgctatcaatgcacagttagacctctgtgaggatgaagatgtatctgtaagtttatgaatgacacttcatagcaatctttcagatgtttctgtatgtggctgatacaattggagtagcaatctgatatatcagagtacacaataaaatactatggtatggtctggcatggcatcacacccaggcttaaatttacatatgataaagtgtattagcctttttcaacacctttaaattatgaaaaatgcatagaatctcaaaatacttagtttcgcttatcatttatccactgttaaaaatgggttgtggctcacatcttgtttcatagattgttattcattgtgcatatgaaattagactgtttttaatcaatttgtgcttacttggatatttaaattattaagtgttatatcataaaatgtagtttcactacccttatatattttgcatggcagaaaaatggtatgtgtaataagtgaataggattactagattaaaaagaaatagtttttgttttttggtttttggggggttttttggaacagaattaaccagtaatatttctggctgctgacacaggttcctaagaatattcagccgttagctcttgtcttttcagatgaaacagcgaattgccaacatttcatgcagaatttgctggatataaaccctatactttttttgcttttttaatagaaacagggtttcactctgttgcctagaccagagtgcagttgcacatccatagctcactgcagccttgaactcctgggttcatgcatttttttccactttagcctcccaagcagcacagaccaccgttcccagctgatttttaatttttttgtagggtcttgccatgttgtccaggctggtctcaaactcctggcctcaagctatcctcccaccttggccttctgaagcattgggattacaggcgtgagccacctcatctggcccgctgtacatattttatgtaaaaatcgaataagccaagatcagtatttggaattaaacatgcagaatatagccacaaatgttgtatttagtagtcaatactgaaaattctaaagtaaacagttactaggtataacattgccacagtagccattttttaggaatactatattataagcccataggtagtaaaaacctaacagttgcatataattagcatgtaaatagttgtttataatctcaaatctgtctccttcagcgagacattgttaacatccctttttatattttattctgtgtaacttgaagattaaattggagcaaattctctctttttttttttttttttttttgagaaggagccttactctattggccaggctggagtgcggtggtgcaatcttggctcactgcaacctccgcctccctggttcaagcgattcttctgtcttagcctcccaagtagctgggactataggcgtgtgccaccacgcctggctaatttttgtatttttagtacggacagggtttcaccatattggcaaggctggtctcaaactcctgacctcgtgatccacctgcttcagcctcccaaagtgctgggattacaggtgtgagccaccacgcccggccaattggagcaaattctttttaaaactgctagaaatctgctgtttcatatttttgtgactcgtatgcccctaatgatggcttctctgtggttttagttttcttaaaaagttgagtttgcagctgggcatggtgactcatgcctgtaatcccaacactttgggaggctgaggtgggaagatcacttgagcccagtagttcgagaacagcctgggcaacatagggaaatccgcctttaaaattagccaggcgtggaggcttgcgtctatagtcctagctactagggaggctaaggcaagaggctctcttgagcctagaaggtcaaggctacattgagccatggttgcaccactgcactccaacctgggcaacagagcaataccttgtctttaaaaaaaaaaaaaagaaagaaaagaaaaagctgtttgttattttaaaggtgatagtatttggttaatttttgtttgaaatcatgcccagattcgacgtcaagcaattaaagaactgcctcaatttgccactggagaaaatcttcctcgagtggcagatatactaacgcaacttttgcagacaggtaagggattttattattacctttttctctaaatatatatcttctttctgaaatgttgactctgtttttaggttttaaatggggtgcaggagagctggaggtcctacctctgatagagattaaatttcctactttcattcagtagttaaagtgtaatgatttctggttatctaattcctggtgttgttttgtttttaattccgttatgaaggtgtaatgactagattcttttgggcattttgatatatcataatttttcccccaatttcctgtagtttcataattgtagcatcttaataaaagtttttcaggcatgccagatcgggttctcaacttacaaggaacacgtatctttttggtacttgagggaatggcttaagttataagtttcctgtcaatgtaaccttgagaaactaagttgaatcaagtttgaaactgaagcagatgatattttaaatttgttttatattcattatgccactttttctttatccagatgactctgcagaatttaacctagtgaacaatgccctattaagtatatttaaaatggatgcaaaaggtaaggccagttcttattctgaattgtgtttgatgtcttacagaatcacaaagttaggtgttactcattaagaataaactctagggtttacccagagttctatttcataaaaattctaagtattgtgaaaaaagtctccttaggtcaagatgtttatgactagaaaaacgagcagaaataactgcaaaaacagatcacgtttttccattagaaatctgttggaagaactccttttgacactttcaagaaattcttccaaaatacctgggttttattattagtaatgataaaaaaggaaagtcatgcttaagctgactatgtcttcatgaagaaagcactcttatggttcaggctgtagaaatttcagactacttttaactagtaatgaggatgatatttgggaagttcattaacttatttgagaagaaatactataaattgagttaaatgggaaaacaccattacactatagaattgacttgctacaggcaactattttgttttgcagggactttaggtgggttgttcagccaaatacttcaaggagaggacattgttagagaacgagcaattaaattcctttctacaaaacttaagactttaccagatgaagtcttaacaaaggaagtggaagagcttatactaactgaatccaaaaaggtgagctttggtcttcatttggtggaaattctctaaagcaaaagagcatacttgacattggcagtattcgtcaatgttatgtgtggcttgtgtataaaatgatatatcatatatcccattggaaccaccatagaacttctaagtttttcttagattgaatttagcacttttgtcggtggtaatgatgaatcaatttggtaatttaaaggaatctgattacatttaaacttttcgtggtagtgtccttaaaatttgtgcaacctctgcaaatcacctccttcaggaaactttccctaagtcctacccctcccttccattttaggatactctctcatagtattctaaattatttcaaaatgaaacatcacatcaaaatgacctgttgtcaccttagcccttgacactatctgctcttcaagggtgagaccatgcttgtctttgctcccagcatctagcatagttgtagacgctaagattggcaaggtgcgtcacaattaacttttcactcatcttaatgtgccaaagtttgggaatagtttacttttttaatatgttacagaagattcagcattttatctaaagcatgtgatcactgttatggttcaggctttagaaatttcagactactactacccacttccttattgataagattatttttcagtgagaaaaaagtagatctttagctgggagtatcagactattttacctatgccccagcttgtaatctggtagagtatgtcgtgattgtgagcttttttggtccatgaatagaaagatttagacccactgatatggaagatttaacatgagacttgcaaggtgacctattttgtatacaacaattaccatattaatatgaattaggctgcttttaaatataggatacaatctgattcaacagtttgctacagaatttttccaaccattttttaaagtcactcccctaaatagccaatttttttaattttttttttttcttaactgctctcccatgaaattttaatgccacatatacactgtatatctgtttatggtactacatgtatatctgtgctttgtacgtaaaaaagtaacattttctaagaaccaatttttgcccccttggagaatgcgtggtttacactgaagctcaattgactgaagctagaagttgccttttcgtcagtattttggaagcattaataacaaactgactttagtaactgaaataaattagctattctctttcagtgttgatctgtcccattcaaatgatgaacatactcttattctgaattgtctcttttccaggtcctagaagatgtgactggtgaagaatttgttctatttatgaagatactgtctgggttaaaaagcttacagacagtgagtggaagacagcaacttgtagagttggtggctgaacaggccgacctagaacagaccttcaatccctcggatcctgactgtgtggacaggctcttacagtgcactcggcaggcagtacccctcttctctgtgagctctttatttttacacacccggtattagctatatatatatttccataaatactcactttaacattccccttaaacctttccagtagtgtcccttatctgaaatgcttgcttggaaccagaagtgtattcagatttttgaatatttgcattgtgcctggttgagcatccctaattcaaaaatccaaaacctgaaatgctttaatgagcatttcctttgagcgtgatgtttgagcatcacattggtgctcaaaaagttttggattttgaagcatttcagatttgggattttcagatgagggatgcttggtctgtgtttatgaaggccacagtggtgttggtgagaacccaaagcagcaagaaactttcttgaaagaaagaattttttttttcctttgagacagagtcttggccctgtcactcatgctggagtgcagtggcacgatcttggcttactgcagcttctacctcccaggctcaagccttccttccatctcagcctcccaagtagctgctactacagtcatgcactatcacactcggctaatttttgtgttttttgtagagacggggcttccccatgttgcccatactagtcttgaactcctgagctgaagcagtctgcccaccttggcctcccaaagtgctgggattacaggtgtgagccaccatgagtggccaataaattttttttaagtcttcctagagactttttttgaaagtcatgagaattttgcattctgtctcaggctttgtgtttcctgaggccatgcatcttctgggatgtgcatacattcatttgaaaaacacaatttaaaggaactatcctagagcaggcgtggtggcccgtccctgtaatcccaatcccagcactttgtgagccaaggtgggagtatcacttgaggctgagttcaagaccagcctgggcaacagagcaagaccttgtctctacaaaaaaaattaagtaatagaattatcccttttgagaaatgtgcagtctgaaaatccaacactaaaagatgtccacaattcatttatttatttatttatttatttatgagacagagtctcgctccatcccccaggctggagtgcagtggcatgatcttggctgactgcaacctccacctcccagattcaagcaattctcgtgcctcaacttcccgagtagctgggattacaggcaagcaccaccacacccagctgattttttgtatttttagtagggatggggttttgccatgttgcccaggctgctctcgcactcctgagttcaggcaatccacctgcctcagcctcccaaagtgctaggattacaggcatgagccaccatgcctggccatgccccaaatttgaccagagaatcaaggaagagatcaaaatgtatagatgttccaatgctccagatgactttgcagtaaagtatataaggggtcttcaaaaagttcctggaaaatgcatattatgaaagaaaaaaaaaaaactacgcatggattacaaaacatttttcaccaaaataaacttgtacttataacatgtctgaacaggatatagtttgaggaactaagaagggtcagacatcagtttgaaaagagcacctatcagagcaacatgaattctgctaaagttgaagcaagaacaaatatcgaatttatggtgaagcttggtggaagaatagtgaaatcattgatgctttatgaaaagtttatggagacaatgtccccaaagaaatcaacagtttacaaatggatcactcattttaagaagggacaagacaacgtcaaagcccattgcagcagatcaatttgcgaggaaaaatttaatcttgtttatgccctaaatgaagaagaccgatgattaatagcagaaacaatagccaacatcatcgatatctcagttggttcagcttattcaattccgactgaaaaattgaagtttaacaaacttcctactgatgagtgtcaaaaccattgcactcagattagctgcagacaagaacagagctttcagtggaaattgtaaacaagtgggatcaagatcctgaagcatgtctttgaagaatgggaacaggaggtgaaacatggctttagcagtgcaattctgaagacaaaacacagtcaaagcaatggctgccaggaagtgaaaagggcccagtccaagcaaaaagagaccagttaagaggaagggctatggcagttttttgggatgctcaagacattttgctggttgacattctggagggctaaagaataatgtctgcttattatgagcttgttttgagaaagttggccaaagattgagcaggaaaacgcctaggaaagcatcaccagagttctccaccgccacagtgctcctgctcattcctctcatcaaacagggacaattttttaagagttttgatgaggaatcattaggcatccaccttaaagtccttatttgggcccttctgatttctttttgttgcctaatcttaaaaaacatctttaaagggcacccacatttctttggttaatagtataaaaaagactgcattgacatggttaagttcccaggaccctcagttgttcagagatgactggtatcattacctgcaaaagtgtcttgaccttgatggagcttatgttgataaataaagtttatattttttattctttatctttttattccatttttccatgaacttattgaagccccttcgtagatcacctattgaggttatatctggggcatgctggggtgtgcactatatcgtatttgtagtcagaatacttgatgctgtagcgctcagcatttattgaatgaaattctgctataatatttgagcgaatatttgtttttcgacaatgcattttctttggatttcttacagaaaaatgtccattccacaaggtttgtgacatatttctgtgagcaggttctccctaacctcggtaccttgactaccccagtggaaggtcttgatatacagttggaggtaagcaaaaatttcagctttagcactgataaggcattcttatattttaacaaaaatgtaaaccactaacttagatccgatttctaagggagcagtttaaatgtctggtaatggccagccagtaatctccctagaccagaattaattgcattaggactgcttcatggattcaattaaagtttgctgcaatgggaaagccttacctgtagttttattatagtcagtctctacttttgtagccttaatatttttaaataaggtgtttaattcattcatttctatccataactgacagagccaattttaaactggattaacacaaaatatcctttattccttcttcaatagaattcactacccctcccaactttgtatctcaactgtaatgtatgtaaacattttttcacagcatctgtaatactttacatttgtttataatctctccctacatttaatctgattcacctctgtatccccagaatctggcacaaaacttgattttgaatcaagcacccaatagtgattattgaattggactgaaatatggaaatgcgtgtgccatttccctcatgggtctttgggatagagaagaatctcactgtgcactgacaaggtagtttgcttcaaatgtgctgggctaggcccatcagactgggattgggaaatgcaggaatgaaccttgagaatagtggtcattaccaatattttgagtaagtatccagagactaaatttaacaggaaatgaggcccaccttaaccatgagtaattagttcttagctgttgagagttcttactaagtgtgtctttatagttaatatatttatcatttttgccttgcaattagcacaatcattaacctgtagcagaaagtgtcgtatgtattattttccatacttcttctcacagatatattggaaatcatgggatctgggttttagggtctgccctgccacttacaccctgtgactttgtcgagtcacataatctctgacctttactttccttcacagtaaaatgttgggctgcatctatctctaaggttttcttccatttcaaatgttatgattctgtgaaaacataattgaaaataaagtcttaaatcgttatctagaattactctcatttcataacccttgcttattcaaaaaaacagtaatagtgaattgtgtgttttaggtattgaaattgttggcggagatgagttcattttgtggtgacatggaaaaactagaaacaaatttaaggaaactatttgataagttattggtaagaactttttcctttccttatgggatagtcagtatatagctcaaagtctaatttattattaatttctagattacaagaaccagtttttgaaatttcaattaaacaataatcctaataagtattgttagcttcctaggccacatgttgttgtctactttgttttaatcttggtgtttcttataattagggagaaaataggccatctgataaaatcattatcagcatcactgagtgattttcttatttgatgtatttgtataactaacacagtgataagcattaggtccttagcatgaattgagtcatcaacatctggcactcgtccagatgtaacttactgggttgttatagcactgatactgaatgccattggcagtacttcacttgtaatgagtcagtacttaaacaatatggacttacgttcagaaaatatttttgtagtaagcatagtatagttgttaagagcatcagcatttgatgtcaaatctagattgaattctgactctttagtttattaactttgttaccatgggaaggttaccctaactctcagagcatcagtgcctttatctgtaagtgcctaataaatgatagctacattaatcttcattattaataatagcagctgtaacagcagctgtaacaggttaatatggagcgttgacaggctagagcattgatccagtaagtaaaaaagaaatccaaatgtctggttttggtagtttttaatgctccatgccttaaaaacatgcactgtaattccctgaatatctgtttataatttgaatatgtagaacagattgcaaaatctgtatatttttctctcttaggaatacatgcccctccctccagaagaggcagaaaatggagagaatgctggtaatgaagaacccaagctacagttcagttatgtggaatgtttgttgtacagttttcaccagttgggccgaaaacttccagatttcttaacagccaaactgaatgcagaaaagctcaaagatttcaaaatcaggtgatatatgattgaggtggctcaatccttggcaaaggtggtagctatcctgaagttccttgggttttgcttttgttctatgagagctccccatcctgccttaccccagtgatacagattggagggttcagaaaatgggcatgtttgtaaacatatgacagaaatgagccaggcatggtggctcacgtctgtaatcccagcactttgggaggccaaggcaggagggttgcttgacaccaggagtttgagaccagctgggcaacatagtaagatcctgtctctataaaaaataactttaaaaaaattagcggagtgtggtgacacaccagtagtcccagctacttgcaacactgagatgggaggctcacttgagcccaggagctcgaggttacggtcagctgcagtcatgcctccgcactcctgtctgggcgatgagatcatgtctctgaaaaaagaaacagtaaaagtaaaatttaaaaaaaattaaaaagacagaaatgacttaacaaatccatggggggtaaaggactctagctcttcctacttgttttatgatcttgggcaggtaccctaacctctcttggctcccccaaatttttctcagttgttaagtgataatagtacctacctcatagagttgtaagaatttaataagacaatgaatgtacagcttttagcatggtgcctggcaaatagtaggtattagtaaactgtagctgttgttattaataataccttagtgttactggagaagcagcactggagaagtcaatgtaaatagttttcacaaagacactgcttattgaattgttccattaacaaattcacattttaaattttgaaatgcttgagccatgtgttacctgttactgtcctgtactgtgtggtaaggcagaagtttgatacttgatgaagctcttaatcagaaacaagcaacttaaaattctcttctttaatttactggtcatgtaaccatttctgcacttaggatcattttgctgtagtataagattgagtttaaaaacaaaattgaagtgatgaattgctaattaacaaatacattttcatttaggctgcagtactttgcacggggcctgcaagtttatatcagacaacttcgcttagctctccagggtaaaacgggtgaggccttaaaaacagaagaggtaagaatactggctcacatttcataaactgctagttccataccaaactatatagacttgtgttgggagtttttcattttcccttatctcacctaatttaacagtcttcatcccagtcctaatgaaatattttagatttttattatgttcctataacttaaactgatttattttaaaacaacttctatgtgcatgtgaccttactcattttttagctacattctaacctgtcaagggaacacagattatttgctttctttgctacatctagatttgtttagagtcaagcaataggaatacgcattatctatagatttaaaccaaggaattctgtaaagactgtagaggtgattctgatagaagtgtaattactctagttctatgacagaatggattatgcctcatagaagttattggcaatttgtcttaattttcctttccctttgtagaacaagattaaagtcgttgcattgaaaataacaaacaatatcaatgttttaatcaaggtaagtctgtaataccaagtgacatttctgcagttaccataaaatcatacatttatttatttaaaagttttgcataagatacttccaacaaagggaggcatgcaaacttcttctggctcaaagcattgaaacagatagatacagtctcagaaatttcagcgacttaagttctagtggtcttaattagctgttgggttcttttgaatgtccagtaaatccctgttctgcttactcttaagaatggacatgtggtatgtagcacaatgaaatgtttttctgtgtttgttttttataaacttgactatgtaataaattgagagctttctgtactgtaggctagggtatacctttccattaagccataattacttttcaattctgtttacccttcccaagtatctgctagcctaaacaaaaataataacctgagagaaccagaaaaaaatcacaaagtagccatcacttgtattatattatacaatacagttacagcttaattgtattgtgccagatgggaaaaagaaacagtatttgtaacacctagagcagtagcctgccagtaacaaaaattgggactagtatgccttaaagctaatgtaaaaatgatacagaataattatagttgacccttgaacaatgaagggcttagggatacggaccccatgtataccttttgactcccccaaaacaaccactggctggtacaatggtagtgggttatcagaacttattaacattagcatcaccaaaattggtatacaacccccctgccaatgctaaatttggctttataaaaaatcattttaaaaaactgctaatagcctgctgtggacaagaagccttaccaataacataaacagttaattaacacattttttatatgtattatgtactgtattacaataaagctgcaggaaaaaaatgttttattataaagaagagaaaatattaagtggaagtggattatcacaaaggtcttcatccttgttgtcttcacatttagtaggtggagaaagaggaggggttggtcttgtctcaggggtagcaggcaaaagaggtggaaggagaggcaggcacactaggtgtaacttttattggaaagaatctgcgtataagtgagaccatgtagtccaaattcaagttgtacaagggtcagctgcagtttgtatcagaagagagagggaagcatttgagaaaaagcagcagtgattagatgttgaggaaggagtatcatagtgccaagtagaaaactgaaaaggcattaaacacagaagaggtaagaatattatactaatctcctaaggaaatgtttccaatagctgccatttattacaaatcttaaatacaaataattattttgcatagtaaattcatatataaaaatgtgagatttgactttatttgaaccgctgatacaagtctatgttgaatatacaatgtgttaagaacattttaaacttagcaaatgcttattacctgcatgcagatgagaaaatgttcttttcaagaatctgtaagttatctaaaggaaggtataggggaaagagagatgaatagggtcagcaacctgtgtgtagagtgctctgtgaatataggaataaagtcagtttctcctgctatactctcacagtgcacttctaacaccagatgggtggaagttattccccatacatcaagtaagtaaatagttctgcagtggatactagctgggtgtcctccaattcagtcctgacgctatctacctagaggtagcatcagattccacatgttgagggcccagtcccacaagaccacttctgatgacagttgcaagctccaagttgttttacccatgcttctgattggctggctataaatggggattcccacaatttaaccaaaccttaggtttggttaaattgctagagcagcttatagaactcagggaaacacttacttatgtttactggtttattataaaggatacatatgaacagccagatgaagagatacatagggaggggtcttgaagagtcctgagtgcaggagtttccatccctatggagttggggtgtactactctcccagcacgtgggtgtgttcttgttcatattccatcctggaacacccaacccccctcactctcatatacacacacacacagagtccttttcagtttttatggaggctccattacataggcatgattgattaaatcattggccatcagtgatagataaacctttattggtgttaaatcagcccctttctcctccctggaggtggggttggactgagttccgaccctgtaagtatgtggttggttccccaggcagtcagctcccccatcctgtggttatctagagactttccaaaaatcacctcattaatataaactcaggtgtggttgaaagatgcttcttaaaaataaaagattgtctttcacctttattgctctggaacttttcaggaaacagtaacaaagggccaaatgttttagcaaaagatattcatattgctctagtcacttaggaaatttcaagaattattggagctatgagccaggaatcatggacaaaaaccaaaatgcagtcaatacaggccttctgtatccaaagtggattggttgaaggacccccatggataccaaaaccctcagattaaccctcattaaatggcatagtatttgcgtataacctacacaaaccctcccctatactttaaagcatctctagattacttatcatacttatcaacttaaaataattaaaagtctcagggtccaattaaaagagtttatttaggtataaagtgtgagattggccatctggggagcagaattacaccaaagaatgctggtcagtgctcctagtatggggaaaaatgaggattgtttatatgggcaaaaactgatacaggcataaactgaggtgctaaaaagaatgacattttctatacaaaggctaacatagatatatgactggctactattgattacattaatacagatagattacattaatacagatagatatatgactggctactattaatacattaatacagatagatatatgactggctactattgattaacagatagatacatgattggctactattgattacactctaagaggattaacattttattgtaaagaggtaacagtcacagtggtctctatctccctcatttagtctaggtttaagtaaagagtagactctggttcatgcaatctcaacacaaaggtcaggaaggcaacggtcatgcatcagagaagaaaacagccatgagtcggtttccaggagttaacttttcccattggtgtaataaatttgggagaacctgaaattttatttttacatacctaatacagtacctacacatcacttcattctcgaggattcaacatagtaaattcaagttttgcttttttagaattttatgcagtttttttctgaatattttccatccacagttgctttaatccacagatgcaggaaccatgggcacagtgggcaaactgtatatattacatagtatcacaagtgccttacctgaaaatcttgaaatgtttttaagttgggtagaagtatgtgacatgataaattttttgtttttgggagaacataggtatgttttaatccatccttgacatttcttgcaatctttacctaccaggcagactcatctaatttcacaacttcatttttattttaatgaatccccaaactatacgccattttcctgttgtcttctgagatttaacatgtttataattgaagatttgccgtttcctcttcatgtggtccctttttcagttaacattataatatgcaaaatcactccagttagaaacctcaagcattttttattcaaagcatgttgcattggccaattccctactttatatagtacgctggacttaagtttatataccagggacgattttttattagtatactcattttaactgggagaaaagtttacttttattgaattttacctatatacaaaaaatcaaggtaaagctggtaagagtattactaagaataaatgtgtttagcaatttattcagttgtgaggatattatcaggttagattatttgaattccaggttattttaacacattcagcaaacatttgcattcctaccactttgatcactcggtatttaaatcttacacggttttttttgccttattaataatttatagatatttcatagggcacggggaaacatgattagccagagttttagtggttttttttgtttgtttgtttttacttttcctatggtgctggcagtaaagctttagatttttttctaattttgaaccacttaaaaatttgcaaaagcacatgcagattgcaccattgtattttccttaaagcaccatggtgactgcatctgtgcaaaaacaaaccgaaacaaaacttatttgctgactttgtttattaaagtggataaatattgatatattttatcctgaaatgtatactgacatttagaaaaaaattagctacactacagtttgttatgtgcacaaaattatgttaatgaggtaatacatgtgatttgtaaacaaaattgttcctgtttaattttctgttgcagtaagctctgtctcctaaattgaatctttaagatctgtcttcgtttcctaccctcaccaccactccctgccaccaacaaatacattagaattcttgcctgatttctgtctctgcaggatctcttccacattcctccttcttataagagcacagtaacactatcctggaaacctgtacaaaaggttgagattgggtaagaaatatatttaaaagagatttaagtgttatcaaaacttaatacgagttacatttactgttcaaaagggtgcaatgttaaatgattcataatagcatgtttaaatatgactattagaaatatgacttaaaatgtaaaatctaatttcaatatttgtaaaaataaactggtgggaggcaacgctggaactttcagccttacttgtattcctgtagcaaaactagatttttttctgacaggttttgtaaagtgagtcacttgcatgtaagtctgtgaagctacatatttcagattattttaaaggcttgtaaatgccttctgacattgtctgcataaccaaactataattaatttgatgacatcaaatgttaattccttttttctgatgagattatcctctttaggatgtctttcctaactgatatgctaaattataaatgtattgatagcttttggcttaatagaatgtttttgaattgctcttcttcctattgttacaggcaaaagagagccagtgaagatacaacttcaggttcaccacccaagaaatcttcagcaggaccaaaaagagatgccaggcagatttataaccctcccagtgggaaatatagcagcaatttgggcaactttaattatggtgagcgtttccgtttgggtacaaggaatatgagagattaggcagaaattgtgttatactttattttaattagtaattatatacagtgtcatggttctatccaatgacttttctgaattagcttggagaactagggctgttgaggaaatgatttatcccattcctctctcattcacccttctgggctgactgtattgaacatgcaacattaaacagtaagcacttaaagaaaaatatgcctcttgtattcagaggaaccaacagaaacaaaataagttgacagaaccattctttccatgctttcccagttgcagcttcaaggcaaggcattctgtgcattctccctcagggatgggtatagcttctgagagatagtataaatgctctttcttggacatagtcagcctgctgcctatactcccatcttctgtagctagttaaaaagaaataacagaagtggagtcagatgttcaggcatcatctagcaaggaagatgtgttctattgcagtctctccctctgcccagaatgcaatcctcctatcagtgcttcctattcccctttagccattagagccaggagagcttcataccagtccatcctctcccacggctgtcgaatcaaaagtaaagtttatctctcattggcttatttcctcatggatctttttttttaaaagaatggagagaaatatcaggtcaattccttaccttgcttaagaagacaaagtttaggccgggggcagtggctcaagcctgtaatcccagcactttgggaggccgaggcaggcggatcacgaggtcaggaggtcgagaccatcctggctaacagggtgaaaccccgtctctactaaaaataccaaaaatttgccaggtgtggtggcgggcgcctgtagtcccagctactctggaggctgaggcaggagaatggtttgaacctgggaggtggagctttcagtgagtggagatcgcaccactgtactccagcctaggcgacagagcaagactccgtctcaaaaaaaaaaaaaaaaaaaaaaaagacaaagtttaggcaggcatggtagctcacacatgtaaacccaacactttcggaggccgaggtgggaggatcacttgagcccaagagttcgaggccagcctggggaacaaagcgagaccccatttctacaaagaaaatttaaaaattagttgggtatggtggcacgcacttatagtcccagctactcaggaggcaagaggcaggaggattgctgaagcccaggaggccaaagctactgtaagctatgatggtgcgactgcactccagctgggtgaccaagcaagaccctgtctcttaaaataaaaaaaaagtagattctgaaccatataatatctgtaattttgtttccaaggtgagagaattgtaacattaaattacttctataacagttgaattcttctaatgtctgaacaaacagattatatagaaagccaattttagactgaaatgaacccttcccctccagactctgagacacctttactttaaggatgatcactgaactctcttatttacataacagtatgtaaatgtgcatctccttgcctcttatctgaaaaatgaggtaagagctcttacagccttctaataacaatatttgtgaaagtattttgtaaggggaaaggattctccgttacttggttgaatcacatgttgttctctgtcacttgtatgatttaatgtgtctaacagtaccattcttaaaatcaaaagttatctcagatactgggagaatggctttaatgaaagtaatcaatagctatggcaatacaagaattgtactcctttttattggacaagtcaatttgattttacatgaagattctattgtgtaaaactcattgcctgctcaatagtgagaatcaggtgatataatgcatgtggaaaaagaatgtgaaaaatctaacactttagattgtatacagtgttttttaaaaagacacaaaaaaactgtcaacatgagaaacataagcaaagttttactcaagacaaacatccacgagtcacaacttcagttattcccagtcttcaaaataacagaagggcaaagcaaagtaaacatgcaaaagcaaactaaaatctgattcttcttattagaaagaagagtgaatttctgcaattattttacatttgagaatttaatgtgatcaggtcataggtattctcacaacaaaatttgaagcatttgcttgactttatttcacctgttgaaacaaaagcagttctcagtatccaagtttattgctttactaaccaatgtctctgttttttgctttacaaacatggtattggttctcacaaattagttcaacttcccggtgcattcataaacatatacccacgtttagttttccttccagtgcacaaagtttccccagtaacctaaaagtactaaatgttctacattttgtgacttgtgttctttactttttggaatataaaaataatccttaaagtttaatttaaactgggagcagtgaattaaaaaaaaaatgtaagcttgaaactattgaaaagatcatgaaaatgcagagtattttttaggatgaagctcttcaaaaagaagaaaatttggtgaatctctgtactatagaaatggctgtatcaattggaggtaaaaaaaaaaaaaaaaaaaaagcatttgccaatatagaaaagataactacgtcaaatagtaccttcatacagtgtatttaatttcctcattaggtacagctgaatagagtgtaacctgaattcatattaaaattgaaagagtggattgtaatagtcttttagcttaaagctaataatagtatctatgacagtgttaagtgtgttggtgtgaataatgagtatgatagggtgaaatgtgcaggcatctgcatagatggctctaagtctaaacagtcaaaaatgcagaagtcatggcccacaaaaggctactgcactaccttaatgctcccatagttactgcatctgtctctgggagcatcttgccctcagagaaaccacctctgattttctgaatgtgttcactaggataataaacacaatgatttcattttcaaatggtttgcatactaatcagcttgtaaaaaaatgtgtcatggcataagaaggtgactttgaatcagacccattctattatacagataaatattagccaaactggggaaaggtccagtgagtttcctgtctcagaattgaattacttttctttctgcagaaaggggggtcaaaaaagacatcaagacatcaccctagtaagacataatggcaaaaaaattgattgcaaaattgactgaaaaggtatttttcaagcctccaagattgtggatcaaaaacagcaaaaccaagctctctctattgttgctaacaagattgctataatgaggaagtttagaagttaatgaagagatttgatctcatttacatatgattaaaagtccagccttgtgataacttcgatcagttttcttcatgggacgacacctttgaggaccatttctctgtggctataaaagtgactgaccaatggatgagagactcttgttctgtacatcacaagtgacttgatttttcagcaaaagatatgcttagtttatatcagtagctgaaacacactcagacgcacatacacacatagcacctatttggcagtattctgagaagcttatgtagctgataaagcagtgaaaaaaactcagcctttagatctacatttgtgtgagtccagttgcgtgaaatactgtgatcaaaacaaaaattgcatatttattgcattcaaagggacattttgtagtctaacctgattttcgaaattgattattgataatttaagatatttttcatagttatatgagttacctttagtaatgatagacaataaataaagaactaagaagttgtcatgaaagtcatagccagagcaggtagataagagaaagaaataaagggcatccaaactagaatggagaagtcaaattgttctctatgcagatgacatgatgttatatatataaaaacaaaactaaagactctaccaaaaaactcatagaactgataaatttagaaaagttagaagatacaaaattagtatacaaaaatcagtagcatttctatgcatgaacagtgaactagctgaaaaagaaatcaaggtaaccccatttataatagctgtgaaaaaaatctaggaataaattaaccaagaaggtaaaatatttctatacaaggaaaactacaaaacactgatgaaagaaattgaaggagatacaaacaaattgaaagacactccgtactcatggattagaggaattaatatattttaaatgaccatgctacccaaagtgatctccagattcaatacaacttctatcaaaataactgacattcttcacagaaattgccaccaaaaaaaattcttaaaatttatatggaaccacaagaccccaaatagccaaagcaatactgagcaaaaagaacaaagctggagttatcacactaccagatctcaaaatataaatcaaaaatgtagtaaccaaaacagcctgatactggcataaaaatagatacagagcaatggaacagaacagagaaccagaaattaatccacgtatctacagccaactgattttttacaaaggtggcaagaatactcattggagggacaaaaaaaaaagggacagtctcttcaataaatggtgctgagaaaactgggtatccatatgcagaagaatgaaactagatccgcacctcccaccctgtacaaaaaccaactcaaaatggatgaaagacctaaatgtaagacctaaaacaataaaactaccataagagaaaacaagaagcacttcaggacattggtctgggaaaagattttatgactgagacctaaaagcacaggcaacaaaaacatgggatcatatcaaattaaaaagcttctgtgcagcagaggaaaccatcaacagtgaaaagacagcttacagaatgggagaaaatatttgtaaactactcatgcaacagaggattaatattcagaatatagaagatattcaaacatcttaatagcaaaacaaatctagattaaaaatgggcaaatcatctgaacagacatttctcaaaagaagacgtacaaatggccaataaatgtatgaaaaaattctaaacactaagcatcagggtaatgcacatcaaaaccacaatgagtaagttggaagttcagggaagagattttatctcatttacatatgattaaaagtcagacattggcacccccatgtttattgtagcactattcattagccaagacatggaatcaacccagaatcaacaggtgcatcaacaggtgaatggctaaacaagatgtggtattatacacaatgggatactattcagccataaaaaaagaatgtcctttcatttgcagcaacatggaaggaactggaggactttatagtaggtgaaataagccagcaatggaaaattaaacaatgcatgttctcactcatgtggaagttttaaaaagttaatcttatagaagtaaaaattaggacagcgcatactagaggctgagaagatagggggaaggaagggatagggagagatttgtgggaggatgcaaaataacataggaataagccctagtgttgtgtaccactatagcatgactatagttaatatatactttaaaatagaagaatattgaatgttcccaacacaaagaaattataggtgtttgagatgatggatatgcttgttaccctgagctgataactgtacattctttgtatcaaagtattctaccccacgaatatgtagaattattattcgtgaatttgaagaattaagttttttaaaaagtgtacgggctgggcacagtggctcacacctgtagtcccagcactgaggcaggacgatcccttgaggcctgcagtttgagatcagcctggcaacaaaatgaggacctgtctctacaaaaaaaaaaaatagccaaacatggtggtgtgcatctgtagccctagctactggggagtctgaggcagaaagatcactctagtccagaagttcaatgttatggtgaactgtgaacgcaccactgcactccagcctgagcaacacagcaagaccctccaaaaaaagtgtagttatcgtaacatcaccttgaaacaactttgttactgggatacatttaattaagcaactaccatgaatgtagtcggtaccttgccttacgtgcttcagtatatatgttgttcttgttttatgtacaggctaaatttgtagattgaatagcagaatattagttctgttcttatagggcctactgctgtattcagagttatgagctacgtttcttctgcgtttgctgcaccatgaaatcctaagcaagacctaaacccttgttcgctttttcgtagagcagagaggagccttcaggggaagtagaggtggccgaggttggggcacacgaggaaatcgtagtcggggaagactctactgaataagacatcagcattcttcagcattgtcatgagcttaatatacttaaattctactactcattggattgccggggatgtccctttaaacagactgctgccttcagctaaaaacttaatgttctttatacctttgtatgtatgacctacttttgtaacagaccatggttgtgtccaaggtaaaaccacagtgatatttttggatgctttgtctgcaatcttgacttgtttttgcagtatcattattcagacttcaaattgtgaatcttttaaacatcttgataatttgttgttgagagctgttcattctaaaatgtaatgaaattcagtctagttctgctgataaagatcatcagttttgaaaggttactgattttcctcttccctcttagttttttacccaatatatggagaagagtaatggtcaatcttaacattttgttttaattgtttaataaagctgctgggcagtggtgcagcattcctacctagtgtcataaaagcaaaatacttacatagctttcttaaaatataggaatgacattacatttttaggagaaagtaagttgctttgcaccgcctacttaattcttttccatatattgtgatacaaacttttgaatatggaatcttactatttgaatagaaatgtgtatgtataatatacatacatacataagcatatatgtgtgtgtgtgtgtgtatatatatatatatgcatgctgtgaaacttgactacacaacataaatcactttttaaattccaggaacgggtagtctgacacggtgattatccttttgaggctgaatccgttattaacttgttatttaggtttttactcccagtagcaagggattctaagttagttgcacttacatgattattgttatttaaaactaagaataaaggctgcattttcaaagataaattggaattgctgttggtgaaataacaaccaaaatactgaatctgatgtacatacaggtttctacaggaagagatggtataatttacaatttggagatttaataaccagggctacccagaaaaagtgacttgataacatggtaccaataagtaagggatgctctctcggtttgcttttgccactttcaagattttaacttctcaggttattaatcaaaattattgtataagttagccaatagaatttttaggttaaaacaacagatggggggtttgtggagtgtttaatgtcatgggcatttttagtagcatagaccctttgttctgcatttgaatgtttcgtatatttttgtttcacagttaatcttccctccccaagtttgctattcaaatcaactgcctgaatgacatttctagtagtctgatgtatttttctgaggaatagtttgtgattccaatgcaggtgtcttcattaccattacctctacactgcagaagaagcaaaactcctttattagaattactgcacatgtgtatggggaaaatagttctgaaaggctagaatgatacaagtgagcaaaagttggtcagcttggctatggagtggtggcaataatctctaaacattccaaaagaccatgagctgaacctaaactcccttggaatctgaacaaaggaatataaaattgccatttgaaaactgaccagctaatctggacctcagagatagatcagccagtggcccaaagccatttcaagtacagaaattatagagactacagctaaataaatttgaacattaaatataattttaccactttttgtctttataagcatatttgtaaactcagaactgagcagaagtgactttactttctcaagtttgatactgagttgactgttcccttatccctcacccttccccttccctttcctaaggcaatagtgcacaacttaggttatttttgcttccgaatttgaatgaaaaacttaatgccatggatttttttcttttgcaagacacctgtttatcatcttgtttaaatgtaaatgtccccttatgcttttgaaataaatttccttttgtaattttgttttgtgtcttgatgtgttataattatggtaacttcagattcttggatagttattaacatttattgattgcttctactgtgccaataggct

SEQ ID NO: 24972 - DNA, 85388 bp, Homo Sapiens
agaaattaagttgcagatgtggcacccataagcgtctgcaggtggtggtggtggtgagtctggagttcaggggaggagcagaaatagagaaatgaggttgcagatttggcacctgtaagcatctgcatgatagtcgtccacaggctgcatgtgactatctatgggaagtctagatagagaagaaggccaatgctgagccttgcgatactcaaatgtttataaatctagaagagggcgaactgccaagctgacagagtgagcagccagggtggccagagaactggagggtaaggcagtgatgtggcacctccggagcaaaggaggagggggacggccagctgcatcaagtgctgctaagagctcaaatagaatgaaagtagaaaatgaccattggatctggcagcacataggttataagtgacttccacaaaaggacctcccatggttgagggcagtgcagcagaacttgatgaaaaccagacaaactggactggagggagtgacaagagatgaggagctcagcctccctgaacagttttgttgtcaaagggaaaagtacagccaagcgaggggtggtgtttccttcgctaaagagattaggcctgtctgaatgcgaatccagcaaggcattgcggaagttaacagcagttgcaaaacactggggcaggcgggaagaacacgatccaaggcacgagagccaggggtcagccacggcaacaggaagatgatggtgaaaaccaaaagtttctgagagtggtctcaatttaggaagtttattttgccaaggttaaggacgtgcattgacacaacctcaggaggttctgatgacatgtgcccagggtggccaggaaacatcttggttttatacatttgagggagacatgagacatcaatcaatacgtaagatgtaggttggctctttaggaggtaaaatgtgaagtggaggcgtccgggtcataggtacatttaaaggttttctgattggcaactggttgagagttatcatctaaagacctggactcagtagaagggaatgtccgggttgcatgaaggagttgtggagaccaaggtgttatcatgcagatgaagccgggaatacactgcaaatgtttcttatcagagtcctctattagtcttagggtctccgtgcggatgtttgtgaggccatgtttgacttccgcttcccatcaaggcctgaactagtttttcaagataacttagaaggccacaggcggaggggagggtccatccgttggctgcagggcttagaattttatttttggttcataacgaggagggcagggacagaagccaccgtctctgctccccagcgctggccctcactcggaaagcaggctctcccctcgcatcgtcttttaacaaattcctgctctctcggcccccgtcgctgccatctgggctctcctttccgcgcttcattaggcgctgccgcggcaggggctgagggcctcaggggacggtcgcctccctgccgggacgccccggccctggcccgcactgtggggcgcagtcacccagccgtcgccgcgtagccaggagcccggctgagcgcgttcgctgcaggagccatcctcagctgggccctacttaactttccgcaactccagtccccgcagccagtcggggaccccgcctccctctccttccttctccctctcacttcttcaccccttctctcccctccctcctccgcccccgcccccgcccccgcccccgcccccggccacagcatccgacgtggcgcggccggctgcgcacgcaccgtatgcttggctcgcggcccagcagggcgggcgggccgcggtgacgtcagtgcgcatgccgtcggtgggctcggctgcgccacgtcggcgcgcggcggccgcgcccccttaacggcagtggcactcacccggctcgcgcggccccggcgccccacgcgcgcgcgtcgttctcccgcccgctcgctccccggcgctcacacctgagctcactcgcgcacgcccgcccggcccgagaaccgcgccgccgcctcggccccgcggaagccccgccgcgtcatgtcttcgcctcccgaagggaaactagagactaaagctggacacccgcccgccggtactgactcttttcctctctctccacgcgcgggtgccgggggcgggctcgaacccgggggcgccgggcgggggctccgcggggagggccccggcgagcgctgagacgggttccgggccttgatgcccgcccgaggggcgcgggccgcggagaggtcgggcgcccaggcccgggaggagcccgccggagcttcggccccgcttgccggcggcggcgaagcgtttcttcctgaggaccgcgggcggccgcgtacctgtgcgattgcgcgcaggctccggtgccttgggcgaacccagttgcacaacttataacaaagttttggcggataatatttacttagaggatacagatgtctagaaagaaagtagcagaagcaatgaaaagtcagtggtgttaatatcatggtgatgattaattagaggctgccagcgtttcataccgactcaagaaccaaggagcggaaataatttttatcattaatcactcaatatgactttcaccgccagtttcttccacatccagattttttttttcccccaaagttgctttttctgattttgagcaaatcctaaacttctgagccaaggaagttaaagccaggaaagagcggtctttcttagaacatagggatctaagcagccttcatgcttctgccacctcctcctctctctgggcacagttcctgtttgcactttggattctgtccagacgggtctgtttccgtttctactctcctttccagtggcagtcggcccatatggagggacactggtgagaagatcaaaggccttgggtctcagaagccaagtcacttcaatgtatggatgcgtgaggttcttttaggtcttaatagcacgccttagtgtcataaactcagtcttgtaggaacagaagtctttgagaaacatggcttcttttggtggcacatttgcgccattttcttgacaataaagattcctggccaggcgcggtggctcatgcctgtaaccccagcagtttgggaggccaaggagggtggatcacttgaggtcaggagttcaagactagcctggataacatggtgaaaccccatctctactaaaagtagaaaaattagctgggcatggtggcgggcgcctgtaatcccagctattcaggaggccgaggcaggagaatggcttgaacccgggaggcagaagttgtagtgagccaagattgagccaaagcactccagccttggcgacaaagcgagcgagactccatctcaaaaaaaaaaaaaaaaaaaaaaaagattcccattatccttctctgctgtcctccgctatagggcgggaattctctgcaccagcacaatgaataggagccgttctttaaatatgttgcagtccagagtaggcaatatttttcagtggtgacggaggctctctacaacaaaactaactggcactgggaaagaaaaatgtctaactgatgccagagaacttaagaggcatggggttttagaaaatcattccactgtgatggaaaatggttttgggggaatttgtgttgcattggttttaagaaaaaaagtacttcaaagggagttttttttttgatgggatttcttttaaggataactgacttccattccaccacagcgggtccctgtccactgtggggaggagcgccttgatttccaccccgggcagggctgcctccaggaactgcagcagccacctgctctggccctccactccccaggacatgggttacattaaagcgtatctgttggaatgatacagaaccaaagtacagtaattaaattgcatacagagacacacccataaagaagttttttgttttgttttttgaaacagagtctcactctgtcacctgggagtgcagtggcacgatcttggctcactgcaacctccgccttctaggttcaagagattctcctgcctcagcctcccgagtagctgggtttacaggtgcctgccaccacacctggctgatttttgtatttttagtagagaccggattttgccatgttggccaggctggtcttgaactcctgacttcaggtgatccacccacctcagccttccaaagtgcccatatggagatttttaaggtcagaggtataaactgtacatactcactccctgggagaaattccttgctggactctggttttctttgaattgcagagtaaacagctaggctttgtgaattacagagtaagtagtttatttacccctgaggagggaagaggcagcttatttgtgctagtgtagcagtgagcttgggttctaagtttgaagacatcacttcacgcttcactggggctcagtttttctcctttatgaaattcgaggtttgggcctcggggcaagtcacagggtggggctgtgtttgctgcagtgagtctcacgtcccgcttcagcatcagggtaccagcactgttcatcccccaggtaaactcctctagtaacttcagggcaacccctttagacttacggggtgagctcttgcgggtggctgtcaccatctgtcatctgtctccaagaccatagttagaggaggggcccaatagcagcacccctcaaatgccagcagcatccctcaaatgccaacagcacccctcaaatgccaacagcacccctcaaatgccaacagcacccctcagatgccaacagcacccctcaaatgcgctttcctagatgttacagaggaccatgtgtgaaccttttctggcaggaagctctggtgttcttgtttagtctggcattgccagagagtaggcagctctgaagggtagatagtttttaaaaaaaaaaaaaaaaggcggcccactacactaaaggataatcatcaaggatagccaagagcacagttcataaatcaaaatcactgccttaaaaatgttgagaatgctttcattaagtgcttaaattggataacagacttgtgcctcaatgctcaatcagaaataataaaattctcttacagtgactatcttaatgttcttttgtgtcttctctttgttgctgtctggcccatatctcctgtacattccccgcaatccccttgttttccttcgtgcactaaccttcgcctctctgcctgtcttcttgcttccagggctgggtcttcttgatctctttattcccggggtggcacaaaatactcaataagcactccagagtttccccagggcctcttctcacccctcactgcccccatagcaaaccgggcccacaccttcctcaactctgagctctctgtactgtgcgcagggatgcaggtggtcctcttggccggttcaggcagcagactggtggaaacactaatgaagtttgttgagtgtcacaatgtgctgacacacttctaagcgcttggcacgtttaactcatgaaatcaccagtcatcttaacattgagataccgaggacagtgccgtttaaaaacctgacccagagccgggtgtcgtggctcacgcctataatcccagcactttgggagacccaggtggggagagcacctgagctcaggagttcaagactagcctggccaacatggtgaaaccccgtctctaccaaaaatacaaaattagtcgggtgtgctggtgggtgcctgtaatctcagctactctgtaggctgaggcaggaaaatcgcttgaacctgggaggcagaggttgtggtgagccaggatcacaccactggactccagcctgggcaagaagagcgaatatttcgtctaaaaaaaaaaaacctgacccaattgtttggagtgtctgttgccaactcccctgagctagtgacctagtgggagcggccggaaaggctgttgccttttggaacttcagcagcccgacagacgactccatcactggccaggtgcctcctcccaaggtgggagacgaatgaggcagtttgtaaaggcttctgaagagtgttagagaaaggtgctgtgcaaatacaggtattgttatttacaagtgatggatggcactgcatcatgtcctggcaaatgtgctgtcgtctgcagtcctctgtagaagtaatccagccttaatgatttgagaccttaccactgctcttgactacaaaatatttgcagagaaatggggtgagtgcttgtttgatgagttattgcaaatgcagattagcagagttagaattagcgagattctttctgtttcatctaacagcagtcatagcattccacagcagaaaagaggacctaattataagcctcgctattactcatttctgccagtctttgtgagtctgtggcagtgagatgtgtaaaatctctttgttaaatacattttgctggccctgttcccctccatttcccagtggagccaaaaccatgtgtcagtagagttctcataaatctgctacatgatagctttgaatgttactaatcttacatgtggttttctttgaaaagcagactctacatcccctctcaaagtgaattaaatggaaatataagcacgattatatttatttcaagccatgttactttttttagtaacttcagagtaacttagttctctcttacactaattgatacgtcagacatgagttaaggatgcctttcaaaagtctagtgtaattctccctgaattatctccctgcagaaagactttcagattatccattgctagaaacagaagactaatttgtcttctattaaccctgtggtcacagatttgctaagcatagtcccagtgtcaaccagtcaggaccagaaattgaatggtccaggtaagaggtctgcccttgttcccaacatgccaaggaaaacaagaccctttagttactatcttttttcagaagccttctgtcaaggtggcccatggcatttcacctcttccctagcctttttttgttgttcttgtctagacagggtctctctcaggcttgagtgcagtggcgtgatcttggctcactgcaaccttggcctcctgggctcaagagatcttctcgcctcagtgtgctgagtagctgggactacaggtgtgcaccaccacaaccagctaatttgtgtattttgtgtagacacaaggttttactatgttgtccagtcaggtctcaaactcctgggctcaagcgacctgcccaccttggcctcccaaagtgttgggactccaggcatgagccaccgcacccagccttccctagccatttttggttatctgtgacttctaacgtctttgtgagtgtccttttcatttcggccagtgccctgtgcattcttacttggttttgtgactgcttttcccttcccagcttcagaagttttttttgtttctatagagaatgttcacttttgtataaagtactatattaggtatagagaatggtacttcctgttgtaacaaacaacctaaattctcagtggccaaactaatccaggtttatttctctcctgggtggggtcttcttaacaaagagcaattcagaggcccagacaccccttgctgtataacactagcttttcattgtgtggctgctgctgaggggacaagtgtaggtcgccgtgctggggtccgtatggtgtggcccacaagtggtatgcatcatcacatcagtttcctatggctgctgtaccaaatcacaataaacttagtggttctaaacaacacagttttattatgttacagttctagaggtgagaagtccaagatgggtctcactgggctaaaatcaaagtatccacagggcaactggttccttctggaggatcggggagaatcccattttcttgccttttccagcttctagaggctgcccactttccttggctcgtggcgccttcctccacaagccaaggaaagcttcttcaaaggcagcaatgaccagtcacatcctcacatcacacactcagagccctgactcttccgcctccctctttcacattcagagacccttgagattacatgggcccacctgggtaatccagaataatctcctcaccttcagtctatgattctaagcacagaatagcagtttcccttcttcttcctcagcttacagtcagctgatgagcaaccttaattccatctacaaccctcatttcccctggccgtgtagcccagcacactcacaggttccagagtggggggacgtgatgacatgatgctgcccaccaaagtcacttttccccatactattgggcaggacccagtttgatgcccccaatccaactacggggaagctgggagtgagactggcaaacacctgactagtcctagcctcaaccaattcccaatgacagcttttccaaagcacttccaggcagccgatcctactttcccctaaactttttgaatcagcctccctgcactcaaggatatacatgtagctgctccatgtacctcccagcttgaaaggggcccagtcagatgtccggcaaggtgcccatcctggcccagtcagtactcattttgtcctttgggtcagaaactatgtcaaggatggaacacacactgctgtggaagatggagtgtttggcccaggggggtcccactatgtctctgaacttcattctttaacagggttgctccgtgtaatttaagagccttctcaccttcacagtctatgattctgagcacagaatagcagtatgaagccaacgagagtgcaaattcaggaaagtatctggggctccagctcattttttagcacaaaccattacttctaccttatctatgcacacctgaaagctcctgtaagggctccacttggtctgggggcaaggttctcattggggtcttctataacttatgtctgttattgggccagactgtcagtacccactctctgcatacgttcttaccgcctctcacccctttatcctctccactttttagggttcccaccttcaggtgcatgggcttccatagatgtgagtctccacttgccagtgattctcctctctcctggtggagtcatttttcttaactaagataggccatagtcccttgccctgttcgcattgggaagttctacccacctaatctcaccagcccctttgcttacctgccactacattgctctacctgagatcctttggtttaatcataacctgcagcactggttgttttctgttttgttttgttccttccactggaacagtcctcagaacctttcgtcacttcttttaggtagaagagcttccctttgaataacatttccatagctcttctcaggcaagaacaaaggtagcatatacttgtgagtcatactccagtacctgcagtggatgcttttgggacatttgtgtgagttaacagcccttcctagctccctgctggaaattgctccctggttcatggaactcttccagtatttcccctttcttcttcccgcagtagcattttctagtttgctatttggcactagcagatagcaagccaccagtgactgcatcttacagccaggcatcctgacacctgaggacggatgcttggcccagggtcccacatagtcatttgcctccttggtgtttgcttacctcccagatgtgaccgtaggtaaagcttcctccactccccttcccacttgggcaggcagctgctctgtggagagcttttcatttcaaactcaccttcccttatctaggtagtgtaataacctggccctgtctgtaggccgttcctttgagttactctcagaagccatggtgctctgcttcctggaaggaatctgatcaaggaaaggcttacctacgattaagggtggaacccagtttgccgcttgccagctgtgcgatttggggccgctggcttccccttctccctgcctcaggatctactccgtggggctgctgtgcagtgaaagatgcgtggactccaagtggttagagcggtgcctgccacagagtggtgatgaggagcagaagttggatctgtgattctcccaaagcttcctcaggtggtgatgtaatgacggaggtcctggtggtggtcagcaccacgatgggcaggtgctttacagggcatggccttcattccccagcaacccgtagggcagcgctctttaaggaactgctgtgaagagagggtgaagagctggaaaagcaccaacgatttgaggactccagaggcctctcttgagtactaaatgctaacttaaaaacccatttaataagactagctaacagttgagcacatcctgtgtgccaggtcctgttggaggcatttcatgtgtcctaactcatgtaatcctcagctggccctgggagaggggaacattttcactctttcttcataggtggcagaccctgaggcacagagagcttcagcaacttgcccacacacagccacacacacaagcacatacgtatgcacacatgtgcacacacttatgcacaggcacatgcacacacacacacacacaggcagaactgggatttgatcccaaggttctggctccagcatctgtgttcttatcctctgcacagcacttctgctaagaggaagcttattttttacatttgaagctctcatttgaataacaaccaccacgacaaaaatctaaggtttttctgtttctcctaaaaatactgatttgcaaataattctgcaaagatttctgcaaaagtaattcttcttttgtagttttacaaatgaagagttctagagacagtgatacaacaatcacaataaatatgtgctgtcatattttttggcagtattgtaagttaaaatgaatctgtctcagctttgagttattattgttattattgccactttttattgctacattaatcaccaaacataactgagagggattaatgaagttaattgtttttagaaactaaattaaatgcaagtgctaatgctgggtgactgagccttgacactgtgtgcttatttcagcagaggagcggacaggctgccctgcaggagcttcagaagacttgatcatttcaaatgtcaccttaacattcatcattagttttctttatagttagttgcacagctctttttatttttactttatgaacacatctgtgagttacagtttaaaagttttatgtgtgccaagttggaaagattcagagatcatttttaaatgggcatctgtattgttggtttggcctgccttaacaaaataccacagactgggtggcttaaaccatagacatttatttctcccagcttgggaggctgaagtccaagatcaaggtgttggcagctctgctttctcctgagacctctctcctgggcttgcagatggcactttcttgctgtttccttgcaggccatttctttgtgtgtgcacgacccggtgtctctttctcttatagagacaccatttctattatattagagccctacctcaattcctcattttaacttaattgtcttttaagaccctctctccaaatacaattacaatttaagggtatgtcagttaggacttcaacctatgaattttggggggacactattcagcccgtaatagcatctttcatcaatttctgatgagcatgggaaagaggtgggatagagcagggagggaaatgaatttttaaaaaatatttagtgggacagttcttctaagctcttccttgagcccgaaacattcataactctgagatcctgtgtttcaagagagtggaaaatgaccctaaggtgtaggtagataattgtattttcagtctccatttctgattgggaggccaactacgtaggctgggaaatctttttaatcttagattaaaaagctgcctgcaaatggtaggtcttttctgttttgtctttggctttttgcttttttaaaagaatttgaccttgaagtgaaaggaattcctggaaacccaaaacgaagaaggaactgaaattcagacctttagcatgagaggtgggcccacaggaggcagggagtagccaaggttggatgctcagaggccacacccctggggaaaggtggaagagggaaacctgcccagtggccctaggagggccaggaagccggactgtgtcaggctgggctccacatggggacagaggtctccttgagaatttgtaaacaaaggcttgcttttacatgagttcagttcgtatttgtactgtttggcaatttgtcttctgagaaatctgccttgaaaaggattttcagacacctatactcctggcctgacaaaaacacgtgtagcatctccccagagggttgctgtctgcatcacaggccccatgagatccttactggtaaagcccagtgaagacagattcctcctccaagtctcccaggacaagagcaagaatccacaggcaaaaacagacagcaggattagactccagaggacttcagaaaatcaaataattggatatacaactaaaatgattaaatatataaaggaattgaacgcacaagaaaagaataagaccccatcaaatacctggtgaatttgagacaaaagctgtaggaatgaaaaatagagtgattaaaaatcaattgatgggatatagagcagatttttgagaggattactgaacaggattctgtttccttctgccccaagtagaatgtcctctccgttgagaagaggtgcgggcagcagggagattttagttctaaacccaagccagaggaaatagtcgtcattttccttgctctcttttgcccttttctaacagccagctgctggggcagtgctggtcctgggagcaaacgtcaccatctccctccagtcgggctggccaagtctcccagggaaattgaagaccagtacacctgaagcatgtaagccccaggctgcctctcccattctccttcccgttcatcagcagcataaagaaagttggcctgggttttcgtgactcggcagggtccactcagtttaaaatgccagaggacatggtgtggcaagttgactgtatcgtgatgttagccgtcttgtggcagagactcagagacttgaagggtaaagctcagtaaggcccacatccagagcctggggggccaatgactacaaggaaaatgaccctgctttctagccagcaccccactctcccgaacgcctctctcttcttaatagtctgaggaggtttatctcctttctgcagatgaagcagggaatctttgagaatctgagacactagtctgagaccacatagctgagggcgtggaggaacgtgccgaccccaaacacatgctggtggctaccatgcgaggctggctttttggatttagggccagccagcatttccaaattctgttcatggaacactgtagccctgatggaggataactggtattatagccaaaaaaaaaaaaaaaaaaaaagttgtgtggtcagataggctggggagagctggcaagctgtatgcctcctgtaagtcttcctcatgcaggtagcacactaagggccaagaaggtctctcttggggaaacctatttaattttgttcaacctggcatttcccactcttaatagatgctagattacccgaccccttacaacacagtattaacatattagccataaaggaattgcacatcaaaccacaataagagaccacttcacacccactaggatggctataattaaaaagacacacaatagtaagtgtcgggaacatgtggagaattggaacccacacactggtgggaatgtgaaatagtgtggaggctttggaagacagcttggtggttttcagaaggataaattcagaggcaccatgtggcctggcagttccatttctcggtatatactcaaggaaatgaaaacatatgtccatacaaaaacttacgtgtaagttcttcacagctgcattgttcataatagccaaaaaagtagaaacaacgcaaatgtctaattgatgagtggagagatacaatgtgatacatccatgcaatagaatatttgacaagaagaggaatgagatacttacacgtgctgtaacatggatgaaccttgaaaacacgctaagtgcaaggagccagtcaccaaaggccacatagtttataattccacttatatcacatgtccgaaataagcaagtccaggtgactggcttccaggagctgggaggggtggaatggagggtaactgttcatggctgtggggtttctgtttggggtgatgaaaatctcctaaaattgattatggcaatggttgtacaattctgaatgcactcaaaaccatcgaattatacagtttaaatgaatgaattgtattctacatgaattacatatctataaagctgttttttaaaactaagttaacatctgccagcggtagggtttcacagcacagtttgggcaaagctgcagtagaagttttgttgccacttgcctggactctgtgaaggcacagtagctgtcccatgtcacccatcaccatatcaccccatcaaaaacatcttcgatatttgagaaagtaaatttcacaggggagggttgaggtgagctcttgtgttgagactgtggagaactgaaagcagcagccactctctttgtgtagtttgtgccctcgttacactgctgctctgacaaaatacttgaaaggtgaccagatagaaaaacaagagccttggaaagtttctgagtggatctgtagtaagagattatgttgagtgctgtatcattttgaatttaccccgacaaccctgaccttccctagttaatcattttcattgccagattctccagactgacttgtggccactgagcaaccaaaacctttccagctggtccccctgatccacaggcagccccatttccacattaatcccacactctctgttttcatttcagtgaaagctggtggaatgcgaattgtgcagaaacacccacatacaggagacaccaaagaagagaaagacaaggatgaccaggaatgggaaagccccaggtgggatgatgctagcgactcttgagcatgttttccaaaaaccctattcggttaaacattaacatttgttctctgttctatgattctgataactcctgggctatgtggggccctgttctgtgtatttttcccttcctaatcagggaggagggggctttgttttcagtcaggggagaaaatagagcccctagaggtcctctttcctgagcagttgccacgcgcccaccctgttccccaccccacacccagggctggtgccccgtctgtctgcacagttagagacctacctccacctgcccaggtgcctgggtttagccagtgtgcctcccttcctggaagccagggcaagccaagccaagcaggagcagcttcctgtggctcattggttttctgatggtggacacagctgccagccaccctcttcccaaggctggaccaccagagtggacgaagtaggcaaattcttgcacctgtgagtcttttgtactccaggtttctgttgtcattccagagaaacaaatactaacaatttctgggcagtagtttgcaacttaggcttccatactgaaatcacatggagacccttgagaattgccgcactagttgaacctcaggggtggacctggctgtctgtgtagctggggcaagaacttctgatttcagaatggttgaagcatttcctccctcggatcatcagccagatctagaattacaaggccatgcccttatgagtgactgggtgtccttatatgatacctctgctgccaaccctcctggggcctgcacaggggtctccttgcagacccctcctcccctgctcaacacctattttccttaaaggttcagatttccagttgggttcagggaccttgaaaggaatccatttctctcgactttgcaatacgcaaacaggcaccactaacacacctctgcgggagctcgtccacgtagaagaaagcactaagctctctacttatacagcctgtctccagatgatgtctcagtcagaagaggagagggtgtggaaggggaaagaggctgtggaaagaagctaaccttgattcctgtggattaggcccatgcttttatttcatttcattccagcagtcctgaatagtaggtggtattctccccagtttatgtacaaggaaacagaaccccaaagaggatatcagcttgcccatatcatgcaccgtgctaggtaacgtagcaggaagttcaacccagttctcatggagtgctcagcgggctaggcttccaaatggatagttgccaagagtaggcacccacatgaggaagtggtgcatgttcttggtaaccctgcctgtctgcttctaagtggccttccccattgagtattgtctataaaacctgatacagtatgagttacggagcggccacgtgagggaagaacagcattttgggtgacatttctgagtgattattagtgattattgtccattttaaatcatgagattagcagtgtaaagattcagtcccagttctggtttaaaagaaggcagtttaaagaaaatgctagaattgtccgggcacggtgtctcacgccagtaatcccagcactttgggaggccgaggtgggtggatcacttgaggtcaggggtgcgagaccagcctggccaacatggggaaaccccgtctctactaaaaacacaaaaatcagtcaggtgtggtggcatgtgcctgtaatcccagctactcaggaggctgaggcaggagaaccccctgaactcaggaggcggaggttgcattgagccaagatcatgccactgcactccagcctgggcaacagaacaaaactcttgtctcaaaaaaaaaaaaacaaaaaaaaaacgctagaattatttttctcacttactgtattcacaaagctatgtttggaacgtaacagcatcagcaactctcctgtaagttcacaattgtatatctgtaggacttgcggcccgacgtattttagaatggagaaatttgggagtctaggaggatattactgcttttaggagaataaaaccttgcatataccacatagtaccccctaggagaataaaaccttgcatataccacatagtacccccagtggggtctcaggcagtatattgtaatctatatgtgatgttcaaaccgaattagataatttttttaaatttagggactagtgtcacttcaggttaagttttgcctccgtacaagttatgaggaagccttccattttctgagcattcttgagttgggaatcgaggctaagagtgtgtaagcctgtagtaatttccctctaggaaacctggggtgtcattgcccttcttcataaccatctgtttccccaaggaagaaagagggcaagagatatcgccttgcctggaaaaaaagttcctggaaagttaatgaaacactgcttttcttggtgagtttaagtggaataaggtacagatagctagttccctacctaacacagtgtcaatacaatgagagatagtaatttattagcaagtttagaaataaggacagaacagcccactagttttctttctgttgatttttttcatgagttgacatgcagcttttctagaagatgatcaatttaaataaatatgccagaggatgaacagttgaagaggaaagatcgagcaccccagcgctgtagattgtagcatcttatttaccttaaagatttgttctctatctctagagaaccagatattttgaagcaggccgactgcagggtatggtttgcaaagcacatgagcaaggcttttgttgttgttgttccctgcagccaaattgctaggatacattcctgatgagtgtgttagcacttgtcctcttgactttggcttggctgtttactgctgtgggttaaacaactcgacacagcatttacagaacggggtaagcctgtgtacactctttagctattgatgtaagttgccaaaacagctttttctaacacactccacgaggcctggtactctgtgtaatagtttacttttaccaccatgcactcccactccccatttctctggtggactgattgaataatcataatcaatcatcatcatcactcattcttacagagtgcaatgagctcggctctgttctaactgctctgttcatattaattcatttgatctgtgctactgctcagtttgttatcatccctatctcagagctgtttattattggctattactcccattctgaattactactccctcttcaagagctctgagagtgaagtgacttttccgagggcacacggtgggtaagtggcagtgccagcattccagtgctggtggcagcttctggattccttacgctgctccacgaggctttgcttagccattgggctcttgttttgtgctgggcacctgctaagtgcttcacgttgaatttagtgctcaccgcacctataagttggtattactgtgtccattatagagacgaagaaagcaaagcttagggaggtttccaacccaatgatatgtagtcggtcattggcctggccaggattcagccttgagtctgtcttggtttggaagcccttgcccctgatatgtcacgtaagtccctggatccacatagattgcaatcctgatctctctgtaaatgaaacttactgattctggggttgcccataaccttgtctgcgctcctcaaacccataatcctacccttttgcagcctcaccgtcagtaggtggtctaattatcactttacaataaggtttcaggggactaggctggttttacttcaggtatggaaaagcctacttacttgcagaatgtataaaacacttaattatcctcttggaaatgtcttatagcatgtgactttcctatccacattaccctgatcctaaagttttatattctttaattttgatcccagtgttgttcagatatgaaaatgagtacctaacaccaaatgccagtttccttcttagctatagatgtacatttgcaaaactttcttttccttgccagacattcaagactagttttaaatttactgactcatctctggtggcttccttccccattaattggaaaatcaagtactgattacagagaaaagggacaagtggaagattaaagatgttactgtgttgacaggaaaaaaaaagccctgcaacttttactagttatttttcttgcaattgtttatgcaactcttattccctttaatcttgtagctttccacagacttaaacgtaatttcttatgctaccaagttgttttgagatgctgtgttaaaaaaaatatagccaaaatgtgaaaatgctgccaaagaatttccgtcaacctgagttctagttactggtggttcttcatgtccaggaagagtaatagtcttcattattattagctaatactttcctgcgtggctgcttgattccatctcgagccgacccaattaaggaaactggtggtttccaagccttttgtcgagtgtcataagataaagtagccagtttcattatgtaaaggagagactgcagacatagaatggactttaggagtcagggttcactagagaaaacagtttaatgtcaaacatttgctgacattctgccatgatctgggcttggtacaagatattaaaaaggaatggataacaggaggggtaaaccagaaaagaacgggtttggtcactgacaagtggtggatggaaaaggggtggaaagaaggaagaaacagaaatggggaataaggaacaattcttccctgagcttgactttttgcatggttctgacctagaaccatggcactgtttcacacacctgacaagtaagccaacaattcacatcaaccaagaggtgggagggacccagaatggcgtacaagcactgacggattgaagggagtgggaaatgcaattgcttgatataaccatatttaagggagtagggagttacctaattaactttggaaaacaacatttttaagtggatactataaggctaaagacaataaaaaactatgcataaatggtgtacttcagttagtaaacaggcttcttaaggggcatggtttagcaattctgaaattgccttatgtgaatactaggattcaacaaacaaagagccgagttcctcactgtcagagaaagaggttacaaataggaaagggagaagactgaaatgaacttggtgctgttggatgggaactagaagtatctgtatgaacatatggttctgaatggatagatggatggatggatggatggatggatggtagatacaaacatacctatacagatatacagaaatgaatatggatgagagggttagtgtcatacctgtatttcctagctttgttcactgagagggcctaaagaactgacgcccatgcagccataagcatccctagggcccagactgtggtgtctaaacaccattccccagtcagaggaaccacggttccttggagaagtagttgattccaggccaggacaggaaaaatactagatgagcctggaatatactgtagtgccagaacataaggaagttctccagaaaggtttggggcagggcagaatgttatagaagcccacctgaagaatctccttatggccttagctggaataatttgcaacaaagtgatagtattagatttttttgtttttgtttttgagatggagtttcactcttgttgcccatgctggagtgcagtggtatgatctcagctcactgcaacctctgtcttccggtttcaagtgattctcctgcctcagcctcccgagtagctgggattacaggcacctgccaccacgtctggctaatttttttagtagagacggggtttcaccatgttggctaggctggtcttgaactcctgaccttgtgattggcccgtcttagcctgccaaagtgctgggattacaggcatgagccaccgcacccggccgatagtgttagattttaacccatacggtaaaataaatatccatgagtccatactgacataaataattgaattaacaagccaggagaacggatagctcttttttgtagaagaactccagttacttaatgtataagaaaggaggtaactagaatatcaccaggaggcaaacagcacagtaattgttatagacaagatccactgatggatgtcagaattaatgggtaaaagtttgaggaaaaacacgatatttacgtagtcaacaggatatttgcgtagtctcaaagtatcttccccaatatatctattaattacaaaacaaaatgaaaagagtgtctttaccgtggaagccatgagaagcacattgtgtacagtatgaaaacgggaagaaggcagagcaccaccttcagcctcagctgggaaaatgcaggttgattgtcacaaaaaatactacaaaaagccttcgctgctctgcctgtgtctgtgaatgaccacgaaggtgctacgtgtgtttgattttggggttacaaataaattttagcaagtaggcacgtttacaaaaatggaataaataaatagtaatgatggactgaacttattatctcgccctttatagaaaagctttgccaaccctcattttaacttagtctgccttcagaaactagtctactacttcataaacaacttaagaaacttacaacagtatacttctaattaccactctacccactttgtgttttgtcatatactttacttctaccaatactataaaaaataatgtgctggtgattacttatctcctggccctccaagaaaaaattttaaaagcccgatttgtagcatttgctaattttatggtgtgaatactcctaccacagccccccaccgcacctgcttttttttgagacagggtctcactctgccacccaggctggattgcagtagcataatcctggcttactgcagcctcagcctcctgggctcaagcagtcctcccacctctgcctcgcaagtagctaggactagaggtgtacaccaccacgctcagcaaatttttaaattttttttgtagagaccaggtctcaccacattgcccaggctggtctcaaactcttgagctcaagcaatcctcctacctcagcctcccatagtgctgggattacaggcgtgaaccaccacacccagctacagccaattttaaactaacaacatgacatcactaaacatagacttgtgaagacatgtgaacagtcagctctacatgccagtgtaagtcagctccaacacaccactggctacaacttccacttacattgttattgtttttaatagtagccttttaaagatgtttaaagaaagatagatatgaaatatcttttaaagattcattatgcacatctaatgttcattctgtctggtgtcctttatttcttcccactgggtttctgtctgttttattctctttctgaaaatatttgtgatagtaaatgtctgctggagatgaattcttccaggttttgtctttctgaaaatgtctttgttttgcttttacttttgaaagatgttttcactatatattgaattcctagttaaaaattttttctttcaatgtgttaaacacggcattccatttttttctggcttccattgtgtacagcgagaagtcagccataattcttgtcatttttctctgtatgtaatgtttctgtttacctatggttactttcaagattttctctttatttctgtttttcaacagtgtgtttgtgatgcaccaagtttggttgtctttgtatgtatcttacttgggattcactgagcattttttatctatggtttggtgtcatcagcttggaaaaattgttggccattgtcttttcaaaaatatccttgcttcatttttctcttctttttttgagactctagttgtacccatagtgaacatttgatatgttcacaggcctcggatgctctgtttttctcctctctgccgccgactcttttttcctctcctatttcagtgtagatggtttcttttgaacctgactcctttctcttgtgcccagtgtggcaataagtccagtgaaagaattcatctttgatatcctgtttttcatttccacttccatttggcttttaaaaatgtatagcttccatttctctgctgaaatttcctgtcttttcacagatatttatcacagttattttaaatcttcatctgatgagtccaacatccaggcttggtccctcattctgttaactgtttgtttctttacagtgggtcacatcacttcttcgagggtcttttaatttttaagtaaagtaaaacctggtgtgtaaaagaatgacagagacagaaataacactagaagctgaagtaaataatatttacatcagtccagaaaacagcatgccttttctgttcaaacccattcgtgtgtgtgtgtgtgtgtgtgtgtgtgtgtgtgagttaatttagtatttatagttgaaccgggcctgggctgtattgctgcttaagttagattcaagacctcacaaatatcaaattaattgaaggtaggattataaccttcccacttgtagtggcttaggatatgaatgcctggaaggtgtgtctattttcctgccctgccattggacttcagcaggctctgtgtgtgtgctgagccttgtgggcgagagcctttcagttccctcatccctttccaaccaagatggacctcttcttggtcctgggtgaggcctagagtgccagtgggaatcataatatttgcctcatgtgattataattcactggtcaattagacaacatataaaaacacctcaaccatctcagtcacgtattaagtgatagctgttattacatctgtggtgattttttaaaactttttgttttgaaataatttcagacatacagaaaaattgccaaaaaaaaaaagtactaaaaaaatcccatctacccctcaccatattcctcatatggtaaaatttcaccacacttgctgctcctcccatttctttctttctttttttttttttttttttttttttgattcagagtcttgctctgtcacccaggctggaatgcagtagtgcgatctcggctctctgcaagctccacctcccaggttcacgccattctcctgcctcagcctccccagcagctgggactacaggcacatgccaccacgttcggctaattttttgtatttttagtagtgacagagtttcagcgtgttagccaggatggtctcgatctcctgaccttgtgatccaccctcctcagcctcccaaagtgctgggattacaggcatgagccactgcacccagccctgctcctcccatttcttaacgctcacatatatctaaatctacatctgtctgtttatacgaactttcttctgaagagctcttttactctggaatgctttagtgtgtgtttactaaaagcaagtactgtataattatcaaaatcaggaaactaacattgaaacagtagtgttatctaatctacagactcttcagacttggcccattttcccactactgccacaaatttcagtccaggattataccttcatttagtgatatatctttagtcgcctttaatctagaacagttatccagctttttaaaatctttcatgaccttgacatgtttgaagagtataggtcatttattttgtaggattttcctcagttcaatttttctgatgtgccttcatgattggattcaggtcctgctttcagggcaggggctgcacagaagcgaggtcttgtccttcttgatgcattggatcaggaggtacacgacactccccatctcatggccggtgatgccagctttgattgttcagttaagatggcatctgccaagtttctccactatcaatttactattttaccctttgtaattcatacgtatctcatgggggaatactttgcaactctatgagtattgtgtttctcatcaaacttttgcctgctactttcagcattcactgatgatgcttgcctgaaacagtaactactgcagatatactgtatttgtttcccagggctgccttaacaaaatgccacaacctgggtggctttaaataacacatttgtcatctcagttctggaggccagaatgctgaaagcaaggtgttggcaggttggttgcttctgagagctgtgggaagcatgtgttccatgctgctcccctagcttctggtggtttctgcaatctctggcatcccctggcttgtagatgcatcactccagtcctgtgcctttacatggtttctccctgtgtctctacatcatctttcctctttgtgtgtctttgtgtccaaatttccccttttcataaggacactggtcatactggattaggacccatcctgatgacttcattttaactggattaataaagatcccacttccaaataagctcacattctgaagtactgggagttaggatttcagcatgccttttttggaggacacaagtcaacccgtagcagatgccaaatggtgatctatagcaatttttaatggttctctcagtcaagttcattgctaagataataaatagaaaatttaaaacttcagttaaaagatggcccagcaatgtgccagcttaaatctcaggcctgtatgcctgggaatttttatctttagccatgatctgcatgtttgaactttaagccgtttggtgaaccaatttcaacattacccttaagttctaatgtcaccttttatatccaggctagttgccagctgccttttaagaggggcgtgtccctgttctctaccatgtgtgtggagatttcagtagaccagggatgctgagcaccggccagctctcagctccagttttttttgttgttgttgttgttttgtttttgtttttgttttttttttgagacagagtcttgctctgtcgcccaggctggagtgcagtggcgtgatctcagctcactgcaagctctacctcccaggttcaagtgattctcctgcctcagcctcccgagtagctgggattacaggctacatgccaccatgcccagctaattattgtatttttagtagagacaggatatcactatgttggccaggctgctctcaaactcctgacctcaggtgatcgcctgcctcagcctcccaaagtgttgggattacaggcgtgagccaccgtacctggctcagctccaatattgtgagtgccctgtgctggcagacagggcccaccacttgccagcagcagctgacccaggtgctggagtgccacgggccacagagccctgcactggccaaaggcagagccgcaacatggcccaggcactgagtgacatgtagtgtctgtttgagggggtaactggttgtcactgcttatggactgagaggcctcttccagggagaagctgtaaggaaggtacagcaagaccctcagaataaaaagcaggcctgatttcatggcagcataaaatagtaacaaatagcccatctgccctgggaaggagaatcaggaagattcccgttgctgttgggcagttcttcctgtcaggtttgtcagactgagactcagagaccaagtttgtaggcaaaatggggcattgctgaagtgtcaccgtttatgtgccagcaagggagtggtaaaaggaagcgttttgcctgtggcaacttgggcggcagaaagttgacagaacaagcacaagccctcaaaccccctgacggcagccgagtctgctggcagcatccgctgcgtgtgaagccccatgcaggatgacatctgtgcaagcgaggctgcccagggagggttggcgtctggcagcctctccagaggctgcaggctgtcctaatggcagcttcgagatctgccattaggacaaagccattctcatctccacccaggttagagtgggcagaacttccaggcaggctggctgcctctccaccaagaagcagcacattagttttcctagtgctcccataacacagttgcacaaactgggtggtttaaaaacagaaatgtttcgtctcacagttgtggaggccagaagcttgagatcaaggtgttggcaggaccacactccctctgcaggcgctggggaaggtctgtcgcaggcctgtctcgcagcttctgatagtgcttggctggtggcagcctcactctgctgcctttgcctgacgttctccctgtgtgcctgtctgtgaccaaacttcccctttttataaagacacctgtcctattgcattaggggcctacccttctccagtatgacctcttcttaactaattacatctgcaacaaccctgtttgtagataaggtcatgcccttaagtactggagcctaggatctcaacctctgtttctgggggaaacgtaaattcaacccacaacaagcaagcagcaccttgtgctactaggcgtcagctggcagtacctggctctgttggcattccaacagcaatgacagcacgataatttattaactatgatgcttacatggcaaatgattctctcttcccctatgccagtgtttactgttgctcaggctgagcactgcagcagcccattttcctgaccaagggcatgctgtgtacagtggtgtggccccaaatttgatcacacactccatcaattaagaaaaatgttttctgcatgcatccccagcatatgagtattcattttaaaagtatacatgtgcactgcattaccactatataagttatgaaacatatacaaaatgaatggtaagatatttgataaagatgaaatcagcagtattttaaatgtcttgctatttctagtgacttggtactatcattagctcatctcaaggtccagatacccttgagatgggatttctcgttaatgattcaggatgtaaatctaaatttctaatgggcttccaggcaatttcaggttttgttggggagagctgcttcttgtcacatgtgactaggttgttggtatttgtaacatggagaccaatgacgacaggcaggagcgcttccctttgcttatgttcacttgtgcttgtattgagattaacttcggcctccagaggttattttttcaggaattttttttaagctacttgtccattttgtaaaagttagcttaaattcactctaaattcatcatctgagcacagtttgaggcacttgggatatattgaggatgatactagagaattgaactcattaccccgttaaccagatggagtcatgggtatgttgcaagacactgaaagcagatgaagggcatggaggcctttgggtggcggccccacggcttccctgggagctctcaggaccaggaggccggtgagggacagtctgcctgggggccacatagtaaatagtggcaaagcttaattcattttgtttctttagataaaaaataaatgtaaatagaatatatcttcatgtttagctcattttcccagctaaataattgccttcttaagcacatgggactgccttaatcatggattaattcatcatggcccaataccacttttgttgttgtatataatagaaattaaacatttctcccaacacctgtggatatgtgtattttagcatgatcagtagaaatgacgctgtgagtattttaaggagttttgctcagagtcgccctaggaacacagggtaatagcactgtcaggattcccagtgaatctagcctgattcctcctgtcctggaggtggatgccagagaaaggcttgaggctggcaggcagtgaatcaaagcctcgccacagagcggcacagcatatgggtacccatatgtccgagatcctggctgaactccttagatttggggataagaaagaaagtgcgggcggccaggctttcctctagggccagtggcttctggtaataggctttgagacagtatttgtacaactctggctacataacggatgtggaaaccaggtgtgatttatgagcttccgaatggccccttcctgctctctctccctccacaggtcccagcctccttctaagattgccacactcctatctacaccggcaggactgttttgatctgatggaaggagggaagaaaggaaatggggctatcagttctcccttccaggctctgctctgtgtgtctgcactgcagtcatcctcttggaacggaggctcctttgtttttatggtgtgacttgaaaggttgcactatttatcaggagtgttttcttactacataaacatatgaactgaatttaaatcaactctccagtgcttggattttatagaatgaaatatgtaataataaccacatgaaagtaagagcccttattgagtttattacattaaaatgactaggcctgaagtttttaagtactttttatctagataagccctgttgacttcaattgtctcagaaggcatagcactcagaaaacacttgctgaatcagtaataattatcttggactttgattctctaaagataaaatagtcaattaacttgattacttcttattttccagttggtgaaaaaaggtgaatgcagtagtagccatgttggggaagaaaattctttatcctcacatgttctgttgggccttcccttctctctcggcaggtgtttactttgattttttatagtgcatatcccctaaggcaggactgtagtcattactgtggaattaatacgggctggagtatcaagggtggtgttctacccaagggattctcatagaatcagcagatttagagttggacacaacctgaggatcacttaatccaggtgctcctaaatggaggccttgagaggtgagatgtcagattttgctaaagatccagaaggatctagataccaaaagtgaaacatatattgggtagcaatccacaaagttttttgtgttaaaaattagccctcgtcctcttctgggcatatacccaaaagaattgaaagcagcagggtcaccaagagatatctgtactcctgtgttcatagcagcactgttcacagtagccaggaggtggaagcaactcacgtgcccatcaacagatgaatggagaaacaaaatgtagggtatacacacacacacacacacacacacacacacacacacacacacacacacacacgcaggaatattattcaaccttaaaaaggggaaatcctgtcatatgccacgtcatgggggaacctggaggtcattatgcctagtgaaagaaaccagctaccaaaggaaaagtactgcatgattctatgtatatgcagtatctaaagtagtcagactcatagaaagttagaatggtgcttaccagggactgggggaaagggaaatgtggattagtgtttaatgtgtacagagtatcagatttgcaagatgacaaagatctggagatctgtttctcaacaatgtaaatatacttaacactactaagctgtacacttaaaatggttaagatggtaagttttgtgataagtgttttaaccataataaaaatatttttaaaacaaaaaacaaggcccttgctgctgtggtaagcagtttgatggaccctcaaaaagctaaacagcatttccatgtgacctggcaattcccttcctaggtatacactcaagagaactgaaaacaagtgctcaagcagaaacttgtacatgaatgttcatcccatcattattcacaatagccaaaaaattgaaacagcccaaatgctcatcagccaatgagtggagaaacaaaacatggtaagtcatacaaagaatgaagtgctgattaatgatacagtcatggaggaactttaaaaacattgtgctacataaaagaaaccagacaccaggccacatattcaacaaggccatttatatgaaatatccagaataagcaaatgcatagacacaggcagcagatgactgattgccaggggctgaggagaaaaaggggaatggtgagtgacagcttaatgggtatcgattgcttttgaggatgatgaaagttctggaattagatggtggtggtgggttgcataacatagtgaatgtattaaaagccactaaattgtataatttaaggtggttaaaatggattttatgttctatgaatgttacctcaataaaaaggaagtccttaggcatgaaaattgggaaccatggctaggttcagcctgcacattgtcatcactgagaaagcggaagctcactgtggtgacaggactttctggaggtccatggctgaactcctcagggacatcaggactcttcagggttggggagagaggcatctcatgcagccaggctgcaggcccaggcagcaaggacacattgactccttgaagaagtctcaggatggggttgaccacaggagaggtgggtgcctggggcttttccagggccacctctctgccctcctcctagagcagctgcctccacaggctggcagagggttggccatagtagatccatgcttcacacccagacaagtggcattgagaggaagaaacaggcatcttctctttcatctctttttaggagcaagtaaagcttcgccagaagccccctagcaaactcattggccagaatcaggtgacctgcctatccctaagtcagacattgctaagattgccttagatatgtggtttacagtggcatggaggttgggaagtcaggcacaaagaccagcaccacaggcagtgtggccgggcagaagccaggctagggaggtctcctggagtagtggggatgagcaggtggcccaggtctttacagaaaaggaatgaagtgcagggagcactgctgagccagatgttaggacctggagcctgggcagtgaggttcaggaaccctcacacagggctcgggatccaaagccaatgcagctggtagcaagagatcagaatccaggtccagggtctgaggtaaaactggcaccagccaaagccatggagagattcctccctttcctccacccgcagggctctcagtagagaaagattctccccaccagggctctcaatagagaaagattccccccaccagggctctcagtacagaaagattcccccccactagggctctcaatagagaaagattccccccaccagggctctcagtacagaaagattccccctcactagggctctcagtagagaaagattccccctcactagggctctcagtagagaaagattccccccaccagggctctcagtccagaaagattcccccccactagggctctcaatagagaaagattccctccaccagggctctcagtacagaaagattcccccccaccagggctctcaatagagaaagattccccccaccatggctctcagtacagaaagattccccctcactagggctctcagtagagaaagattccccctcactagggctctcagtagagaaagattccccccaccagggctctcagtagagaaagatttcccccccaccagggctctcaatagagaaggattccccccaccagggctctcaatagagaaggattccccctaccagggctctcagtagagaaagattccccccaccagggctctcagtacagaaagattccccctcactagggctctcaatagagaaagattcccccccaccagggctctcagtagagaaagattcccccctaccagggctctcaatagagaaagattccccccgacccgggctctcagtacagaaagattccccctgacccgggctctcagtacagaaagattccccctaccagggctctcaatagagaaagattccccccgacccggtctctcagtacagaaagattgccccaaccagggttctcagtagagaaaaattcttctcgaccagggctctcagtagagaaagattcccccccaccggggctctcagtcccccactcttgtagtagatttgtataggacagggtttcgtgtcctcataattttttcagcagcagcccttagctgttttccctggcacgcacatctgagcatccactcgctgcacgtgggcatttgcttattcccctgatgtctgtaagtgcctcgtctgtgccaggtactctacacagtggggacacattagtgagcaaaacaaaatccctcttctcacagggcagccatgccactgggaacaacagatgataagcacatggacagctgaagatgagctgtggcaagtagacttagcaatgctgcaaagaaagcacagaaggcaaggggcagtgaagggtctttatctcctgagaaaaccgcctgtgaggacagcctgattgaattttcgtaaccaccattaatggtagccaaggccttctgcagaatgcatgtggaaagaggaaatgaagacagatgctagggtagctgtcccaggacacagctgtgcaggcagggtcctcgtgggcccacaagtgcatgctggagctcgccaggcaggctctggcagttcctggatgtctgagcacttctgcttcactgttaacttggggtcgccgtaaggatgaattttctgttaaggggaactggagtagcatctctgtggacatggcttcaggatgtatgggcaagcctgaggctaaggatcctgcaaactaggcacgatcaagagtgtttggtgtgctagtcagaatgtggttggctgtagttgctctggcattctaggtagggacaaccgaagaaagaacactggaaaataggggacatctttggtattccaagaatttgacaaaacctctaactagatcactttgaatttatctaagtcaggaataaagaagattataaatgacatctgttgagcattcctttgtagcagtttcagagtgataatgaaatttagggcaatcttggccaatctaaattaagagaagtaattgctgtttactttttgggggagcatcgtgggaggtaggaaatgaaggggagggaagctaagatgatggagtagaaatacacatgttctgatatgggtgcctattttcaaagatggtggtggggtataaagtttgtttgattataagagcatgaattcattgcatttatctaacattcctacctacagaacagcagagcatgacctctgtagctaaggttaactttcagctatacctggcttcagtggaaagtgggcatgagggaattgttttgacatttttgaaacctacactctttgtgggaaaagggttgttgataccctgcaatattaaataagttccgtgggttgagaaaaaaactaggacaattaacaacatggatgttgtcaattaacatgctgtttaattaacatgagaaagttgatactctttgaacctaaaagagcacatagaatttcgataggtggaaatatggtgaatctgtactggttgggggaacagcatcaatgttcattttgaaaaaagcagaataaatgatgtcattgattctggggatggggctgactggccctctccccctgcctcttcctctccgcatctctccccccaattcattcacactttgacacaagggtgccacgtaggggtatctctccagaccttcttcgtgggttagcccctcagccccctgtccagtgctgtggtcgtgatcgaaagttgtatctaaggcaagacatgtttttcctagtgtgtgattaatttgaacccaggagtttggtgattgtatctgtttacttggacttactggaaggtcaagttttctcaagaacattaacaaatcagtaaaattatcaattagtagcactgctttaatttcttaaactcagaattgacttgtccatacatccgtttatatttaatttccctgaagctctgaaaatagggcaaaagaacatagtcttggtccatcagaggtcttcttttttgtctttttggcctatcctttgggctcagtctaaatctttcccccaggattttaagtaactccacacttaaggtttctaaaaagtagcagtgatagctgaaaacctaatacagactgaaaatgaatgggaagttcatataaatcagtcataaacacatcaaattcccagtgaattcaaaagaagatgaacaaataattctcaaaagaataaatatttgtaaacaaatattagtaaataaatacaaaaaaatagcatttcactttctgatatccaggaaaaaaaagtaagttacaaccgccttcatgttcttttctttgcctgttaatcatagacagtcagccttctgtatctgtgggttctgcatccaagggttcaacccacggcagagtcacccaactgtgaactgaaaatattcaggaaaaaaatggatgattgcatctgtactgaacaggtacagacttttttttcttgtcactgttccccaaacaatacaggataacagctatttacatagcatttacatcgtatcaggaattgtaagtaactggagatgatttaaagtatatgggaggatgtgtgaaggttatatgcacatactacactattttatatcagggatgtgagcatctgtgggattgtggtatccacaggggtgctggaaccactctcccatggatgccaagggatgactgcatagattggatatctcaatttatactcccagaaacatagcagattgcctacatacagcacaccattttcgtccctcaaactctgctcccctttccatcttgttactaggctctcataacttggatattgagttgtccaagccagaaccagggaatcaacatgtatttctccctctccccagtcccccccatctaaaccctcagaatgaagtcgggcccttgagcatcaggagcaaggcagcaggccccatccccaccaccctctcacggccgactgtcagggcttcctgcctggcactcagaaccagccaatccaaacgtcaagtctcagcttggaagccagccccaggaaccctttcctgacagccctgccttcatcagggtgtgctgacccctgtgcgttcccacaggcacctgggacttcccctctcatgacactgtggttccattgtgggtggttctcagactacaagctcccccggggcagtggccaggtactgttgcctgctgtgtgccagccacccattctcctgacacatgggcacattgagagacagttcctatggacatgtcatgtttctgcacagtccaggtcctctgagcaaagacatttacagccaagttaataatgttcgtataaggagacattttaggacaatacagcttacagaagtttcccttccacttccctaaaacagttgcttacattccaggatcaagctaagtctctgtctctccctctcgacagtggagagggaaggtcaccagcagccctgtacaaggtcagcgttccctaattctggggcttctcttctgtgatgattccactacatgcataagtgacacttggccctcaccatgtcacatcactgtggggactggcacttagcaaactagtgctaagatgtcgttctttctgctctctctgactcagaggtcttgcaccttctgttgtgaacactcatactcacacacacacacacttttccacacacatgcacacacagtggcaggctgacgtattagctgacaagtgacataaaacctcaggcccttcacaattttggatgtaacgagggtaagcttggagggtgatatgactcgcctgttgtccctcagctaagctgaagtggcaggggctgaagagcagtcagaaccccgcctcctgggccggggccggcaccttcaccgtcacacctctgcctcctctgtgtgaccaaggagcctcccaaacttgaatgcacttgcagatcacctgagaatctggtcagaatgcagattctgcctcagcagggctggggtgggcctgagactatttctcatgagctcccagagttagtggtgctgcttgttccccaccacgctgtgagcagcacttatctgagacacacacaccatcccagtctctgcaatgcaagtgaagcctacacatttcagaaatgtatgaacactgtgttaaagggagaaaatggttcatgaacagtttattctttcactgtgggtgagtaatgataacttcctaattggccaccatatttataaggactccagaggggaggcggaagagagtataaatgacaactgtccaacaggcagaattgaacatttttttccatgggacttgaatctattttgaaagcatctgtcatgtgtcctgttgactttatgattatgtctcaacttaatcggtccttggggaatgagaagtttagaagattgtccccagtatgacttaagcaattcagcagtattcaggaagtctaatagccaaataacagcaaatacagctacctttagaccaggtgctttacatacttagtcttattagtcttcacatcctacaaggtaagtggtgggactctcttttgtggtcaggtatatctactgagaaagactaatggcatgcctaaggtcattaccaaagtaactgacaaataagatgtgaatccaaatgtgtgactccaaagacttccagtctcctgcccaccgtttctgctctgttaactagtcaccttttcccaaagagttgtggggaaattattgagaagaaagcctaaaatcctacttcaaatgtttaagttgagagacatcttttcagcactaggattgtattattagggactgctttccatcaagctcatttaagacagaggagtttcagtgattttccttctaccccaattgtcaactcaagctttgtggctttataagacaccacggcagtgttggagcagctctgcagcggcaccggcttctgcagaggctccctgcctccacctgaaggtcagcagctgccctggtgagtcttcggatcttgtgggcaggagcctcagaaccaggaacacaacaaccactcagaaacccctggcccagcgtgcaggagcccacacgcctcaggactggagacagcccgagctcaggacccggcataaccatgtcagaggctagcgattggagactttcaaggcgctgcaaataaaggaaattagactggaaaagtacaaacgagaggaagctggagccagggttaaaaccaatgactcacctctaccaaattcatgatgacgataagtggaaaaaaaataagcctgaaatgggaagggtggtgccaaatgggcccaaaacaaacacggctgaagaatggaaggtttgttttcactttgccagggattccaaatgtgatcagagatagaaacaaatgcagccctttcccagccttagcgaggccaagcccatggggtgttgggtcagaggggagcctgaaggggagaggggggaggaagaagctcaagtcagcacacagctgcagaacccccaccttctcctcctggggggagtagagagctacaccccctggcggctgttgggtttgtcagagcttgactctgtccagatggctgcgcacccgggttgagaggccctggggagcaccagcactcttccctccaagtcactggagccctcatccattagggacacagaaccagaaaggaggaatgtttcctctgcagctttagtttgaccccacctaggctgagtctttggtctgttagttcatgtgctggttatgactttttgaaaatcttggaccacatttatgactcttaagcaatttaggtacacatagtccacaagagccagcctcccctggtctacctgaaatgtgtgtaaagcatttaatctaggaaagccctaagctgatgggccctggggtgctggcctattgctcctgggtggcccctggtaaatcatgaacctttggtgcctgtttcctcatctgtagtgcaagatttgtgcatgtgtctctttctcttatgggacttttatagagaaaagaaaatgagggaaaaatatgaatatctgtaagctttgaaaagaactaaaagcacagcgtgaattaacagcagtcccatattcatggggtttctgttatagaggtggaaccttgctagactctggagaaaataagaaaggataagttagtcctcaagaaccttccagagatggattaatcctcactgaggccatctgcattcctttggtggcagagtagttcctgggtaggtatttataaatcatttcaggcttaaacaggattagaggtgctgtgcttttaaattgttttaatttagagtttttaccagaaattattgtataacattttgagggtagcacaaggaaatggattgcctttgctgtatggtgccttgaacacatcccacaggtttacttttttgctatatgtttttttctgcacccaaacaatgcaccgtttgtattttggcatttacttcaataatcttccaaatagacacccgcaagtacacttggatagcagacagtcccctaagatacagagcaagatgtgcgactctccttctgtatccttaggagctctgtcaacatagaaggtgtcacaactcagcattgtaatgaagatgaagataatggcatataataacatgtagggccaactcagaccagagatctttaatgaggtaggagtttggtttcacacattcttttgctttagtatctggcctggagcctgtgatagaatctctcctcagaaagggctatgtgttaattagtgactgtaacatgctgcctttttctttacttaaaatgctcaagaattgttttgtttcttgcctgggtcttcttaatgattgtttcttatgtgcctccatcccttctctgctatttctttccccaatatcccaatgaaatgagcttcacgagagtagttttgcttggatgacccaaaggagttaagtactatttccaaggttttgtagccactgaattgttcttacaaggcatcgtgctgcaaagcaaggactggcctagaagacctgagctgatcgctgtactaatagccagctgaggagctctgtgcaaatcaaattatatttacaggatagactatatatagggcgttgaattaattgccatggtttttatcattcttatgttctaattttttgacctgatgtgctattaatacagtatcttcccttttctatcagtgtgagtttgttattgtaaatggtgttttacagggactgaacatttagcttttcttttttagttgcttactcttttagaggagactgtgatggcaagagggaggagacatggcaaaatacataaggcatatctgtctatatttctttggcattgacatttcatcaagggacatgactctgaaagatggctgtcccttctaatggctggactttgcggctgtagtggccagaagcataaagacgtgtaaagaggatttttcggtacatcgaacactgaatgtctggctatgcagcttctgtgattgatattcggttctgtgggctccttccttcttaagtgcagtctgtaaaggatggtggggaatagtaatttcaagaaagatttggcatgagtatcagtcgttgggtggtgggtgtgagaagggcgttgctattggtgggtgaagtgttgtcacttagatgttgtcattttcccccatatagttttcattaaggtgacattgctgtggcatctgggtccaggcagggtatagcagccagcatctgaccacttgcagtcgtgaacatatatatatatgtatatatatgtgtgtatatatgtgtatatatgtatatatatgtatatatgtatatatatgtatgtatgtatatatatgcatgtatatgtatatatgtatatatatgcatgtatatgtatatgtatgcatatgtatgtgtatatatatagagagagagtttattaagtattaacttacacaattacaaggtcccacagtaggctgtctgcaagcttgaggagcaagaagagctaggtccgagcctcaaaactgaagaacttggagtccgatgttcgagggcaggaagcgtccagcatgggagaaagatgtaggctgggaggtgaggccagtctctcgcttcatgtttttctgcctgctttatatttgttgatggctgattagatggtgcccaccagattaagggtggatctgccttctccagcccactgactcaaatgttaatctcctttgacaacaccctcacagatgcacccaggatcaatattgcatccttcaatccaatcaagtcgacactcattattaaccaccacaagtccatcccttgtcaacttgaacccatacacatttcctgagatcatacataatcttcaaatacaataagatcataattacacctaacataatacaactatcctttgtactaccagaaacgcactgatccccaacccaaatactattacataagattagcaatacttaaatgctgatatgaagtcagtaaatcttatgtcacacaataaaggaaaaggaaatacaataaagatattttcttagtacaagtgtatacatgcacaaacatgtttttagcaaaagaaagaggaaatactcatgacaattacagtccccatttctggagccggaactggtcacatggtcgtagctggtattgatgactaccttcttctacccaatctgtattccctttgccttcagcaagcacctcagcaggttgtggttttttccctgcttcattcttgaggggtctgagccatttgtagtcctgcctgggttgggctgttgtagtttcccgtcgaccttaatcacaggcaatggtaagactaagagacaccctaatggatctcctgtattccatgcatactcttccttatctctgttgtggagttgtagactgatttcatctagagagtctgggtcaatcaccccagccaacactgtaactcccttcttaccctgttgacttaaggtaataagagcccaaagtgtccaggcaatcttaacttcaagtttaatggaatcattgttgtgtctcctggtagccgcgttcctccctttggaactaagacctctaggccagcagaacataatgttgtgggaacaggaagcaaaaattttgccagtggatcattaggggtgatggtgagtagtgccacttccacttccacctcttagttcctggacccgtgaatcctggctgtgggagaaacagtaacatatattggaggctgactgagagcatacacagccttttggagaactttgccccagccctacaaagtattgtcacctagttagtgttgtaattgtgacttcaaaaggccactccactgttctatcaatccagctgcttcaggatgatggagaacatggtaagaccagtgaattccatgagcatgagcccagtgtcagacttctttagtcataaagtgcgtgccttggtcagaggcaatactgtttggaataccatgacagtggataaggcattccgcgagtccacggctggtagtcttggcagaagcattgcatgcaggataggcaaacctatatccagagtaagtgtctattccagtgaggataaatttctgccatgatgccatcttccatgatggaaaaggtccattataatcaactagtcactaggtagctggctgatcaccccgaggaatggtgccgtattgagggctcagtgttggtctctgctgctggcaaattgggcactcagcagtggctgtagccaagtcagccttggtgaatggaagtccatgttgctgagcccatgcgtaacctccatccctgccaccatggccactttgttcatgggcccattgggcgatgacatgtggctggggaaagaggctgagtggtgtccacagaacgggtcatcgcatccacttgattattaaaatcctcctctgctgaggtcacccattggtgagcactcacaggggatacaaatatcttcacagtttttgaccactgagagaagtccatccacatacctcttccccaaatttctttgtcaccaattttccaatcatgcttctttgaagtccctagccatccagggtgctttctgacccatcaagccataaagtgggtcatgcacagcagcattccatcatcaaatggaagtgatgtaagtatgactgggcttgaggaagtcctgaaggcacaagtaagttacatgaggaagtggctcaaatgcccatggtctccttggtcagaccatatggtcaaaggtattatgtataaagtcaataaacttgcttctcacaaacggtgaatcagaccgcttggaatgacctccctgaccatccagccaaaccattggctgcagcccatgaatcagtatgtaatcacacatttgattatttctccttccatgcaaagtacacaaccaggtgcactgctggaagttctgcccactgggaagatttcccttcactgcatccttcagggatgtcctagaaaggggctgtagtgctgcagctgtctacttttgggtggtgcctgcatattgtgcagaaccatctgtgaaccaggctctagtcttctcttcctctgccaactgatcatagggaactcctcatgaggccatcagtgcaggctgtgggagagaaggcagggtggcaggagtggagaccatgggcatttgagccacttcctcatgtaacttacttatgccttcaggacgtgctcaagcccaatcacatttatatcacttccattcgatgatggaatgctgctgtgcatgacccactttatggatagatgggtcagaaagcacccagttcatggtaggcagttcaggtcacatggtgacttcatgacccatagtcaaatgttcagtttccaccaaagcccagtaacaggccaagagctgtctctcaaaaggagagtagttatctgcagaagatggcagggccttgctccaaaatcctagtggcctctgctgtgattagcctatggggccctgctgtaggctccaaacagcacccctatctgccactgacaactccagcaccgttggatctgctgggtcatatggcccaagtgacagagcagcttgcatagcagcctggacctgttgcagagccctctcctgttctggaccccactcaaagctgacagcctttcgggtcacttgataaatggaccagagtaacacatcaaaatgaggaatgtgttgcctccaaaatccaaataggccccctaggcattgtgcctctttcttggttgcaggaggggccaaatgcagcaacttgtcctttaccttagaaggaatatcttgacaggctgtacaccactggacccttagaaattttactgaggtagaaggtatctgaattttagtcggattgatttttcattctctggcgtgcaaatgttttcaccagtaagtccaatatgtttgctacttcctgctcactggatccaatcagcataaggtcatcaatgtaatggaccagtgtgatatcttgcagaagcaaaaagcaatcaaggtctctccgaataagattatgacacaaagccagagagttgatatacccctgaggtaggacagtaaatgtgtattgctggtcttgccagatgaaggcaaattgcttctggtgggccttatggacagaaatggagaaaaaggcatttgccaagtcaatggctgcataccaggtaccaggagatgtgttaatttgctcaagcaatgaaactacatctggcacagcagctgcacttagagtcaccactaggttaagcttatgataatccactgttattccccaagatccacctgtcttctgcacaggccaaatgggagagttgaacagggatgtcatgggagtcaccacccctgcgtctttcaagtccttgatggtggcactgactccgcagtccctccaggaatgcaatattgtttttgatttactattttcctagatagagacaactctaatggcttccatttggcctttcccaccataatagccctcacctcattagtcagggagtcaatgttggggttctgccacctgctaagtatgtttatgccaattatgcagcctggcactgggggattgaccacaggatgagtccagggacccgctggacccactgtaagtcagatctgagctaaagctccgttaatgacatgaccttcataagcccctactttaactgaggaccacaatgatgttttgagtcccctggaatcaacgtcagctcagagccagtgtccagtagtccctgaaatgtctgatcatttccctttccccaatccacagttactctggtaaaaagccagaggtcaccttggggaaagatgggagaaagatttgttgcataaattgttggtaatgtagtagggtccttcctcaaggggacccagcctccccttcattcaaggggttctgggtgtgtaaactgactcaagtctggaaattgattgaggagccgtgattctgtttttctaattcaaattagtcttttatccatttcacctagaagctttccgcttgtataaattaagtaggaatgcagtaagcttcctatcaatttcacttctaggaacactgtgattaattagccaatgccatagctctacactagtcagactattctgattgcctcattgcctctgccgttcattgtcgtagctgcacccaccttgcctttgatggtcgagtgctgccacttggcccctgccaccttggtatctaattagcaaacagaggtattggggtggattctgaggagaatcaacattatcttgcctggcaactgcctcagaagaggtcatcactgttccctcaggcagcgcagggtttatctcctcagacagaggtgcaaaggctggtggcagcatgggtcgggaaggggatgttgccactactgggaatagggaaattccttctggcaaaaatggttcatcagagtttacaaactcagtgtgcccagcttcatcagggtcctcccaaatgtccccattccaagttgcagggtcccattcttttccaatcaatgccctcactttaacagtagacacctggcgaggctgtgcacgaaccttttgtttcaggtcagccactcacatcataagggcttgtgtctgtttttccacaatttcagctctttctctacaggaggtaagactctcactcagggcaatcttagcagatttgaggttcagtatctgcttctgaagcccggagacagaatccctgagttcatcattttctttcatcagtttgtccactgaacttgggagcaaccaacaagctgcattatgttccttggttctccacatatggtcaaaggtattatgtatagagtgagtgaactccttgcttctcacaagcggtgaatcaggagtgccaaatgcatttattttgcataagtctaaacagtttccgcctaggacttatcagtattctccatactattagaagcagagtccttagcattttggggtctaatcatattaagcaaccaactccagaaaccccaaaaccaatgaaagaactccatccttaatattctgttcctctacaaccactcctggtaccaaaatctgtattcctcagagttccctagagggacagaactaataggtagatacatacatataaaggggagtttattaagtattaacttacacgatcacaagttcccagaataggctgtctgcaagcttgaggagccaggagagccaggtccgagtctcaaaactgaagaacttggagtcctggagtccaatgtttgagggcaggaagcgtccagcatgggagaaagatgtaggctgggaggctaggctagtctcttgcttcatgtttttctgcctgctttatatttgctgatggctgattagatggtgcccacccaattaagggtgagtctgccttctccagcccactgactcaaatgttaatctcctttggcaacaccctcacagacagacacaccaggatcaatattgcatccttcaatccaatcaagttgacactcagtactaaccatcacagttagtataggggtggagggagagaaaaaatattattttttcttactacccacagatatctagacttcgaaggagtttactctgcacgatagatgtgttcctgaaaagttcattgaaagcacaatttctcttagtcgcattttatcttcttaccagcagtttcagggcttatccagcttcattctgcccgctgtttcttcaccgatggagctcaatgtctgtgtcccctgtcacgttctcatcactttgaaaatgggaaatgattggcaggcaaccctaggacaccacacttctaaaactggccacagctatcagctaaagggagcaatgccaatatgaggtgggcccacattgtgtgagatggaaattaatgaaagcagccctgggttgatactcacatcctctgctggagaaattaacagcagtgtttatctctgctaaatctaggcatggtgtattatcgagaggtttcctgtcaggtccaatttgggatcatcaaattaattgttacgtgtgacaagctgacatgcaaagaaagcaataaatacctcagtgccagctccttgttggaattccatggtgagttcccagggccagggggcatgaatgataaatgaggctaacagcctccctgcctacagcagcctgccctttctctccgtggcatcggaagactcacccctgttttccttgagaccttagtttaactcactcacttcctaacaactgcgttaattcttcttagcatttttcttttgcttctgagaggtgctatgtacctagaaatgacccagcagcttcttcaaaagtaccttttgctgggtcttcaggaactgcctggtaattgacccacaagacattgccagtttgcctgcgtttctcaagctcagaagattttgctgtaggaagcccccggcagctcaggcttctactccatgtccccaagggtggagtggtgcaaggtgtggccaggcactgtttagaactggagtgagtggcacctggaggtgggtggggcatcagcctgatgggttggaagttgctcctgttgctgtcctgggccctgtaatctggctgccattcctattacttcacaaatactccctagtgcaagtacagcagcatccttccaaggaccaaacccaagggacatcaggctactgtgtctttaacctctccaacattttacatttggggcctcctcctctcctccaaaaacaggaactcagcaactgtccatataactccctgcactttggacacaagcaaatttaagtcacatttgtggcacaactctggaagacacagagacccttatggcgtgcatatctgtatattcgtatgtgttagtccatttttgccctatagcagtgcaaatacctgggaatacctgagactgggtaatttataagaaaagaggttgaactggctcatggttctgcaggccgaacaggaaacatggcaacttgtgcttctggggaggcctcagggagcttccaatcaggcagaaggcaaagggggagcaggcgtctcacatggtgggagcaggagcaagagagcaagaggggaagtattacacacttttaaacaaccaggtctcacgagagctcactcacaactgtgaggacagtaccaggggggtggtactaaaccgttcatgagaaatccacccccatgatgcagtcgcctcccaccaggcccagcctccaacattagggattatgattccaccatgagatttggtgggacacagatccccatatcaccatgtatctgcatatctatgcttcctcacttttcaaatccttttgaatttttttctgtatatttttcctgactttgtttttatttgtattacctgttttcttgccgtaagaagtatgaggtacagttatcaaaatattactttaaattgtaattttttttaagatttaataacaaggtctcctgataggtctgatcactgccatcactttagagtagtgatgaatgtcaacggtaattctaggtatgtgcaacaacaggaatgtgatataaaactattaatatctgtgatttctattgatgaaaaaattacaggcactgctgatgctgctgagttcaccctgagaaggccggctaaatatcagtcagatgtcagtggagataaagatgtggggttggctggtttgttggttggttttcccccagcctagttcatgggtgtcctgaattttatttctgggcccattagattaagaatctttaccttatacctcctagatctgtgttacgtcaaaacatatatgtctactctcattttttattacatcagacaactttccaaaggtgtggatctcagcgtgactctcacggttctacaccccatatgccctttccatgtggaaagaacccacggcctagtttaagtgattccattgcaaggctgctttgctgcgagtcctaattacccttttcattgtcaaatattaagaggaaatacatgggcagcctgatgggatcttgactgctccctgacgttcagttctcagacctctgctttcttctgtttaccgtccattagagaacttgcatgttcccgcctttgtcatcacccgaatgaggaataaacacagcagcacttgcccagccccgcttccccgccagagcacaccaggcgtgcctgctggctggagggacggctccttgctggtccagctttacctcagcctctagtggacggagtgcacagggcttggggcaggagacttgggtttgagtaccagctttgggacctgttgcctgtgtgattgtggaaaacacttcagctctcaggggggcttcttagctggaaagtgggggtaaaacagtaacccctgtcagatgagaagatgccagccttgagcaagataaagcacgttatgaatggctgttggtggtggttctctgtttcactcttctgcctccctcattccctgctcctcctgggcttgaaaatcagtcattgtgatctcctcctctgctgcccagcccagtcctgctgtcgtgcctggaacgtaactcccacaaggaactgctctgactgccacagatcctagacttggttagccacagaacctcttactggtcaccttgtctcagtcttgccctagtcagttgaccttcgattccaatgttaggttgtcttgctgagattccagtttccccaccctgtaacctttgcttcctaggaatcgattatggagcctttggcttgggaaggttgcctgtggagttcatcctgagagggcatgttaaatatcagtcagatgtcaacagagataaagatgtaaggcagattggttggctggttggttggctggttggtcggctggttggttggttttccctcagcctagttcatgggtacatgtgtcgtatggaggcctgcactaatgagtagatgccttggggtccacctcaggcttctccctcccccacttcaataggagccccacctagatccatttgatatcttgaggttccattcagatttgatgttttaaaacaggatctactgctacagacagagaagttgataaccactgaaagagttcaatgtagtcattctgcaactgaataacagaagccctgagaagctaagggcattcccgccagcttcaaggctaatgtgtagacccacagggcttcccttgccctagtctagaactctctcccctgtgccatgttggtcctgtgggttcctgccctttgtaaccggtcatttaaggccctgcccagtctcccccaccccatccagccctcctcacagacatcaatgtctaccttttccatgaatcaggacctgagaggccagaatctactcggcagaatacaccgtgctcagtcctcctctgcacctctcctgcccttcctatgtggaggggtctcccagtccctccataccctgaattgtgccggtccttccaggccccactgaagcggctttttcaaagccttaccttatgaccccagcccacaggagcttcccccatccgaattctttctgcacatgctgtgtgtgttgctgtgttagtttgctagggttgccttaacaaagtgccacagactgggtggatgaaacagcataagtttgctgtctcacagttctggaggttgaaagaccaaggtgtcagcagggttggttccttctgaggcctttctcattggcttgtagatggccgtcttctccctgtgtcctcaaacagtcttctctctctgcctgtctgtgtcctgctctccccttatagggacaccaatcatattgggtgagggtccaccctaatgatgttgttttaacttaatcacctctttaaaggccctgtccccaagtagagtcacactcagagattctgggagttaggacttcaacataggaatgtgttgctgggaaggacgggggtgaaattcagccagaacagcctctcacttggcacacagtggttgcctgcctcaagtccttcctgccctgcctggtcctgcgtttgaggaaggattatgtagtatattactttgtacccacgcagtgcttgcaaatgctagacacatgtcatttttcaatgaaaaactaacttgctcttgagtcccaaacttgggtttaatgaagccagtgaatcagcagttcttgaggctctattcagagcactgtgtgagaaagagtaaacagacgtcccacccagagtaaggtggctgaggtctcatcaggaagatggggatagacagttggagggcagggtggtgagaagcaccgactccaggaaacacaggaagcgctgtcagagttcagaggatttttaatgccgatagagtaagagagcgtagaagttatggctctcacagagcataaacgctggaggtaggtgcacgtgtgtcctcagaggaccagtgtgggggcagtcattaggagaatcctgtaaacactgctccttcctcaaaccagggcagttacgccccggtgagaccacctttgtctccagtcccaccctgtctgaggctggccttcatagagggtggatgcagacatggatcgcctggcatcagggcaaagttcaaatgaaattctgatgaaggtaaaagccccaggccaccccgggtgagcggacttcagccaccaactgggagccatgcgctgctcttggccctgctgatcccgaggtctgctcacacctaccttccccttgctgtgtacagcagagcaaaacccttttctctcccctcatttcaaaacatgggagtgtggaccccatggccatatttatttcacgttgacaacttcagatgtttcaagagttcaagtcttagattcactgatgtttaattaaagacctcagttgttatttattagctgcactgccttttctctttgtctcttctgtcctcacacaacacactccagggtaaattcatttcagccacagtttctcacaccgtgcctctgcggacaacccctcagccctcaccacttcccctggctcagcttggtattgctaactgggcagcttgatgcagatgcctgagataccttcagttgtcccagacaattccatttgcccctccctttcatacctgcttctcactgactccacagtgtcccttaacacccggtgattgggactcaggcacaggtgcagggctgaaggacactcccagcctgcttgccctgtcacccgcagaagtcaaggcacgtcctgccttcagggcaccttctccagccaccctcccaggctctgtgcttcccaccagcccgtccattggtgtggaccctcgtgccttcctctgcaccctccagagcacacccatcatcccaccacacttccaggcccgatgccagaggcctcctgacctcactcagagcgctctgtggcctctaagccccatgaaaggcttctgtggccccctcatggttctgtccgtattggggctgtggacacgtttcccaggaggcctctcagtgcagtggggtgaacacagagaacaggagctaaacctgcctctgccagggccattctgtggcttgggtcagataactgcaactccctgagcctcagcttctcatcttggagatgggcctgtgatatccgtttacaggacttttcaggggatttggtgtgattgaggctgtgaaggcttccttatggcccctggccaaaagcaggccctcagaagggccctagccacctctccctgaggcttcggggctggattgttttgtagccgagggaaggggaggggtcgtttgctgaggaagtgatttttccctgttttgtttctgaaggtggaggtgacggaaactcccaggcagcccctttatgtgggcacttctccctcatcacagagcctggcaatcagcctcgagcagcgccagcatcacctggggctggttacacacagatcgctgggcctctgtgtttgaggaaggcttatgtagtatatagaaatgtgcattctgaccagtcccaggtgaatccataccgatgccctgggtcccaggacatcattgccctaaagaatacaagaagggctgcagtgcccagcactcttccctttgggggtattccctgggacatgttccaggtgggtaactgtcagcctctggtccattgcccgcattttcaatgcccttgtggagggtgggagccctgctgtgcagcagagttccaagcctgctccttggcttcctgtcatgtggtcagaggcaagcagcctctaggattctctcctggaaattcattatgcaccttagcttgtgacctggcctggagaccatgcctcggagaaagccacacagccctgtttaaccatttgccaaacccatctgaccacgaggcaaccctctgggcagtgcagtgggatgttttgaacacacccaagcaatgaggttggaattgaaaatcctttccaagctctccccagtggtgggattgatgtactgggctcccttacctacctcgttactctgggagtgtcctgcgtttgggtctggcacaccacaccatgcagtagtcacactgtgtgagctccacggctgcagcatcgcatagtcggacttttattcatcttctttccccagtaactcacctgggtttttataggaatgcatgtacacgtcctgaatagcaaacctaaaaacatttataatgcatacctcatacagtagaacttcagctatttgtgttaattatagtgaatggtagtcagatgtgctttttaaaaatccagattattaaatacaaagaaatatggtggtactttcatgatcaagccatggcacatgcttgtctattccagaggtgccaggtgaattcctcgtagaggagatgtgactgaaagcacaaaggaggattacttgtaatgaacgtatcaattatttgtagattgagggtcttttgattttaatattctttctactatcttgtttatgttgcctataacctttgacccaatgaacatgaacttcaaattagtgaaatccaacgaaataaggttttactctgtcagaaaaatcactcacccaacaacaggcacagctgtgctcctgtgctcctgcaccctagttagaggtgctgagaacatttcacagcatccagagccttatctgttgaccccaaacgcattcctatatgggcctgcagtgtaggagtccacctgcacaaccgcacaaggactttcccccattgcttacgatgacaaagaaaagtggaagtgtggaaactgttatcattaataacatggtttcagagtcgctgtgcttttcacactgtacgctatagcccgttggtgggtcatgaagtcagttgagtggatggagatcagcagggatgggaccatacagatcccatattacatgggattagtgcatcccaggatacaaggggcagaattgtttgtttagggagatatgtgcgtgtgtgtgtgtgtgtgtgtgtctgatatgtgtatatgtgtatgcctgtgtgcgtgtatgtgtctgcatgtgtgtgtgtatgtatgtctgtgcatgtgtgtatgtgcgtctgtgtgtatctgtgtgtgtatatgtgtgtgtctgtgtctgtgtgtctctatgtgtgtgtgtgcacttgtgcccactgcatcacaatgtaaaatgatccaggtttttattgtgggtcatactgaaaatgtaggaaagccatttgatagaaaatcttttaagcaattccagagtagagaagaattaataatttggtttaaaaattttcctcctcaaagtggtcatttcagtttatattctcccaagttatttctctgctctgacagcatatgccctttataatctgcctgttggtatatctgcctggagttgtaacaatgctcaagtttgtattgcccgtgaaattcctttgtacttaatattaaaggatgattcagctcttcagtgtagcatccaactcttaagaatttcaagcctaaataagaattagagccacttggaggtagcgacagcatggggtgaggcaccaaattaatgtgattcatggagaatttaatctaaaagagaactggatgatgagcagagccagtactcatccagtgccacccatccatcacaccatctttgcaccatagcacctgtgcatcacatgattcctatgccacgccacctgtgtgccataccacccacacaccacaccacccatgcatcacaccacctgtacatcacgccgcctgtgcaccacactgatcgcaaatcacaccacccgtgcatcacaccacctgtacatcacgccgcctgtgcaccacactgctcacaaatcacatcacactgcctgtgcaccacactgatcgcaaatcacaccacccctgcatcacagcacccatgcatcacaccacctatgcatcacactgcctgtgcaccacatagtttatgcaccacatcacccgtgcatcacaccaccagctctcctgccctcagctcagtgctggggccacattgttacggggttttgaatatgaatctttaaattactcaagtttgtgctgctgttgagaaaaggcagaatgcacccttgggcagttctcccattcccgaacccacccacatgtctgcctctcaacacttgctcagctgactaagctacacctttcagatatcagctgaaatctcactggccctccaaaccagtttaaacccctgctgtgtgctcctttagcaccttggccttccccttcatagcacttggcttaaatgtaaatgcccagttgagttttcattattcatttgacattgagccccagccacctcagacgttgcaaactggccgactgacttggggacagacccatggctttttttaaggccagtcccctctgacttctccatgtgggttttgaacttagcctgccatccttccctcttatagttgtgggaattcagatcaagaaaggaggaagcgcgtgaccaggttacctaattaggggaggacacaggatgttcgtgttgttcatgaagatggacctgaagcatgccgtgtgcatcgggtttttctgggcttttctggaatgctgagcccttttctcgagggcagtgctcccacctacagcataggatcaggtgcacacatctgttggcctcttcattaggtacaatttaatgtattaaatttggatactgtttctaggttagtaaaagtgtgtctttatcaaatccgatcatcatttttgtctcataaacaagagacaagaaattcttccaggtaaaatgtttctcaactgcctcgtcactgattagtaaagtgagtttgtcttaacaagtccatctctgtccgattttctgacaaaccaggtaacatttgaataaattctcaagattgtgcccaagccatataaggcattaatgcatttgaggtttggatttgaaagcatcagctgcagttaggagcccaggcttcggtgtcacacttgtgagtttggttcctagcttctcctcttactcactgtgtagccttaggcaggttattcaacctctctgtgcatgtgtccttatctgtaaactgtgattattaataatattacctaagctgactgttgtgaagattacatgagttaatgtgtctccagtacatagaatagttctgggcccagagtcagaaagaaatactagctattattagtagtatgttcattagtagttgatgtatcgccatcattttatagtcaagcacctagaactaaaagttatcctaacaccctgtaagtggatggctgtggttaatacagaatatttaggcaaaatgtgtttatgaagacacttctgcctgttcttgttgtgtactgctttccatgttgtgctgttggatgcaaatgccgatgtgagctaagctctctgcagtccagagggcggaggtgactgtggcttctttctcatctacctaaaatgatgcatatttgagaaatgctttgtttctggggctctcacatgattcaggggcagtaaatccccaaaggaatgtcactttttttatggctcatggaactaatgtctcaccaagcacacctggtccagcatacccacctaaccaaggatttcataatttgtggaatttttcaacacataggtatatcaaatcataacaaaagaaaatcagcactcaaaggtatgactgcaccttacatttaaatctgcttctctccccatgaaagatgatactgagtaggaaaggaaaactgcaggagggcagagagcatcttagaccaaagttgagttctcctttctctatgaaaaatgcccgttgtctgacaggtttcgcccagatagtacacaccatgagggcatgtggccctgcatggaactgcttctgtttcatcacaaatgacaaggcagctgaaaggctggggccaaatgcacagccttgttctcacacagcagtggagagagcccaggcttctgccacacagacttgtccttccagtgaccaaacagcacgtgacccagtggtggagaaaaggaggatggagaaatggattccctagcctgggcctcccactagatcactgtgacccctatttagcctccgaggtaaaactctttccaaaatgtgtaaaccaccttcacctctacataaaatatggaacacaattgcaactcagcctttaatacatgtgtcacgaccgtgtgtagtgtgggccgcggtgggctgatgctaatggaagttctgcccaaaaggcttcctgattcaaacgcatcaggaaatgggtgaaaggaagttaatctggtttccttaagatgactcagagccccattacactaaggggcatttcagtctctcagaggaggatacaggaagtagtgtttccagaatttagttgaccacaggctactcaaattgcattgcaggatgagagccaggcagaatgtattttgggccacaattctgaggttgtgcatccgacaggtgtaggaagaccagagctagccagaaagtttgaggacccacgtgcttgtcctggctccacttcctcccattccctcgaccacagggactgtctacctctaagctgctttctcacctgtatgaaaaggaggtcagtgatgcttgtgggctcctggccctgtacactgcgcaggaaagactgagggatcacaggcaacgggctctagaatcagtgaaaggccacacaaacagaagacaggtgttggtgctcagttctattaacccagaaaagaccaagatacaatttggggaaaattccctgattacatttgttctattctgctttgccaagggtttcacttaattgaatgaatccaattttactctatacagataagtgtatagagctgaccatggcatctccatgtaatccaggagtaatctttttacctcctgacagttttaccgtcttacctgtttctaatccatttccctttcttggcagcagactgggcgacagcacagagacacataggaagtggtgagcggaaagtgcccatgtctccaaggcaaatacacattccagagcactcagaaaactgcagagggctttatgttttcacactgaaactcatggtggcaaaaattgagctgatgtgaggatatttatggtccctaaatcctacttagtgtaatatccatacattttgctgtagaaaaattaatgggtttgaatatggggtgctgcccaagcccctccagaactgttcactatatatgatttttataacatattgcctttataaaacttgaaaaatcctgaattctgaaacctatgtagccccaagggctccaggtaaaagagatcagggactataaaggaaactctggggtacaaaggcacctgtggagatgaaggtcaccaggctggctggtatttgacaggcaggacgccctgttcccaggttcaggcaagaggttgcccagccctcgggatgctgctttctgccacagcatggtgctgtgaattctccccctcttcaccgctgctgtattttttgtgaagccatagagacaagccagtgcctggcccccagcaaggctggagaggcagtgaaggcacatccccacagccacgccctgcgctgtcctctacctggagtccttgggcagccagccaggggaaggctccctgtgccccccacacccaggctgctgtgtaaagaagcaattggcatgagccccaggacactagctactgccaaagccagcagtattttatgagccttaaaaaatcttgttgtaccagtccgttatgaattattgaattaacactgcatatttatagcaacttcttaatagtttaataatttattcatcccttatggatcctttggcatatttcttttaattgttagagtaaagagtttttttagagctaacttcactggactacttcctcaatgatgcttccagaatactaaaatagaatcctgcacagttgttccgaagcttaaagcacctgatgcgcagcaaagacctgcccacatgcgagtcggtgacaccccccctgcctgtgcacagggctgcaactactctgtagaagcccacagccagccaggcccagctctcagccccaactcagcacactagcatttcacagcctacacttggattacgtgtcttctgagacagtttaggaacctaagcatcattcatattgtttctaaagggaaaaacatcttactgtgtcccaacaagtaagctccctattttgggagcacccctgctttgtaagatgtgtcctactgcccagagtgagtcattcctcacagagccctgctcctaggtgcttggtgataaggggaatcaacagaaacaggctgtttcccagcattcacttgcagatgactaaacccagaaattgtggagtagccttaggtaaggagacgaaagttgaaaacttaagacccagattcttcaggcatttgagactctggctgaggaggcaaggcatgccagatcgtttatgctcagggtaagggtgcacatctgtctgcatgttactgtcccttttgcaagggtttttttggtcatgagtgacatcgcactttattaaaaagacatgctttcttaacaagatgagctacctttgatgcttagtctttctctggtttaggcaagagtcctgcaaagccatccagctgttgttggcagctgccaggagttgccataaagaaggtagatggagtttttcctgttgaattcgttaattcaggctcgtgaatgtggtcattgataacaccccatccctcttttccttaccgcctctagctaattgtgcttatcatttaagcttcagctcatggctctatcaccattctcaagtttgccttgaaaagatctgaagaagtacctgttagcctgagctccctctaaagagggagaaaagccaatcttccaggtcagtctggcaaaagctggaggaagggcccatttgcttggggactccagatatcaacccatggccagcagatccagctcagccagattgtcgggtcacaaaaataaatccactatctctaatcgctcttttgcctcttttgcaagcctttgaggcgggcagggcatgagagttactcattcctaagaaatgagcaacaaacagttccagctaagcaccctggttcattcactgcctggccacgaccacaaacttgtgctaagctgagggtcgctgaccggtgatgtcatttggtgctcaaagcatttgttgagtatgtgtgcgcaccagaccatgtgccaggcgctgggcacacaacaaattccaccatggtccttgaccttgaaggggagccatgcgtgcagaagcctaaagctgtgttgtgataagcctaaagccatgttgggaagttcttatggcaacacagctgggaaagtataagtcctgcccttggaggggaaggaaagtgatggaaagagaacatgagccagccttgaagttgctgtttatcagctggctcaagtatcaaggtggaaccaagcacaggcaatccgagcatttcttccatgaaaaatgaaacttaagtgtcccggaaaagttgaggatcataccagaattctgtgtctcagcttggagtgaccatgcagcatatttagtctgacatgctttgagagtgaaagaaagcactgctagtaataacaccaggaccaatgcctgaacccagaccgtcccagggaatcagggacataaccatcatcctagggataacttgaggcctaatttgctgccctgaatgaagttcattctccctctactggtcagagacgagatggcaggggattggttgcaccacccactgcccccccgccccccgtccccctcaacctttttatttatttatttattttaagaaactgatagaagacaaatacaatgtcatctgacattgcaatcattattggaaactacaatgcacagtatgtttgtacttacatccttgaaaaccattttagggctctcagccccgttactgaaccataaagatgctgggtttaaaaatattcaaattggttccttattgaggcaaatgctgaggaaaagcagcagattgcatcttgagcttgaaaagaactcctctttgacttgcgttctccatgatacagctgacttcttttaaatcggtgttgtgagttagtgctcctgttccatcttcacctgcctttattaaacaagcaacacagaggcagatgacttctctgggtgctttatgcatgtatctcactttaaacactgcgttttttgtttccttgggaaataagccctcatagccaatggttgcttcaggtcttgaccaagtacccggatgccccagccagatgccatggtttgcctcctgggtgttcacctctctgtgggcttcttccctctggtttctaaggtgacagcttgttcatcagatgcatggaacagcacagacacaggcatttcacacccgtctattcagagcaggggccccatggcccagattttctgggaaagttctgttttcacacattctgccttgtgctggtcagccaatgtattctggtttgagataacagaatgtaaaacagtagggccatcttacctatagcacgtgacccagagaaacaagggccctgggttagtttgcaaagcaggtcaagtcagccttgagtcctataatgctgcagagagcccagcaccctcttgccgcagcaaggccggccccatctgggtggtggctcctgggtctccagcacccagcactgggcaggcactgggtggttgctcagtgaatatttacctgatggaagcgcccaggcacagtggtggtgagcacagatccatgcacgctgactaccatgccccacacatccacgctgcccctggggcgcaacagtgccagtgagaactccccaccagaacctgtgcctcagctgaaaatttccttcccttctcccatccctaacgactccccttcctacaggtcccagcagatgtgaaaaggagaataaagagcctccagttcctcctttggccccaaccttagtttgcattctaattcattaacatttgcagggtggcttgcagctgtccttagagatggtggtggcagttctcctgaaatgcacctgtgttgttcttgcactttctgtcacttctcagtgggcctcagaagtcaggtgggtggacttatctgcccagccatgtggaagaaggaaggctctcatgtagatgtctacgtgtacatagcgcctcaaagtgaggattatacactacacatcaattcccctctgacgtcttagtggaaagtttccattgagccctaatgctccctagaagtatgtcacatcctgcccgcggaggggcccacccagggccccattctggttaccctcttcatgctcgaggttgtgccctccaggtgcatctcagctcggagaggggccctcagggtcgcagcttgctctgtccatcatccagcatctgcctcctcactttgtgaataacagggcacatagatatcttcactggtgagatttgctggtggtaaagcatattatctggctgtcctcatggaaagcaaaggaagctccctcaaggcaggggacaccccagggaacctttgggagaagcaggaaggagtgagagccgtgggcctggggcctagtgcagcacactctggaattccccttgcttcctgcccctgccctttcattcctctctggaaaggctcattcaccaagttcacagagattctgtggttccctgcatgtcctcaggaatagctctgggggaattctcatccctgatggaggatcagtcttgtggaagtccttcctgtcaataaggacattcttagttttcatggggttgccacagagaccggccacatcaaaatagagacagcccacttttccagaaacccatggtgacctgctttcgcattagcttctggtaaacctcacaggtgtggcctgttggcctcttgctatttagggagccctctgggaccagtcttcacctcagtccctaacccagcgtcctatacagtgtgtgaacaccaaatgcctgttagtggagaggaggaagaagatgacagtgataagaagcggagacaagctcctatgtccctccagcaactggacaggcaggaaaaagtaggagatgctccagagattgtgcaaatgcttccttattttcaggcatgcttgatacttataaacaccgtagacagacagacagataggtaagtaggtaggtaggtaggtaggtagatgtgaacaaatgtgaacctggaagggccagtcttccaatatagatccttagtggctcactgggtccagatttgaaatagagccaagtggccatttgccgactaggggtcatacaggtatgctgagatcccccccaaacctgcacctttttatctttgggacttttagagctcacctgaaccaaccaaccagtactcagccgtatcagccaatcagaactaagcaaatttcattttttttaatttgaataaacagacctgattgggaacctgggtgggaacttttgctctaaaacccaagtcttcctttgttctttggaacataccttcattttatattggaggctgtgtctccctggtttgcaaactgttcactggaataaagtctctttcctccaaattcctttttcagagaacttttgttgacagatagatggatgattgatagatagaatgacactctacatatatatgtatagtatgtgtgtgaataaatgaatgaaaccaactaataaataaaccacaataaaccttagggccctgaatattaatttacccaggagagacccagtcactagagatcagggcatcatgaatagtcaatatcagggagtgagtgaagactttaattagtggctcacagtgcatttctcgaaacccaaactttaggggcctttgatgctggtctataccacagcctgccctgctgcgctcccattgtattctaatactcggcggtgtttgctataaacgtgggtgaaggtagggttgttgggttgaacgtaagttatcccaactcactagctggttttggaaagtaagcagaattggttgtgagtttagttttctgtctacttgaccttgctctctttttttttttttttttttttttttgctaagtctggaaaaggcccaagtgcttggtatgatctgaggaagggccttaggagggtccccagagctagcatttccagtcaggtagcagttgaatttgcagatccagagaccactgaggacacttactgcatcagcctggctggctggtgagtagctgtgctctcagctcaccaactccctcccttgctgtgtgtgggaaaggtggactaaggacataattcctggtgaattcaggaattcagaaagcccttgtccatcatgcagtgtccctgacctgagtccacactgtgcgtggttctcacaggccaggctttgattcttgctagatgcgtagctctgtgactttccagccagacacctggctggaaagtatcctcagtgcaagttaactctggcatctctctaattctgttgctgggttcgacacaaaaacatcctagtgacagctggtcccatttaaggtcagccacctgtgcttccggagatggaagtagactcagaccagatgagttttttggtgtctgtattggattaatgtgtacttctttctaataggaattccaatgacagttgtcttgttggatttttttctacctacatgatcattttcctttttagagccaccatagttttatcctatttaaaatactttgtactttgaaccatggacacccacctcccaaaaattaaaccatttataacatgacccttgagcctgaagattgcatttcaaaatatagacaataaatagagtgatttttaaagcacctgtctaatcagcattaagcagtcaccagcacctccccataattgaaattccaaagagtgactctaaagcgtggacgtgttcagaatcaaagatggaacggtttttagggtaaatgttacatactgaaatcaagcaacatgtaaagtttttaatacatagatgatcgttatacagactaataatcataccaattgtcctcaggccctgctggacagccgcgcatctgtcttgtaacgagctaaccatgtaataaagcacggtgagcaggcacttcctagggcagtgccaggagcctttctgaatactgcaaaggactatgtccaatgcctgatctagcgtctttagagatggcccacctacagccaaggtctcccaacaatgtagctttagagctaagcctaggcgggcttccccccagtatgttccacattgccatgtagttaaacatgcacccttttttttaagtttgccccttgcccttaatgataacctacattcttcctaaaagttaccttctctggaacatttcattaaggaaaggaagcagtcatttttgctgctttatactgtttgaattgttcaggctgctggcagtggaggtggacagggattcccactctttggtgctgggggaaccttttctcatagtaatgccctgaaaccctgcgccatggcacagcgcaatgcttagaacaaaggagtgaggaaactcaaggtgggcccgctggcattcttcaaagaagccctgagaaactctgaaattccccagtcttgaaagaaatgagagagagagaaaggaagtgttatgctttagaagacaaaaagcaatttctagactgtctttacataggaaactaattcattacttattgccactaaacatgagcttgtcagtggaggcctattccaagcacagtgaatacattattttctttaaactccctattctacaaagtaggaatcattcccatcttacagatggacactgaggctttgagaggctgctcatctgaactgagattcaaccccagaaccatctatttcctaagcccaagccctcaaacgtgccatgacactgcttttgtctgtggttctgaatcgcctatgactcctgtggagatggcagcagaatgtctgggatttctacaccaggctgaagcctcccccccgccacaccccctattccctggctcactttcaggaagtggtgcctgggctgtgcccctcagatgtggtcgcttctgtatatgtgatgaattttgagactctcagtggcccaggaccatcactacgtattaaatccataagatgtgagaagggtaattaacacttcctgttgttatttccccttctttgcatccagggaaaggggtacaatagggaagagcaggaggagggggagggaagatccacacgccagaaactgaagtggtctggaatgggaagagtgctgggcacacaggagctttctggagctgtgtctagagggaaaatgaaggttccctcctgtttaaaccagactcccagtctgtggctttcacactacatgcagagtgtggaacacgtcatctactgatgagccctattcacccaacacactcagaacttgggggtttagcctttcctaactaaaaaaaaaaaaaaatctctgtgaagttttgacatctggatcaacaattagccaaatatctgtgggtggaatgctacctggagagaaatatttcagaacccccaaatgagagcatccttcccacacagacccagacctggcccagacccagaagaacaggttgagatgaagttttgtcctgaaatcacagtgtcctggaagcagtagttctgaggaaggggcagattgccgtcccagcctcttcactgaaggatttgaaggctgattccagttgtatgaaaacagcatctcactgcaaagaaggtgctgttagaccaatgtgaacatgagctcaagcattctcacctagaaaagcacctctggttgtgcccttttgaaaaatgttataaatttcttatgccaaatttagaaggaattaggttccagattattttctctcgggtttagaattgtgtttacgacactgaagttgagttttatatgcctttggtcagactcgtgacaattagccactcctggggagaaggggcaccctcgtgcccaggtgccagcagccctcgcccgcagtgcctggccggcttccatttctccttgaggtggctgagctggccggagcgttcgcgggctgagaggaccagcagtgccatcttgtggaaatgttgtcagtgctgaagccaggctgaaggagggagacagcctcgactgtcacactctgaagaatgatgttatccagaaatgtctgggtgcaatcgagtgagacgtttccctctgctcaccagccatgctaattattattttgctgtccagaaaattaatagcccaaataaattaagaccaagccaagaaggtatttcaagaactaaaaatggcaggaacggatttgttttccatcgacttactgggaaatgtttaaaaagtcaccccagctgggaatatattttctgtaaactctggaagcacaaagctatggattctgagcagagtcaaaacaagagttttggaatttgcttctaggctgccctgcaggctctgtgctttcctgaggagactgcttttcccggtcaatgagcgcatgtgctgggccacaacctatgtcacccccttcatcagtgcatgagaagagcccccagccccattcactttgtatgggcagaagctgatcgagggtaccctgtcctcccactgcagtgctctagtgtcgtgtcctctctgttacacaagtgctaagcacacactgtgactacctttcatcagcacacagtgggtgaggcccaagggcctcttcttctgcactgacagagggtttgatttgaggtgcggcccagttctcaaggtcattaccctggaaaagcagtctctttgcccaccctcctcaggaaagcacagagcccgccaggcagcctagaagcaaatttggaaactgtgtttcgaccctgtttagaatctgttgctttctgctgtgtgtatgtgcgtgtgtgtgtgtgtgtgtgtgtatgcacatatatagagtcacctaagaaggtagggtctgttgctgtccagttttatagacaaggaaactaagcctcagaaaagtcaaccaccagctcaccagcttgtccctggcagagtcaggatttgaacccggatcatccaacactctagcccacactcatggtgtccatttgccacggtccctcctttgcgtggttctgaatcgtctctggccctgtcggctgcctcgaatctgttaaatggtttgaagcctcccctgcattttgttcccgagactgaggaacagagtcgtctgagatggtggagatctcagacgacccgactgaagagcacagcccttgcgcttcctcccgggctccacccccaggaccccaagcaaggttccagcctctctgaggcaccatttcttcctccgtaaaatagaacatcacctgccgaaggaactcagatgagctaatgatttatgtggaagtgctttgtatgctagttaaatgctagagacataagtgatcatttttcaggaaaaaaaatccactatcaagtcagaaagtaaatctttaggtagatttgaatatattgtactgtctggttgaataaaggaccctcaggttacatttagattgcttaccttaaaactctgcatctctaaatcatatacagaagacaagctaaaactctgctttaaaatgaggggactgggcttggagccaagattacatgcactatacagccctcgttccaagtctggttcccagcacttattactgtgcaacccttgggcaaatgactggtcctttctgatttaccattccaatctgtgaaatggacagttcctgcctcacaggaccaagagagttagatacagcacttctaaggggagcgcctaactcagcacctggtccatagtacatagtggtgattgataaacagtagcttttatcaacctgagatcatttctatcctttagggaaaatagagcaccagtggcttattaaaggccatgtgtccctgccttctgtgtacatgcttcctgctgatagagtacatttacatgaaaaggagacagcatttgcagaggataacttgagtagacttccatgaacccaggtcaaaactaacatgaaaatgattctgttacgtacaactctccagtaatgcctttgctgccattttgattactttcagtgggatcagagatttgaccagattcccagtttcactactactacgcacgtgtgtgtgtgtgtgtgtgtgtgtgtgtgcgtgtgcatgtttctccccatcccagaattcaccttcgtggtaactaagctgaccctaatccctaccaggatgcttgggaaggaagaggctgaccagtcagatgcacatcggaccctccctgttgcacagaatcctattttggggtgaagaagggcactgcatttttctaagagtgcagaagctctccagggttaagggaagaagggtaaggaccccacaaaactagctgtggtgagccaggctggagcagggcagcagatacaaattactttgttcacaagttgcctgtcagtagcagtcctatttgaagattactagcaatcggtccttttggggagcccggattcatttcctggctgacctgctctctgtagcccaggggaaagtattattgcaatatcggtgtcctgtggggactgagtaggtacatgtggggtgtcgcgtacagttctaggcaaaactctagaaaccgcactggaatgcagttgggagaatagctgagagagtgaaggaatttgaaatcatgcctttgagtctgggaaagggatgttctgggggcttgtggtagccttcttcaaataccaaaggactgtcctgtggaagagcgttagacttgggatgggcgctggactaagtgcagggagacagaatccggcccacctgggagacatccaggcggcccccactgaaggcccttaagctctcaactgcgaaaggatgaaggtatagattgcagcagccgtctgcctggtagggaacctcctgtccagctctaactcacaagagtgcatcgctttacacctctcagaactggggcagaaaccaggctgtcagagcaccacgatgatgagggagggtgtaaagccttagaacacaaaagaatgttaaaagtcttctcaatttttatatgagttacatgttggggtagcagtaacttgaatatattgagttaaatagttgctgtttgggagtttagggaagttttaaaactatgaatttgggtttctcagccctttccacattcctttaaagatgagaccatcaaactcagtcttgatgatatctgcattccacagggttactcagtcactgagcgtttctggcattttatcctgtctgtctgcagtttccacagaatgccaataaggtataaatcttcattaagaaaatttagaaaataagtaatagcaaacttttgttaaggacaaagggtccttttaagagtttgatgtggtccttgccagatggacaatagagacccacgtgcacggacatcaggtggctgcttagtctgggtgtgaaaaagctgcagtttctgctagtgtataggaagtgttatctggattctaatcctggctaattctgcctggcttgcagttcttttcaatttaaataagtgtagtttttaaagtctggaaaggcctgaggatatggggcgggcagggttgatagttttcactctctgtttcctgagagaaaataatgttgcatcttcaaaacagcatctgtcagaatgattttcatcagattaaataaatcctcaaagcagctatcatacttcttagacttgagaaatgtaggttatactttgcatggaagcctaatggcatttaaaataggtgtgttttgcatgtacagccttacacccagacctttgactggggtttctcgcttgtgagattttgttcaagctaccacatctcaaagagtttagtaactgtttttactttataaacgtcataaataattatttgccaatttaagttgctgttaattatagttggaaaaaaggattgggctctgaagcctttgggccaaacttgatgaaaaccttcaacacaacatacgctctgtcacgggacaagttacatgaaaatacatatcgctgttagacattttggaagaggcctgccttttgccatcttttcatgggcagctgccatatgtccttacagccaattatggccttttcagttttagagaagaattttgggggcgacttttggttcataaagacctttaatgaatgatcaatacagattgatatttattattctgtggcagggaagcttattcttaaaattagttgctaaatctaaaccacagtacgatacttcttcacacccattagaatagagcctttatccaaaaaaaacagaataaaacaaaacagaaaacaacgagcgttggcagggatatggggaaataggaacccatgtgcgttgctggtgggaatctaaaatggaacagccgctgtggaaaacaggttggtgattcctcagaaagttaaacacagaattaccatataacccagcaattccacttctgagttacacacaaaataattgaaagtagaaactcgagcacatatttatacacccacgtccatagctgcaccattcgcagcagtccaggtgtccatcatcagcagatgaatggataagcagaatgtggtctgtctgtacagtggaatgttattcagcctcaaaacagaattcccacacattctgcaacataaatgaaccttgacaatattatgctagatggaataagccagacacaaaaagacaagtactgtatgattccacttacatgagatccctagggcagttaaactcacggtgatggccaggggctgggaggaggagagaatggggagctagtgtttaatggggacagactttctgttgggaatgatgaaaaagttctggaaatagataaaggtgatgattgatagcataataatatgaatatacttaatgccactgaactgtatacttaaaaatggctaaaatggtacataatttttttgtaattagttgctgagctggctggggtttcaaagcgaagttagaagggagggagagcttggactgtctttaggaagaacgtttgccttgagcagaccagagctaaaggagaccctcagtctggtgtcctgtcacttcccgccgagtcgcctcttgcggctcgataagactttctcatgcaacacaattcttgaatattgtgtaaaaagtgcagtcttaaagcaaggacctcgcctgcggaagtgctggacacatggggttcttttctttcagtgccttatttcttaccagtgccaaacagatgggggcgctggagcacagcagtgcaggatgaagtctcaggccttcatgttgttcttccccaggttaattaggtggaatgcacactgttttggttgtgcccccaagagactgctctgacctaagcttgccactgagtgacattccctgtccctgctcctcagctcggagtcagccctcagggtgtgcacaagggcaagttcacggcctttccatcctgagtgagtccctttgactgcggcatcagaccctcagtcttgccatcactcagccaagtcgccagcaccacatccagcagaatgactagccactttgtataggatgcagcacaaaggacaccagtccctggctcatcgccacacccggtgggcctcacctcacccctcgccacccagtggttggcagaggcacatttcttatgctgagcctagcatgattttcattgacatcctctgtctttatgagcagaatccaccaagccactaaagctcagcagattcagtcatgactcagcacaaaggagctatctccgtgaatttggggtttcacaaggacagcgccatctgtgaatgactcctgtggactcttagacgctgcaacctgcaaccatggccctggacactcctggaatgagctgggcctgtggggggagggtcattcttactgctgggggtctcctttagcccccagggtctccatggccattcagcagttgcgatgggacagtgtcttgagcagctcacatgggagtgaggtgctaaatgtgggtttaggaaaggaaagagcgtgccctgggagtcagaggctggtttctaggcctcagcttccgtgtgtgttttccagcactcaggctagagcagagctgtcatgatctcatatcatcactgttcacacacatttctccgggtacatactcgaggcatagaaccccacccttgtcgtgatcaatgcaggagacgcccagaggacagcacctctgaggagcaccgagggcagggaggaagggcgggactgtggcaggcccctgggctccagactcccgtcctcagtgcacacaggggaccagtgctggagacagattcctgatagccaggtcccccgagagcctcacgtggcagctactacacagtggggctgggctcaaccaaggagcctgtcaggaacacccaacatggaggcctctccaggctggcgccctactgctggatggcgcctctgcgtcctggagttccactccacctctgcaaagggtggcgtactcacagggtagaccaccctcattgctggggatctcctttagcctccagagtctccatggccattcagcagttgtgatgggacagtagttgtgtgtgtgtgtcaatctttataaatacacacgtacagtaatacagaagtacaagtgattttaacttgttttgcttgtctgcgtttcaataatgaatatgtacaggcagacctcagagatattgcagggtctgctccaggccaccataataaagcaaatattgtgataaagtgagtcccacaactttttggtttcacagtgcatataaaagttatgtttaccctccactgtagcctattaagtgtacagtagcattacgtctaaaaaacaatgcataacttaatttaaaattttaaaaatttaaaaattctgtatgctaatgatcatctgagccttcagtgaggctcagtctttttgttggtagagggtcttgcctcagtgttgatggctgctgactgattggggtggtggttgctgaaggttggagtggctgtggcagtttcttaaaataagacaacaggccaggtgtgatggctcatgcctgcaatcctagcactttcggaggtcaaggtgggtagatcacttgaggccaggagttcgagaccagcctggcaaacgtgacaaaaccctgtctctactaaaaatacaaaaattagccaggcatggtggtgtgtgcctgtaatcccagctactctggaggctgaggcatgagaatcacttgaacctgggaggtagaggttgcagtgagcagagatcacaccactgtactccagcctgggcaacagagtgagaccctctccctctgtaaaaaaaaaaaaaaaaaaaaaaagacaacaatgaagtttgtgacatagaacatagatcaactcttcctttcaggaaagaaagatttctctgcagcatacaatgttgtttgatagcattttacccatggtagaacttctttcaaaaatggagtcagtcatctcaaaccctgccactgctttatcaattaagtttatataatattctatatcctttgttgttattttcagtgtttacagcatcttcaccaggtgtagattccagctcaagaaatcactttctttgctcatccatgagaagcaactcctcatccctgaggattttaatcacaagattgcagccattcagttccatcttcaggctccacttctaatcctagttctcttgctgttttcaccacatctgcagttagttcctccagtgaagtcttgaaccccctcaaagttacccatgagggttggaatcagcttcttccaaactcctgttaatattgatattttgacctcctcccatgaatcatgagtattcttagtggcatctatagtagtaaattctttccagaaggttttcaatttactttgcccaaatctaccagtggaattacttatttcttaaataataagacttgaaagtcaaaattacttcttgatccatgggttgcagaatgaatgttgttttagcagacatgaaaacaacattaatctccttgtatacttggtcttgggtggccaggagcattataaatcagcagtaatactttgaaaggaatctttttttctgagcagtaggtctcaacagtgggcttaaaataagcagtaaaccttgatgtaaaccaatgtgccgtcatccaggctctgtcatcccatgtatagagcacagacagagtagattttatgtaattcgtaagggccctaggatgtttggaatggtaaatgagcattggcttcaaattaaagtcatcagctgcattagtccctactaagagtcagcctgcccttggaagctttgaaaccagtcattgacttccctctctagctgtgtaagtcctagatgacatctttttccaataaaaggctgttttgtcaacattgaaaatctgttgtttagtgtggccactttcatcaatgatcttagctagatcttctggagaacttgctgcagcttcttcctcagcagttgctgcttcaccttgcacttttatcttctggagatggcttctttccttaaacctcatgaaccaacctctgctagtttccatcttttcttctgcagcttcctcacctctcttagccttcatagaactgaagggagttagggcctttctctagattagactttggcttaagggaatgttgtggcttgtcttttatccagaccactcgaactttctccatatcaacaataatgctcttttacttccttgtcactcactccagtgctcactggagtagcatttttaattttctcccataactcttcctttgcattcacaacttggctatttggtgcaagagaccagcctgtctgagcttccgacatgtcttcctcgctaagctgggtcatttctagcttttgattgaaagtgagagacatgcaactcttcctttcacttgaatacttccaggccattatagaccattgtagagttgttaattgccctaatttcaatattgctatgtctcagggaatagggaggcctgaagagaaggagagagacagggaatggctggtcagtagaactgtcagaacacatatgacaagtattgattaagtttaccatcttatatgggcacggttcgtggtgccccaaaacaattacagtagtaacatcaaagatcaatgaccacagatcactgtaacagacataataataatgaagatggacacccatagacttgcttatgcagagttgccacaaaccttcaattcctaaagaaacacattacctgtgaagtgcgataagcagatgccataaaacaaggtgtttgtttgtgtgtgtgtgtgtctgtagaggggagggtgtttatatatgtatataattactcaagcttcctcagccaccttttagggctcagtttggtgaggaagctaattccctttattatgcatgtattcttactagattgactctctatggatgacattttatatcaagtttctggagtggggtgatgtcctgcatttccgcctttcagagcctcagcaggttaaaaaacaaataggacatggagacagtggaagccactgtgcactcctgctacggaaagacggctgtgccttgttgaagatgatactatatgattcgctaccagagtggggccatccctgcttcaggctgttcctagatgtttaaaagaacattccaaacgacgttaagaaactttgtgctgccatttgtgtattcctttccaaatcttttctaaaatgttagaattcagaccacagttcctgagctttggatgcaaactccttggccctgaatccctggaagccctcccctgtggatggtatcagccatcacagcaggatgtgctttaagaatccaaatgaattcagttataccacgtggcgggacttttaaacttgagctgagcttactcatttctggccgactattaatcctatagctaaatcatgtacgtaaaggaaggggaaaaaaatccaacctgggtaaccacacaacaaacactaaataaaaccaaggtaatgtggtaaccacacaacaaacactaaataaaaccaaggtaatgtatggggcatctctgtgctgcttagtaaaacttgaagtttcttaatgtcgcgaagtaacagaaattacttgggggaatttcaggtgtttttggtaaactctttggggaagtaaacagtcagtgaactttcggaatgctgggacttttgactgcagcaaaacaaagctaagacaagtggattccttaaaaaagaccactggcagcagaggagaagcagagctgggaagagacaggctggtgagctcaggggataaattctaccccctctacccagcaggactggccttaagcaaaactgaactaagagggagatgcttcccctccacccacctccgtgagtgtccccgatcgatcgcgctgtcccagctgggctgaccttgtattcacctccgggtcttgggtgtctgtacctcttggtggaggcatttggaagtgcacacaccttgtccactacctcaaactgtgtcctgatgtttttaaattatggcacacgtagccataaaaaataagtgtacagaagagtatataattacatggagagatgcttgccatagccttagttcagaaggcagattacaaaacagtataactatttttgtaagaaaaaagttaataagaagacaagcacgtacatctgtccatagaaggaaagcctgggaggatagccccacgttaacagtgtgtgtttccaggtggtagacctgctggcgatttgagcctgtttgggcttgtctgttttttcacactgagctgtactgctttggtactgcatccattccctcaatactcggcagtttaggtgagctcagtgtgagttaacatgtcaagaggtgacatgtttcccaaggaccttatatttgtaatgctcagggattgatggggacgggaggtttgtgttggctctagaatctcccctgtgaggacgctggaaggggaagcctagggttgaggaggcagtgagaaagtctccaagtccacaccatgtaaagctacttctcccctgctttagggaagcgcctgtttcacgatctcattaaatccaaataaatgggcttgcccatagttaaaatgtgttgatttaaccaaaaaacaaaaataggctgggcacggtggctcatccctgtaatcccagcactttgggaggccaaggtggaaggatggcttgaggccaggagtttgagactagcctgggcaacatagcaagaccctgtctctacaaaaataaaagaaaatagccaggtatgatgctgcacacctgttgtcccagctactcgggagactgaagcaggatcacttgagtctaggaggtggaggctgctgtgagctatgatcgtgcctctgcattccagcctgggtgacagagaccctgtccctaaaaaaaacacaaatagaaagtggttgaaggcaattcactcgcagttggctgcagtctgtttctctctcgtacttggggctgaactagcctcaggagaaggaggctcccgagccccgtagtgtgatcattacaacaaataacgcagaggagaggtttgcttcccattctgcctccacgccctccagcctggctcatccacatacacatcgtctgccaccgtgttccctgttgtggactgttttgttaaatctgccttttcccttctttttttccagtccacctaaacccactgtgttcatctctggggtcatcgcccgggtaagtctgggagtgtctgcggtgggtttgaggcttttgcatggcagcatggagtctcctggttgcttctggttttgttaaactctacctggaataacccagcaccactgctcatctcctctgtggccatggctctcttcattgccgcgtttccccagaggctgcttctgcagaccgcaggccagactcgcatcctttacctttccagagccgccgtctggtgagacccaacattgtgacttaagcgcagacctcccaccagtgaactcccatcagcaaacccccgcagtgaaccccacagtattgccgtccatagggctgctgttctcagaacattcactttcttatcagaggatgcctgaagaaagtgccagtgttggggacagcccactgttggtggagctgtgaccgcagccagccaacctgccagccagagaagtgtggctccagcctgcccatgtggaccccaccctggccacacccacagttggcacagaagcccattgatccctctggaaaatagggagtccctcctgagactggacaggccgaacctggctctgtctcgtaggcgccctgtgcatttccttcccagccagcgtcccaggcctggctcacagctgtggtggcacatctgaacttaagatcctggatttggttctgtcctgcccccaatttaaatagtcacaaatacagatgtagcagaagaaaccccgcagcatccaagtcagttctgtgggagtcgcatgttcctgtgtctcacggcatggggcagagccagtgagcattcttgctgtcctgccagtgtgtgggcctcagtgccacctgccattccctggttttgattgcccaggccccctaacacccacaagggacagacttccaccttcctttatccattcacagtccacgcctgccctgcagggacgctggtgggtgctggcctgggcttcctcacatacaactgccatgcttcctgcagggacgctggtgggcgctggcctggagcttcctcacccacaaaccccatgcttcctgcagggaagctggtgggtgctggcctggggcttcctcacatacaactgccatgcttcctgcagggacgctggtatggggcttcctcacccacaaaccccatgcttcctccagcgacactggtgggcgctggcctggagcttcctcatatacaaccgccatgcttcctacagggaccctggtggacgctggcctggggcttcctcacatacaaaccccatgcttcctgcagggaggctggttgctgctggccttcggcttactcacatacaaaccccatgcttcctgcagggacgctggtgggcactggtctggggcttcctcacccacaaacaccatgcttcctgcagggacgctgatgggtgctggcctgggacttcctcacatacaaaccccacgcttcttgcagggacgctggtgggcgttggcctggggcttcctcacccacaaacaccatgcttcctacagggatgctggtggctgctggcctgtagtttccacacatacaaaccccatgcttcctacagcgacgctggtgggctctggcctggagcttcctcatatacaaccgccatgcttcctgcagggatgctggtgggcgctggtctggggcttcctcacccacaaacaccatgcttcctgtaggaacgctggtgggtgctggcctggagcttcctcttatacaaccgccatccttcctgcagggactctgttgggcgctgtcctggggcttcctcacatacaactgccatgcttcctgtagggacgctggtgggctctggcctggagcttcctcacatacataccccatgcttcctgcagggacgctggtgggcgctggcctggggcttcctcacccacaaacaccatgcttcctgcagggacactggtgggtgctggcctgggggttcctcacccacaaacaccatgcttcctgcagggacactggtgggtgctggcctgggggttcctcacccacaaacaccatgcttcctgcagggacgttgatgggcgctggcctggacgttcctcacatacaaccgccatgcttcctgcagggacgctggtgggcgctggcctggggcttcctcacatacaaaccccatgcttcctgcaggggcgctggtgggccctggcctggggcttcctcacatacaaaccccatgcttcctacagggacgctggtggatgctggcctgaggcttcctcacacacaattgctatccttccgcagggacgctggtgggcactggcctggggcttcctcacccacaaaccccatgcttcctattgattaacctgagctttccgtgtttcctgacagggtgacaaagatttccccccggcggctgcgcaggtggctcaccagaagccgcatgcctccatggacaagcatccttccccaagaacccagcacatccagcagccacgcaagtgagcctggagtccaccagcctgccccatggccccggctctgctgcacttggtatttccctgacagagagaaccagcagtttcgcccaaatcctactctgctgggaaatctaaggcaaaaccaagtgctctgtcctttgccttacatttccatatttaaaactagaaacagctccagcccaaaccttgtttatggggagtctggttggatgtcatttgaggatcattgtgcccctagaggtgccattagcagaatttgccaagatccgagaaaaattttagctttagttctatttcagcagtcacctgacgtccttgtctatggtcttaaaaacaagaaggcacacatttgagaagatgagattaaggttaggagaaaacctcagtcattgcatgctttttagtatgggccaataaaatctcaacacctgtgggagagtaagaactaagggaatgagtttgggcggcccctcataaaggaccttagaggcagggaacagcaatgccaaatttccctctctcgtgagatgggggatcctgtgcaggctgatgaggcacccatgagaaaagccgaaaaagcatgcatcttagaaatagcccctcaattccaggagtcaacatgccaaagaatgaggctggagacaggtagctccgagggaggacttctggcatgagatctcggcacggcaagcccagcatcgcctcagcccagacaggctccaccaggagatcaagcaagggctgcctttcaggagtcacctcctgagccacttcagagttctggaagtgaccacggaccagggtggaggaatagacttctagttcattctgggacacttgagccagagagttgaaagcttggaaagaccagataagaaacctgccctttgtctccctagggacatgagacaccacattccatttgtgctagaaaaacctatccactgatgagtctaactgttccaaacgcctcccacctggtgtgcacagctgcctgggtccattgtcacttgggtgcatcaggttgtcctccgatttttagatgagtttcctgtctagagatgtcctagtctgctcactggctggtggcagtagggtaccctgcgtcctcgaaaagccagagggttcacctagtcagacgaaactccagaacagtgcttgtggagggcctgactgtcctgctcacccacagccgatctgctgcaggtcagcaactgtgtcgtgagcagctgccaaccaccagcctttctggtgctgttctccagttcacgtctgccagctggtgagggcagaggcagacctggtcagacccagcgcccctcctccctgagggagcatggcacagcctcacacttgaaagacggtgtttggtttcccatctaatcaacttaagggaagccggcatgtacccttcaaggccctgtcaccacctatttcctgatcagttggtataaactgagggtggcttttagagacccagacttggttggcagcgctgccatggaacaccccagcaagcacctcccagcctgcctttcggagcagcacccaggaggggatgccgcgctccagcaacaccaggtcaggcctgtgcagacccctgccctgccgctgcagaaatccagaagcatccttaatgcttctcagtcttcagccagagggagggctgttatttccagaggtgcgctttttatgtacttttagctagatgtggcatgcatctgtgagctttagatcattaaatccaaaatgtttgcctaaatgagtttatcagttgttaacttcaagaatattaaatgatttataataaagctcctgcatttctctccagctttgttttttcttatagatcagagattcccttttacattttaccagggttgccaggtggtttcagtagaaatacaaacgtgtacatgataggtattttcaaaacttattttccagatagaaaagtagaactgttggacacctggtgactggagtctaattatctacttaaaatgtcagaacatggaaaaagcttaataccattgattaaaacatattacttgggcccagcagctggcctgtgccaggtaggccctttgggaacagatttaagagagaatgatgaatagtaagcccaggggtgacagtgagcagcttttgatgtacaagatgtttgccttaatcagaaggtctcctgtaacccttgtgagaaaataatcacaactattacactggcaatccagaatcaaatcagaatttgagtgggaggggcctgaggttttctcacccagggccatatttgtcagggagcaccagagagagcaccaggggccacattcagagccccggcttgggagtggctggagcccacgcctccaacaaccctggccttgcctggtgttgcctctgaagctgctgcttgtattcctgcctcctgtctcccatgctaagctgaggacaggaaccagggccatactcattttctgtcactgggcagagagtccattctcagtaaatacattgtggtggccagaaatgccaagcatccaacaagcatggaacagaaccacccccagggctctccacatcattcctgaacatcattatcctgtgtcagttttctattgctgccttaacaaagtcacaaattaagccacaaactgggtggcttaaaacaacaggaatgtattctctcacagttctggagaggtttgaaatcagtgtgttggccaggccacacgccctccacagactcagtgggagttcctggcctcacccagctcctggcggctgtggccatccttggcattccttggcttgtgggcagcatcactctggtctctgactccgctgtcatatggccatcccctgtctatgtgtctgtctccaaatctttcttgttttctgaggataccagtcattagatgaatgcccaccctatgccactatgacctcgccttcactaattacacctgcagagactctgtttccaattaaggttacattcagaggcactgagatttaggacttccacatatcttttggggaaacatcgttcacccaagaacatcacccatgtgctgaaaagccagaaacctcactcccagctcacaccatttgaagaacagttcacttagtgcatcacttttctgcaaaaactttgctgggagaaccttcacctgctgcaggtttcatgataaagcatctctagccgtgcagcagcccaagcctggctgcaggacgtacagagaaaagactggaagcagagacatgaagg

SEQ ID NO: 24973 - DNA, 106234 bp, Homo Sapiens
  misc_feature (9133)..(19132): n is a, c, g, or t
aacactgatacaactggcaacctaacacccccaattctgacatgacaaggtacctgtgttgcgaggattattttttcctagttactttgaagtagcacacaaacaccatccaaaatatgctacttgtagatgctgatgacagcagtaaagaatcttcagcatttgactttagggtaagacaagacttgttattatggttctatttgaaaaaatagttacaatgcctttccaaaagtttgttttctagcatgttgttttactgaataggaaaattcaaactgaaagagaaaacctacattttcttatatcatgagagcaaagtgaaaagccaaaagctaaatttaccaacataataaatttatattaaaaagaaaaagcagaactcaccgagccagtgtgtcaagtagtcagactcttatatttgacttaatgtatccataaagaatggtcagagttcagatcacttctttctgaatactcaatgtggaaggtacatgctgttgacataatgtggtgtaaaatttacatggtcaagggataatgtttgtttctcaattttgtgattagactaggtgaaaataaggagtcttctgaatatttctctagtcaaatcaaaaacttcagttttctttcttctttttaaaaaaggttttcccttctcctttccattgaagatggactccaaaggaagaattgataatagttctcagttcttttaatgatggtgtttacttgagactaagaattgcttaaaataaaactgtcctgaagaacacctatcatccgacggagggggaaaacgaggctagattatatttggaacagctgtgattttaaaatacacaaacgcttgtattacggagttagcatacagagaggaatttctcataaccccttccagcaaatgtttccggagtataatgctccttccgctctagagacccatagaacaggcatcaagggttaaggggacgaaaagttagttacactaagaccgctaaagcctccaatttatatgtgtaaatctttcgtctaaacacccatgatttatcatacattaaactattatgtcatacttagaacatgccaacactcaagatagttttcccacgttccacaggatggaggcctgaaatttacatctcagctggaaggcaaagctggtgcggtactcatcctattccaaccagaaaaccttttcccagcaggtttgccgcgctgcccacgactggcaaacaatgaccttacagaccgtgaagaggctgttggctctgccctcgccggtgcctccgaagacggcgacccgcagcggcccctcaggggagtcccccctgctagaccgacagcccgagcgctctgggccagagaaaactcagcaaaagccgccgctgctaccacctcagcgcctcccccaacccgccccttccttctcgcggccgcacgtcacgtcaggaccctggcaagacaacgaggatttgcgtagggggcgagcctctgaggccacttggctcttacggccacgcagggcgccgcagatgcagccggagcccgcttttccctctcaggacgacccctaggccgccagcagttccctaccgacgaaggcgactgtacagcgtccaccgcgttcgtgcccacttacccgccgccccactccgggccgccggctcgcagcaggaccagcccggctgctacggccgcggatacacgccctcaggcccggcgctgcgcagcttgcggaagctttcccggacagactcgctgccagcggattggctgcgagcagcgccaatctcacgttgcccccgggcgaggcgggactcagtgccgcgctctctgcacccgctctgccgcgcgcgtgcgtgctgggtgcgggtgcgggtgcggggttgggcctgcgcatcgggtgagacgctggctgcttgcggctagtggatggtaattgcctgcctcgcgctagcaggaaggtagtgtggtgtgactaacgggtatttattatatcctcgatggctcgagggccccgtcccctctactcgtcctggtccgggcgcgaacgctatagggcagctaagggcgctccccgcggggcgggaagcgaagccgggcttgcgggcgcgcacacgtggaacgcgttctctgagcaggtctgggctccggggtgttctggcttggtctttgttgcgtcccattccccagacccttctgggtggaggacttaaaatttgtttttcaggcagcagatttaacccatggcaactgtaactcatcttgtgtgagtggcggtttatagtattgtatcctgtggcatcatacaaggggtgcaagttaaactctttaaagttaatcacgatttttgctcgtggccttctgggtttatccgtacgccgaagacaggcacctgtattacatgctaaggaaatgtgaataccaaaaattgatcctgaggaaagtcttgattaggtttttttggaatcgcctttgaaatgtaatttccctcaccttggcagtgcagaaagtttgtgatttttattgccgaaatagctttcaacattttgaaattgacttaagagaatgttggctgtgtatgtctgtatcttgcatttctattggctttgtgaacctaattgttttggatttagtctgatctttaaataaatgatttctttgtgttctctctaatggaagtctgtgagttctctgatctttacttcttttttaggcacacctgttgtccttaactgactttccgggtcatcagcacttcttcagaagtgttccttttccctcccagcaaatatggaagactgactatcctgatattcccagacattctttgctgtgatttgtaagcccgatataaacccttccatttggtacacatatggtatagagtgctatattccaggggctatgctagcgatgtgtgattgatataaaacccctgtcctcaaagaactctgagtcaggagcaacagacagaaacacatattaatagagtaacttgtgatgaggttaattagaaatgaggtaaagggggactgcaggggaaggaatacctaatctgttggcaggtgaaggaaaggaggctgcagcagggaagaaaggctttcttgaagagttgatactgaactaaatctggaaggatgattagaagtcagctgagagagaaccatgtgagctgaggaaggagtgagtgtcaccatgttaagagagacaagttggctgggcacggtggctcacacctgtaatcccagcactttgggaggccaaggcgggcggatcacctgaggtcaggagttcgagaccagcctggccaacatggtgaaaccctgtctctactaaaaatacgaaaattagccgggcgtggtagtgcgctcctgtaatcccagctacttgcagggctgggacaggagaattgcttgaacctgggaggcagaggttgcagtgagccaaaatcgctgcactctggcctgggcaacaaagtgagaccctgtcacaaaaaataaaaaataaaaaaagacgagctgtgcagtatgatcgccctagagcacatttgggcaacgatgggatgactgggagagtaggcaaaaatccagttgttaagaagtttgtacttaacctggttggcaattggaaacctttataaaaattttaagtggggcagcaacatgatgaaatttaaatacagaaagaaccctataggtggttgagattcgagtcaaaatatcaattaggtggttattgcagtagttcaggagagaaaggccgaatggaggcagtacaaagaggagaggactagtttgggaaacatttagatagtaggagagagatgactgggtggcaggatgtagagagcgagtagaatttctagaatgacttcaaggtttctaattttgctttatgtgcttggatggaaggtgtttgagaggcatggcctttggagtcaaacatgccaaggtgtgcatctgccacttaatagttttgtgatcttgagcaagttaccatgcctttaaatcctatttggtgataaaggatgatagaatacgtagagttgttgtgaggattaaataggataatatatataaaattctcgtgttggctattacttttattatcaaacaagaaatataggaagaaagttgattagaggccagtcgtggtggctcacgcctgtaatcccagcactttgggaggccgaggcgggcggatcacctgaggtcaggagtttgagaccagcctggccaacatggtgaaaccttggctctactaaaaatacaaaaaattagccaggtgtggtggcgggcacctgtaatcccagctactcgggaggctgaggcaggagaatcgcttgaacccgggaggtggaggctgcagtgagcggagattgtgccattgcatttcagcctgggcaacaagagcgaaacctgaaactctgtctcaaaaaaaagaaagagaaagattctctgatcagtttgggacatgttatgtttaggttgccttcaggtcatctaaatgatgatatttagaaggtagatggaagtaaggccctaaagtccagaaaaaaagtgtgagatacaggtgagctggaggatggtgtggaagccaattgaaattatgtatataaagggaaggaggatactttttctaatgtttgcgttagcataagaaagatgctgataaattatatttagtggtccttcattaatattcatgaagtgaagggcttgccatgggtgaagcatttgactgttctgcctggcatccagagatacataatacataatttcctacattcaaaagttgtacagcaggaaaaaaaaagttttacagttcaggacaaagatgtagtaggtttaattatacaatttaattaatttaatctttacagttatcttacattgattataggacaaaacgatatttgatattttgaatatattagattatccaaatacgtaattaagattaacttcacttttttatttttttttttagcttttttaatgtgagtactagaaaattttaaatgatgtatgtacattatagttctgttgaacagtgctggatagagtactggttaaaatggcaggctctgaaatcacgctactttggttttatcctagctcttactaacagctatatgatactgaggaaattaaactttctaaaactcaatcagctaatctataaaatggagacaatacagatatcatatgcttatgaatttggtagagacacaaatattcagactgtagcaattaggagagaagaaagatgacatgacatggaagaagagtatgaaaagagatgcagacatcttaagaccagaggacgcaatgggatggggtagataaagtgtgacagaattcatgctatgaattgccatgatcttagtaaactagaagaatgaggaatattgggatgcaattatagagatttaaaaaaaaaagatcttggatttggcattgtaggagatgaggtattataggaaacgagacaaagatgatgagattaagactgctcagaaggagtcagtctaagtttataccccaaagttttgttgatcagggtttttcttagatccttgggatttcctagctgagggggaagacttcttgaacccaggcctaatgtgtgagcccctttggggtaggggttagaggtggggggattgttcatttaggggtttagaggagctcagtttagtcccagtaccctgggatgtttttagcacttatatgccaaacactgtaatacattatttatatatactactttatttacttctcaccacaatcatatgatatcattattagatccattttatagattaggtgattgcattttagagagtttaatttcctcagtgttacatatctgttagtgtaagagctaggataaaaccaaagtagtgtgatttcagagcctgccattttaaccactgctctatccagcactgttcaatggaactataagccacatctatcattttaaattttctagtagtcacattaaacagattttttaaaaggttagttttaataatatattttatgtaatctagtgtatccaaataggataaaatcatttcatcctataatcaatgtaaaaaattgatatgatttttattaatgctgagttggaaattgagtgtgtattagcacatctcaatttggactacccacgtttctagtgctctagtgttcagtaagctacatatgactgatggctaccatattggacagtgcagatctgtcccttagatcgaggtaattctgaagctttggaaaagtgcagaggtgccttttgcttgtgacagcactaatttgtgtgaatgttatgatgatggagtagcctatagtccactgtttccctgcttgattgggacaggaaagcctcccagctgttgagaacaacaaaaacaactattgaaaggtagttgttcacagctgctctcctgagaactgggtaccccaaaactaaatcaaatatatagattaattagagggtagttagtatttaaaaagaattctcagcattcctttacataatgatctcttattataatactctacattttataaggccttatcatttgtagaacaacactttatatattcttccttatttgattcttcacagtaaaccagtgaggtattagctccatctttacagatgatgaattgatttatggagggatttgagtgatttgctccatttttatagatgacaaattgatttatggagggatttcagtgatttgctgagtttatgtgtaataaaggtgaacccccaatacctattttataggctctggtctgttacatttttttcattgtgccaatcacctttgccttctatatagcaaaatatactgtatttatgaactgtgatcagttaacactctcagaacccaatatgtcggcctcttcccagaagtgcattccttaaactcctgtgtaattgttatagtgcctgtactccatttcctactcaattactgagtctttctttacatgtctttgtcttatgctgcctgagaaataatcctaaactgatgactttttgttgtgtttgttttcggtgttgctattttatttgcacctagattgcataggattaaatcatcataggagcatgtaactagtcatgggaaacaaagtaccttgagtccacccccagcccccattttttttggtccaataaaatcttgattctgcagaggaattgcatgttgtcaagcttgtgcttattttcctgtaatcttttctgaaattaggcaataagatgcaaaaagcacccccctccctgcatgctttacagatggaatttccataggacgtttttggatttttcgtttgtttgaacaaaggatttccagttaccaacagagattttggatctgcaggttggatctataaaggacctcaaatgccaacttagagatttgagctttatattattggctttgaggagccacatgattaaaataatgtcgtaggcagaataatatagaggatagttatctgacatgtctggtatgagaccagttcagattaacagtaatcctaactctaaaggagctcagtgattgaaaaagacattataattcatcagaatgtatggatgactaatgatgtttaaatgagactgttggtaaggcacataactgattgtgactaatgatgtttaaatgagactgttggtaaggcacataactgattgtcattatccacttcccaaagttatattatcacttggtcattctcagccaacattacactcattatagcacaattgttcttatcattattcagttattaccatagcatttgtttttaagaaatctttttagaacatgcatgtcttgattccagtatctgtgagctttcggtgatctactgtaatgagtttggaccaagatgtagttggcacagacatttaaggaaatatatttgaaataaaaatctcaaaagtacctgggcccagttacttactcagctttcagcctcttaaatgtccataataataagtataatgttttattcatagtacctactttctatggtttagcggtttaaatgcaatcctatatgtaaagtgtttagcatactatatatttaatgtagtagttgctgttcttattgtaatcatcattttaataaacggcagtatagactgggtgaccaaaggtgaagagtcattgaggctaattaggaaattatattgggaactaaatgtgagaaatactgagaaaagaattgataggatttaggagttgattagatttgagtcagggtgaatggataattcctgtaggaaagttgtgggtttagggtagggattggtaattatacccggagtttgagctagtgattatttcagcaggcagttggaaatacagagttcgagtttgcaagaaaagtcagaatataattagtcacacaaaatcctggaagaaattagaaaaaaagcaatttcttcctctaatgttattgtggactttttttttttaggtgcttgtggcagaatattgtggattttttgaacccatttttggttatttttattcataggcatttatatgtattcatatattaggtatcaatagaggaattgttgaaggacttgccttagctctgcctcttaataactggatgaccttggacaagttttctaatttctttatgccttagtagttttataaaattgaggtgataatggcacctattttcatagggtaataataagaaatagaagacttatggctgggcgtggtggctcacgcctgtaatctcagtactttgggaggccaaggcaggcggatcagttggggtcaggagtttgagaccagcctgaccaacttggcaaaaccccatttctactaaaaatgtaaaaattagccaggtgtcctggtgggcacctgtaatcccagctactctggaggctggggcaggggtggctgaacctgggaggcagaggttgcagtgagtcgagatcacgccactgcactccagcctgggtgacagcgagatttcatctccaaaaaaaaaaaaagaagaaatagaagacttaatattgtatgtgctaacagttgagcgtagcatacagtaagtctcagtgaagatgatcnnnnnnnnnnnnnnnnnnnnnnnnnnnnnnnnnnnnnnnnnnnnnnnnnnnnnnnnnnnnnnnnnnnnnnnnnnnnnnnnnnnnnnnnnnnnnnnnnnnnnnnnnnnnnnnnnnnnnnnnnnnnnnnnnnnnnnnnnnnnnnnnnnnnnnnnnnnnnnnnnnnnnnnnnnnnnnnnnnnnnnnnnnnnnnnnnnnnnnnnnnnnnnnnnnnnnnnnnnnnnnnnnnnnnnnnnnnnnnnnnnnnnnnnnnnnnnnnnnnnnnnnnnnnnnnnnnnnnnnnnnnnnnnnnnnnnnnnnnnnnnnnnnnnnnnnnnnnnnnnnnnnnnnnnnnnnnnnnnnnnnnnnnnnnnnnnnnnnnnnnnnnnnnnnnnnnnnnnnnnnnnnnnnnnnnnnnnnnnnnnnnnnnnnnnnnnnnnnnnnnnnnnnnnnnnnnnnnnnnnnnnnnnnnnnnnnnnnnnnnnnnnnnnnnnnnnnnnnnnnnnnnnnnnnnnnnnnnnnnnnnnnnnnnnnnnnnnnnnnnnnnnnnnnnnnnnnnnnnnnnnnnnnnnnnnnnnnnnnnnnnnnnnnnnnnnnnnnnnnnnnnnnnnnnnnnnnnnnnnnnnnnnnnnnnnnnnnnnnnnnnnnnnnnnnnnnnnnnnnnnnnnnnnnnnnnnnnnnnnnnnnnnnnnnnnnnnnnnnnnnnnnnnnnnnnnnnnnnnnnnnnnnnnnnnnnnnnnnnnnnnnnnnnnnnnnnnnnnnnnnnnnnnnnnnnnnnnnnnnnnnnnnnnnnnnnnnnnnnnnnnnnnnnnnnnnnnnnnnnnnnnnnnnnnnnnnnnnnnnnnnnnnnnnnnnnnnnnnnnnnnnnnnnnnnnnnnnnnnnnnnnnnnnnnnnnnnnnnnnnnnnnnnnnnnnnnnnnnnnnnnnnnnnnnnnnnnnnnnnnnnnnnnnnnnnnnnnnnnnnnnnnnnnnnnnnnnnnnnnnnnnnnnnnnnnnnnnnnnnnnnnnnnnnnnnnnnnnnnnnnnnnnnnnnnnnnnnnnnnnnnnnnnnnnnnnnnnnnnnnnnnnnnnnnnnnnnnnnnnnnnnnnnnnnnnnnnnnnnnnnnnnnnnnnnnnnnnnnnnnnnnnnnnnnnnnnnnnnnnnnnnnnnnnnnnnnnnnnnnnnnnnnnnnnnnnnnnnnnnnnnnnnnnnnnnnnnnnnnnnnnnnnnnnnnnnnnnnnnnnnnnnnnnnnnnnnnnnnnnnnnnnnnnnnnnnnnnnnnnnnnnnnnnnnnnnnnnnnnnnnnnnnnnnnnnnnnnnnnnnnnnnnnnnnnnnnnnnnnnnnnnnnnnnnnnnnnnnnnnnnnnnnnnnnnnnnnnnnnnnnnnnnnnnnnnnnnnnnnnnnnnnnnnnnnnnnnnnnnnnnnnnnnnnnnnnnnnnnnnnnnnnnnnnnnnnnnnnnnnnnnnnnnnnnnnnnnnnnnnnnnnnnnnnnnnnnnnnnnnnnnnnnnnnnnnnnnnnnnnnnnnnnnnnnnnnnnnnnnnnnnnnnnnnnnnnnnnnnnnnnnnnnnnnnnnnnnnnnnnnnnnnnnnnnnnnnnnnnnnnnnnnnnnnnnnnnnnnnnnnnnnnnnnnnnnnnnnnnnnnnnnnnnnnnnnnnnnnnnnnnnnnnnnnnnnnnnnnnnnnnnnnnnnnnnnnnnnnnnnnnnnnnnnnnnnnnnnnnnnnnnnnnnnnnnnnnnnnnnnnnnnnnnnnnnnnnnnnnnnnnnnnnnnnnnnnnnnnnnnnnnnnnnnnnnnnnnnnnnnnnnnnnnnnnnnnnnnnnnnnnnnnnnnnnnnnnnnnnnnnnnnnnnnnnnnnnnnnnnnnnnnnnnnnnnnnnnnnnnnnnnnnnnnnnnnnnnnnnnnnnnnnnnnnnnnnnnnnnnnnnnnnnnnnnnnnnnnnnnnnnnnnnnnnnnnnnnnnnnnnnnnnnnnnnnnnnnnnnnnnnnnnnnnnnnnnnnnnnnnnnnnnnnnnnnnnnnnnnnnnnnnnnnnnnnnnnnnnnnnnnnnnnnnnnnnnnnnnnnnnnnnnnnnnnnnnnnnnnnnnnnnnnnnnnnnnnnnnnnnnnnnnnnnnnnnnnnnnnnnnnnnnnnnnnnnnnnnnnnnnnnnnnnnnnnnnnnnnnnnnnnnnnnnnnnnnnnnnnnnnnnnnnnnnnnnnnnnnnnnnnnnnnnnnnnnnnnnnnnnnnnnnnnnnnnnnnnnnnnnnnnnnnnnnnnnnnnnnnnnnnnnnnnnnnnnnnnnnnnnnnnnnnnnnnnnnnnnnnnnnnnnnnnnnnnnnnnnnnnnnnnnnnnnnnnnnnnnnnnnnnnnnnnnnnnnnnnnnnnnnnnnnnnnnnnnnnnnnnnnnnnnnnnnnnnnnnnnnnnnnnnnnnnnnnnnnnnnnnnnnnnnnnnnnnnnnnnnnnnnnnnnnnnnnnnnnnnnnnnnnnnnnnnnnnnnnnnnnnnnnnnnnnnnnnnnnnnnnnnnnnnnnnnnnnnnnnnnnnnnnnnnnnnnnnnnnnnnnnnnnnnnnnnnnnnnnnnnnnnnnnnnnnnnnnnnnnnnnnnnnnnnnnnnnnnnnnnnnnnnnnnnnnnnnnnnnnnnnnnnnnnnnnnnnnnnnnnnnnnnnnnnnnnnnnnnnnnnnnnnnnnnnnnnnnnnnnnnnnnnnnnnnnnnnnnnnnnnnnnnnnnnnnnnnnnnnnnnnnnnnnnnnnnnnnnnnnnnnnnnnnnnnnnnnnnnnnnnnnnnnnnnnnnnnnnnnnnnnnnnnnnnnnnnnnnnnnnnnnnnnnnnnnnnnnnnnnnnnnnnnnnnnnnnnnnnnnnnnnnnnnnnnnnnnnnnnnnnnnnnnnnnnnnnnnnnnnnnnnnnnnnnnnnnnnnnnnnnnnnnnnnnnnnnnnnnnnnnnnnnnnnnnnnnnnnnnnnnnnnnnnnnnnnnnnnnnnnnnnnnnnnnnnnnnnnnnnnnnnnnnnnnnnnnnnnnnnnnnnnnnnnnnnnnnnnnnnnnnnnnnnnnnnnnnnnnnnnnnnnnnnnnnnnnnnnnnnnnnnnnnnnnnnnnnnnnnnnnnnnnnnnnnnnnnnnnnnnnnnnnnnnnnnnnnnnnnnnnnnnnnnnnnnnnnnnnnnnnnnnnnnnnnnnnnnnnnnnnnnnnnnnnnnnnnnnnnnnnnnnnnnnnnnnnnnnnnnnnnnnnnnnnnnnnnnnnnnnnnnnnnnnnnnnnnnnnnnnnnnnnnnnnnnnnnnnnnnnnnnnnnnnnnnnnnnnnnnnnnnnnnnnnnnnnnnnnnnnnnnnnnnnnnnnnnnnnnnnnnnnnnnnnnnnnnnnnnnnnnnnnnnnnnnnnnnnnnnnnnnnnnnnnnnnnnnnnnnnnnnnnnnnnnnnnnnnnnnnnnnnnnnnnnnnnnnnnnnnnnnnnnnnnnnnnnnnnnnnnnnnnnnnnnnnnnnnnnnnnnnnnnnnnnnnnnnnnnnnnnnnnnnnnnnnnnnnnnnnnnnnnnnnnnnnnnnnnnnnnnnnnnnnnnnnnnnnnnnnnnnnnnnnnnnnnnnnnnnnnnnnnnnnnnnnnnnnnnnnnnnnnnnnnnnnnnnnnnnnnnnnnnnnnnnnnnnnnnnnnnnnnnnnnnnnnnnnnnnnnnnnnnnnnnnnnnnnnnnnnnnnnnnnnnnnnnnnnnnnnnnnnnnnnnnnnnnnnnnnnnnnnnnnnnnnnnnnnnnnnnnnnnnnnnnnnnnnnnnnnnnnnnnnnnnnnnnnnnnnnnnnnnnnnnnnnnnnnnnnnnnnnnnnnnnnnnnnnnnnnnnnnnnnnnnnnnnnnnnnnnnnnnnnnnnnnnnnnnnnnnnnnnnnnnnnnnnnnnnnnnnnnnnnnnnnnnnnnnnnnnnnnnnnnnnnnnnnnnnnnnnnnnnnnnnnnnnnnnnnnnnnnnnnnnnnnnnnnnnnnnnnnnnnnnnnnnnnnnnnnnnnnnnnnnnnnnnnnnnnnnnnnnnnnnnnnnnnnnnnnnnnnnnnnnnnnnnnnnnnnnnnnnnnnnnnnnnnnnnnnnnnnnnnnnnnnnnnnnnnnnnnnnnnnnnnnnnnnnnnnnnnnnnnnnnnnnnnnnnnnnnnnnnnnnnnnnnnnnnnnnnnnnnnnnnnnnnnnnnnnnnnnnnnnnnnnnnnnnnnnnnnnnnnnnnnnnnnnnnnnnnnnnnnnnnnnnnnnnnnnnnnnnnnnnnnnnnnnnnnnnnnnnnnnnnnnnnnnnnnnnnnnnnnnnnnnnnnnnnnnnnnnnnnnnnnnnnnnnnnnnnnnnnnnnnnnnnnnnnnnnnnnnnnnnnnnnnnnnnnnnnnnnnnnnnnnnnnnnnnnnnnnnnnnnnnnnnnnnnnnnnnnnnnnnnnnnnnnnnnnnnnnnnnnnnnnnnnnnnnnnnnnnnnnnnnnnnnnnnnnnnnnnnnnnnnnnnnnnnnnnnnnnnnnnnnnnnnnnnnnnnnnnnnnnnnnnnnnnnnnnnnnnnnnnnnnnnnnnnnnnnnnnnnnnnnnnnnnnnnnnnnnnnnnnnnnnnnnnnnnnnnnnnnnnnnnnnnnnnnnnnnnnnnnnnnnnnnnnnnnnnnnnnnnnnnnnnnnnnnnnnnnnnnnnnnnnnnnnnnnnnnnnnnnnnnnnnnnnnnnnnnnnnnnnnnnnnnnnnnnnnnnnnnnnnnnnnnnnnnnnnnnnnnnnnnnnnnnnnnnnnnnnnnnnnnnnnnnnnnnnnnnnnnnnnnnnnnnnnnnnnnnnnnnnnnnnnnnnnnnnnnnnnnnnnnnnnnnnnnnnnnnnnnnnnnnnnnnnnnnnnnnnnnnnnnnnnnnnnnnnnnnnnnnnnnnnnnnnnnnnnnnnnnnnnnnnnnnnnnnnnnnnnnnnnnnnnnnnnnnnnnnnnnnnnnnnnnnnnnnnnnnnnnnnnnnnnnnnnnnnnnnnnnnnnnnnnnnnnnnnnnnnnnnnnnnnnnnnnnnnnnnnnnnnnnnnnnnnnnnnnnnnnnnnnnnnnnnnnnnnnnnnnnnnnnnnnnnnnnnnnnnnnnnnnnnnnnnnnnnnnnnnnnnnnnnnnnnnnnnnnnnnnnnnnnnnnnnnnnnnnnnnnnnnnnnnnnnnnnnnnnnnnnnnnnnnnnnnnnnnnnnnnnnnnnnnnnnnnnnnnnnnnnnnnnnnnnnnnnnnnnnnnnnnnnnnnnnnnnnnnnnnnnnnnnnnnnnnnnnnnnnnnnnnnnnnnnnnnnnnnnnnnnnnnnnnnnnnnnnnnnnnnnnnnnnnnnnnnnnnnnnnnnnnnnnnnnnnnnnnnnnnnnnnnnnnnnnnnnnnnnnnnnnnnnnnnnnnnnnnnnnnnnnnnnnnnnnnnnnnnnnnnnnnnnnnnnnnnnnnnnnnnnnnnnnnnnnnnnnnnnnnnnnnnnnnnnnnnnnnnnnnnnnnnnnnnnnnnnnnnnnnnnnnnnnnnnnnnnnnnnnnnnnnnnnnnnnnnnnnnnnnnnnnnnnnnnnnnnnnnnnnnnnnnnnnnnnnnnnnnnnnnnnnnnnnnnnnnnnnnnnnnnnnnnnnnnnnnnnnnnnnnnnnnnnnnnnnnnnnnnnnnnnnnnnnnnnnnnnnnnnnnnnnnnnnnnnnnnnnnnnnnnnnnnnnnnnnnnnnnnnnnnnnnnnnnnnnnnnnnnnnnnnnnnnnnnnnnnnnnnnnnnnnnnnnnnnnnnnnnnnnnnnnnnnnnnnnnnnnnnnnnnnnnnnnnnnnnnnnnnnnnnnnnnnnnnnnnnnnnnnnnnnnnnnnnnnnnnnnnnnnnnnnnnnnnnnnnnnnnnnnnnnnnnnnnnnnnnnnnnnnnnnnnnnnnnnnnnnnnnnnnnnnnnnnnnnnnnnnnnnnnnnnnnnnnnnnnnnnnnnnnnnnnnnnnnnnnnnnnnnnnnnnnnnnnnnnnnnnnnnnnnnnnnnnnnnnnnnnnnnnnnnnnnnnnnnnnnnnnnnnnnnnnnnnnnnnnnnnnnnnnnnnnnnnnnnnnnnnnnnnnnnnnnnnnnnnnnnnnnnnnnnnnnnnnnnnnnnnnnnnnnnnnnnnnnnnnnnnnnnnnnnnnnnnnnnnnnnnnnnnnnnnnnnnnnnnnnnnnnnnnnnnnnnnnnnnnnnnnnnnnnnnnnnnnnnnnnnnnnnnnnnnnnnnnnnnnnnnnnnnnnnnnnnnnnnnnnnnnnnnnnnnnnnnnnnnnnnnnnnnnnnnnnnnnnnnnnnnnnnnnnnnnnnnnnnnnnnnnnnnnnnnnnnnnnnnnnnnnnnnnnnnnnnnnnnnnnnnnnnnnnnnnnnnnnnnnnnnnnnnnnnnnnnnnnnnnnnnnnnnnnnnnnnnnnnnnnnnnnnnnnnnnnnnnnnnnnnnnnnnnnnnnnnnnnnnnnnnnnnnnnnnnnnnnnnnnnnnnnnnnnnnnnnnnnnnnnnnnnnnnnnnnnnnnnnnnnnnnnnnnnnnnnnnnnnnnnnnnnnnnnnnnnnnnnnnnnnnnnnnnnnnnnnnnnnnnnnnnnnnnnnnnnnnnnnnnnnnnnnnnnnnnnnnnnnnnnnnnnnnnnnnnnnnnnnnnnnnnnnnnnnnnnnnnnnnnnnnnnnnnnnnnnnnnnnnnnnnnnnnnnnnnnnnnnnnnnnnnnnnnnnnnnnnnnnnnnnnnnnnnnnnnnnnnnnnnnnnnnnnnnnnnnnnnnnnnnnnnnnnnnnnnnnnnnnnnnnnnnnnnnnnnnnnnnnnnnnnnnnnnnnnnnnnnnnnnnnnnnnnnnnnnnnnnnnnnnnnnnnnnnnnnnnnnnnnnnnnnnnnnnnnnnnnnnnnnnnnnnnnnnnnnnnnnnnnnnnnnnnnnnnnnnnnnnnnnnnnnnnnnnnnnnnnnnnnnnnnnnnnnnnnnnnnnnnnnnnnnnnnnnnnnnnnnnnnnnnnnnnnnnnnnnnnnnnnnnnnnnnnnnnnnnnnnnnnnnnnnnnnnnnnnnnnnnnnnnnnnnnnnnnnnnnnnnnnnnnnnnnnnnnnnnnnnnnnnnnnnnnnnnnnnnnnnnnnnnnnnnnnnnnnnnnnnnnnnnnnnnnnnnnnnnnnnnnnnnnnnnnnnnnnnnnnnnnnnnnnnnnnnnnnnnnnnnnnnnnnnnnnnnnnnnnnnnnnnnnnnnnnnnnnnnnnnnnnnnnnnnnnnnnnnnnnnnnnnnnnnnnnnnnnnnnnnnnnnnnnnnnnnnnnnnnnnnnnnnnnnnnnnnnnnnnnnnnnnnnnnnnnnnnnnnnnnnnnnnnnnnnnnnnnnnnnnnnnnnnnnnnnnnnnnnnnnnnnnnnnnnnnnnnnnnnnnnnnnnnnnnnnnnnnnnnnnnnnnnnnnnnnnnnnnnnnnnnnnnnnnnnnnnnnnnnnnnnnnnnnnnnnnnnnnnnnnnnnnnnnnnnnnnnnnnnnnnnnnnnnnnnnnnnnnnnnnnnnnnnnnnnnnnnnnnnnnnnnnnnnnnnnnnnnnnnnnnnnnnnnnnnnnnnnnnnnnnnnnnnnnnnnnnnnnnnnnnnnnnnnnnnnnnnnnnnnnnnnnnnnnnnnnnnnnnnnnnnnnnnnnnnnnnnnnnnnnnnnnnnnnnnnnnnnnnnnnnnnnnnnnnnnnnnnnnnnnnnnnnnnnnnnnnnnnnnnnnnnnnnnnnnnnnnnnnnnnnnnnnnnnnnnnnnnnnnnnnnnnnnnnnnnnnnnnnnnnnnnnnnnnnnnnnnnnnnnnnnnnnnnnnnnnnnnnnnnnnnnnnnnnnnnnnnnnnnnnnnnnnnnnnnnnnnnnnnnnnnnnnnnnnnnnnnnnnnnnnnnnnnnnnnnnnnnnnnnnnnnnnnnnnnnnnnnnnnnnnnnnnnnnnnnnnnnnnnnnnnnnnnnnnnnnnnnnnnnnnnnnnnnnnnnnnnnnnnnnnnnnnnnnnnnnnnnnnnnnnnnnnnnnnnnnnnnnnnnnnnnnnnnnnnnnnnnnnnnnnnnnnnnnnnnnnnnnnnnnnnnnnnnnnnnnnnnnnnnnnnnnnnnnnnnnnnnnnnnnnnnnnnnnnnnnnnnnnnnnnnnnnnnnnnnnnnnnnnnnnnnnnnnnnnnnnnnnnnnnnnnnnnnnnnnnnnnnnnnnnnnnnnnnnnnnnnnnnnnnnnnnnnnnnnnnnnnnnnnnnnnnnnnnnnnnnnnnnnnnnnnnnnnnnnnnnnnnnnnnnnnnnnnnnnnnnnnnnnnnnnnnnnnnnnnnnnnnnnnnnnnnnnnnnnnnnnnnnnnnnnnnnnnnnnnnnnnnnnnnnnnnnnnnnnnnnnnnnnnnnnnnnnnnnnnnnnnnnnnnnnnnnnnnnnnnnnnnnnnnnnnnnnnnnnnnnnnnnnnnnnnnnnnnnnnnnnnnnnnnnnnnnnnnnnnnnnnnnnnnnnnnnnnnnnnnnnnnnnnnnnnnnnnnnnnnnnnnnnnnnnnnnnnnnnnnnnnnnnnnnnnnnnnnnnnnnnnnnnnnnnnnnnnnnnnnnnnnnnnnnnnnnnnnnnnnnnnnnnnnnnnnnnnnnnnnnnnnnnnnnnnnnnnnnnnnnnnnnnnnnnnnnnnnnnnnnnnnnnnnnnnnnnnnnnnnnnnnnnnnnnnnnnnnnnnnnnnnnnnnnnnnnnnnnnnnnnnnnnnnnnnnnnnnnnnnnnnnnnnnnnnnnnnnnnnnnnnnnnnnnnnnnnnnnnnnnnnnnnnnnnnnnnnnnnnnnnnnnnnnnnnnnnnnnnnnnnnnnnnnnnnnnnnnnnnnnnnnnnnnnnnnnnnnnnnnnnnnnnnnnnnnnnnnnnnnnnnnnnnnnnnnnnnnnnnnnnnnnnnnnnnnnnnnnnnnnnnnnnnnnnnnnnnnnnnnnnnnnnnnnnnnnnnnnnnnnnnnnnnnnnnnnnnnnnnnnnnnnnnnnnnnnnnnnnnnnnnnnnnnnnnnnnnnnnnnnnnnnnnnnnnnnnnnnnnnnnnnnnnnnnnnnnnnnnnnnnnnnnnnnnnnnnnnnnnnnnnnnnnnnnnnnnnnnnnnnnnnnnnnnnnnnnnnnnnnnnnnnnnnnnnnnnnnnnnnnnnnnnnnnnnnnnnnnnnnnnnnnnnnnnnnnnnnnnnnnnnnnnnnnnnnnnnnnnnnnnnnnnnnnnnnnnnnnnnnnnnnnnnnnnnnnnnnnnnnnnnnnnnnnnnnnnnnnnnnnnnnnnnnnnnnnnnnnnnnnnnnnnnnnnnnnnnnnnnnnnnnnnnnnnnnnnnnnnnnnnnnnnnnnnnnnnnnnnnnnnnnnnnnnnnnnnnnnnnnnnnnnnnnnnnnnnnnnnnnnnnnnnnnnnnnnnnnnnnnnnnnnnnnnnnnnnnnnnnnnnnnnnnnnnnnnnnnnnnnnnnnnnnnnnnnnnnnnnnnnnnnnnnnnnnnnnnnnnnnnnnnnnnnnnnnnnnnnnnnnnnnnnnnnnnnnnnnnnnnnnnnnnnnnnnnnnnnnnnnnnnnnnnnnnnnnnnnnnnnnnnnnnnnnnnnnnnnnnnnnnnnnnnnnnnnnnnnnnnnnnnnnnnnnnnnnnnnnnnnnnnnnnnnnnnnnnnnnnnnnnnnnnnnnnnnnnnnnnnnnnnnnnnnnnnnnnnnnnnnnnnnnnnnnnnnnnnnnnnnnnnnnnnnnnnnnnnnnnnnnnnnnnnnnnnnnnnnnnnnnnnnnnnnnnnnnnnnnnnnnnnnnnnnnnnnnnnnnnnnnnnnnnnnnnnnnnnnnnnnnnnnnnnnnnnnnnnnnnnnnnnnnnnnnnnnnnnnnnnnnnnnnnnnnnnnnnnnnnnnnnnnnnnnnnnnnnnnnnnnnnnnnnnnnnnnnnnnnnnnnnnnnnnnnnnnnnnnnnnnnnnnnnnnnnnnnnnnnnnnnnnnnnnnnnnnnnnnnnnnnnnnnnnnnnnnnnnnnnnnnnnnnnnnnnnnnnnnnnnnnnnnnnnnnnnnnnnnnnnnnnnnnnnnnnnnnnnnnnnnnnnnnnnnnnnnnnnnnnnnnnnnnnnnnnnnnnnnnnnnnnnnnnnnnnnnnnnnnnnnnnnnnnnnnnnnnnnnnnnnnnnnnnnnnnnnnnnnnnnnnnnnnnnnnnnnnnnnnnnnnnnnnnnnnnnnnnnnnnnnnnnnnnnnnnnnnnnnnnngatctattttcatctgtcattattattgccatttgtcctgttggtcaggaatgcttaacaattcttacaagttgcatttttatcttctagctgctctgttaaaagcgaaaatgaaacaattgcctgcggcaacagttcgactcctttcaagttctcagatcatcacttcggtggtcagtgttgtaaaagagcttattgaaaactccttggatgctggtgccacaagcgtagatgttaaactggtgagtgtccttgagaacccaaatacctttaagacaaagaaaagggtctggacacatgttttctccttaaactgttacctttattttatttctttacaccaataaattattcttaggacattggaccctttgtcttaagagtaaatccttaaaaataaattttaatttaaattaacattatagtaacactaaaggaaatataaaagaaaacatgttctttaggtctccatcacctaagacatctaatgtttgtattttctacaaatattggttattcatatttccttgttttagggatttacttttgcattttattttttccatctaatctaatttcaaaccatttcccttgttacttttttcacattttaaaatttaagtgctgtatattaaatcatttgagtaaatatggcctatatcactcattatgatttattgcaattagtttccatgactagttcccctgttctaaattgctaacacatagagatatggtctattttattcattttttgtgtcctctgtacctggctagtacctagtatgcactaggaaggtaaataaatctgattgaatgtaagaatacattttttaaaatctcttaattatcagatatttatgctatttctagtgttatagaactagaaacaatgctgatagaaatatatttgtaggaaagggacctaactttttcttatctaccagataagattctatgagataaacatgtatatatatatggacacaaatatatatatatatatatatatatatatatatgtaaaataaaatcccttctataaatcacttctcataaaacactgtgacttaactactactatacccattttattttttatttatttatttatttattttttatttttttgaggcagagtctcgctttttcgcccaggctggagtgcaatggcgcgatctcagcttactgcactctccctccccggttcatgcaattctcctgccccagcctcctgaatagctgggattacaggcacctgttaccacgcctggcaaatttttgtatttttagtagagatggggtttcgccatgtcggccagtctggtcttgaactcctgacctcaggtgatccgcccacctcggcctcccaaagtgttgggattacaggcgtgagccactcatgcccagccatactatacccattttacagataatgttctgagaagtttcccaaagtctcataattagtaagtagtggagctaagactagaatccaggtctttctgactcttaaaacccattcttgatcttctctctgtgccagtggttctcatgatgtttgggtgcatcagaataacttaggatgtttgttaaaactgttactgggtcttactcatacaacttcatagtctagatggggcctgagaatttgcatttctagtaaatttctaattgatgctgatgctggtgggttatggaacacactttgagaaccattcttctatatcaaacctctgttctgttttgaatacactataagctttataaacgagaaaacaagtatattaaattatacccaaagaaagacaatttgtttttcttaggcatttcatatagtcagttcagtctgattagagtataattgataataattaaacaggattagatagttatatctgacagacttcacttaagaatctttggcaggcagacatctttttcttaaacatttctggaagaaaaactggtttttaaaacagtgttacaaagccaacagaagtcctgtataaactaagttaaatattttaatctggctgtaaattttagtctcttgacatttaccagtatttgctttgtagaattttaagatatacaccttaaatgtgtggctctacatgataagacctgtttcattatggttttatgctataatagctatcctgactagatatgttttcataattaattaaacgtgatggtactattttgaacatttaaacaaatctttgtgttcttattacgggatttcgagaccatgttgcccaggctggtctcgaactgctgacctcaagtgatccacccatctcagcctcgtaaattgctgggagtacaggcgtgagccaccatacttggcctgatttttctttaaaatatagaagaccgacagttcccagaatgtaaacttaactttattcatttatttatttattttgagacagtctcattctgttgcccattctgaagtgcagtggtgcgatctcagctcactgtaacctccgtctcccggtctcaagcgattctcctgcctcagcctcccaagtagctgggattacaggtgtgtgccaccatgcccggctaattttttgtatttttagtagtgaccgaggtttcaccatgttgaccaggctggtctcaaactcctgacctctaatgatctgcctgccttggcctcccaaagtgctgcaattacttgcatgagccactgtgcccagccaaactgaattttagattgagagaggtgtgaggaacaaaatcttaggcatctctctccaatgttttgtatatctaatttatctaaaaattgccgacatatacagtattatatcattttaggttattaaaaagatgtgattttattttaaataccagagtcagtataattatagaaagattttatttccccctttgtaacttgcatctgtggtcatacacataagactttgtggagtaaagtcagacttatttattatggaagttggctgccaaatttagaatatggtgttcatagaaagtatgatcactatgggaatttaaattttgtttttgttatatatgtatatttttagtataagaatataaaactaagctatgaattgagattttgaaaagattttcatctgatatgatggctcacacctgtaattccagcactttgggaagctgaggcaggaggatcgcttggagccaggagtttgataccagcctggacaacaaagtgagaccccacctgtacaaaaaataaaaataaaaatagttaggcactgtggcatgcagctatagtcccagcacctcaagaggctgaggtgggaggatcacaagcccaggcattcaaggctacagtgagctgtgatcatgccactgtactgtatgtagcctgagtgacaaagtatctaaaaaaagtcttgattttttttcaaattaaaaacttactgtggttgctaaattagatgtgttttctcagcagtttcctgttagatggctgtttgcagaaaaagatttagaaagttataatgtagtaaacatagatttttatgtaagggagaaagtattaaatattaggttgattcctgccatagaaaagcaaaataagaaaacaaaaaacaaaataaataaataaaaatcaggttgaataatgatacttgctaggttctgcctgactagaacatgtgttactttgtcgctgatggagttctgttctgttctgttttgttttggggccatgcataccaaaggtgtatgtaattcagaagaatttttttagtcaaatttaaacataaattattgtttattgtaaatacccatgataatgaaacagtgaaaagcaaccttaaagatcagcctaacctccttattcaacagttgaatctgtgtccagagaaaacaagggagttgcctgttgcaccataactagaaattagtagagctgaagaatttaaactcttatatccataatgctatgcttccataaaagtaaataaatgtcaaaattctttcacttgtgtttctttctaagtgtgataacagtttaatatttttacatattaaaagtgttttttgacattttataggagaactatggatttgataaaattgaggtgcgagataacggggagggtatcaaggctgttgatgcacctgtaatggcaatgaagtactacacctcaaaaataaatagtcatgaagatcttgaaaatttgacaacttacggttttcgtggagaagccttggggtcaatttgttgtatagctgaggtaaggtaattatattggttattttagtgatttcatattcactgaacattacagttaaaactaacccagtatttggtgaagtatggttttaattatttttattatggtaaaatatacataacataagccgggcgaggtggctcacgcctgtaatcccagcactttgggaggctgaggcaggtggatcacctgaggtcaggagttcgagactagcctggccaacatggtgaaaccccgtctctactaaaaatacaaaattagctgggtatggtgcctcacgtctgtagtcccagctacttgagaggctgaggcaggagaattgcttgaacccgggaaacagaggctgcagtgacccgagatcatgccactgcactcccacctaggcaagatagagtgagattctgtctcaaaaaaatatatatatacataacataaaatgtatcattttaattatttttaaatgtacaattcagtggcagtggcattagctacagtcacattgtcgtgtatctataaccattattcatctccgcaaccttttcattatttcaaactctgtacccattaaacaataatgccttttccccccatcccctagtactcactgttctactttctgtctctatgaattagactattctaggtatcacatataagtggactcataaaatatttgttcttttgtatctggcctatttctcttataatgtcttcagggttcatccatgttgtaacatgcatcagaatttccttcctttttaaggctgaataatattccatcatgtgtatataccacattttgtttatctgttcattttcatcggtggacacctgggttactttcacccacctttgggctattgtgaataatgtttctgtgaacattggtgtacaaatacctgtttgagtccctgcttttacttctttgggggtatatatccagaagtagacttgctatgtcatatcataattctgtgtctaattttttgaggagcagcaaagtgtgttttgcatttaaaaattgtattaagaaaattaagcagatatttaactatagcacttctcagagcctttactatattcaagcacattgtaaatctctaaggttggtggtttatatacgcactttttcctatacctacttgaccatgaaattcttttattgagaaagcatatcatttttgtttgtttgtttgcttgttctgtggactacactttagaaataccactctaaccggtacagttagtgagattacgctctagagatgtgaattgacttggtctaaaccttaactagttaagggcagattggatttaagaactttactcttctgactgtgagttaggtgctcagtgtctatgaactcctgagttcagtgcttggcacattcacttgcatagtaccaattatactacgctgcctctgccccagatcttataactagtttgtagcaaagcccgtctagaaccttgatctcttcatttctgttatctcagttgtgtttgatcacgtgactctgtactactttttttgtactatactattaccctgtggatgttgggctcttattgtgtgacagtatctatgtgccaggtgacagggtgattgtgagggtctcttgagttattgaaatttgcccagtagccatgtaatccttcatttgtgcttaggctggcagaccctatttaggcaagaatgttccagtacagtaaaatgataggacttcatacttgttgttctggaaaagtggcacagaaatgagatactgttgctgtctccccttctggtctttggacatctgtttagtagtccagtcttgccaagaataatgatatattctctaggttcattgtggtcttccctcagcccttctgtttttgaagtgctggcataggatagtgtaggttttctccattttttgtggctaggattccagctcagtacagatactccttgacttatgaggggattacattcctgattaaacctttgtaagttgaaaatattgtaaatcgaaaatgcatttaatatgcttaacttgctgagcattacagcttagcctaacctactttaaacatgctcagaacacttacattggtctacagttgggcaaaattatctggcaacatagtacactggagaggatctgttgtttatcctcatcgtcacatggctgactgggagctgtgggtcactgcctcagcattgctagcttatccactgctttctactgaatgcatatcacttccgcgccactgtaaagtcgaaaaatcctaagtagcaccgttgttaaattggtgaccctctgggttcagttttttacttttgggcttttctggctgtgtaacatgtcttaagtaggccagagaaattgcaaaggagatgaagtttaagtgggagattttgctgttggagcatagaggactagggggccttgcttattagaatccagatgtttagagatcattaaagggaaattgtcatgtgtactcttaaaaccgctgtccaaaatctagcacactgtgtacttctctattttcctcagcactcgctttatttggagttcacagagccttcaaatagattttggggaagagggactagagggttcaattgggcattgtccgtttttctcctcaagactataaatgggaatccacaaccctggatcttgtacaaagagtttgtctttaaaattgcacgaggtttgcatcagggaacctctgaatctgccagtactatttagctgtcagtgactactctagaagtcatttttttttttctgttttagagcataagtatttgatttttttttttttttttttttagctgttgttcaaacttgacagataggctttaagctttatttggtagattatcaaaaagataatttggcatttctgtattttctgcaagatatatatgtaacccttcagagctgaaattagtcataattagctttgcctactaggtggcagcactatacttggtttttagaaataggtttcacatgagctgtatgatttattcaaatcttcactgtagttctgagtttagatggcagttttgtaagtctttctccattggtcactttctatcttgtttccttatttgattacttaaacccacttgataggcaagtttatcattttgtctttgttttattttgaggcactcaagtggccttgagtataaataaaataattttgctcatcagaattacaaaagaattgtcaaagtatcacaatagtggaaaactataaagtttttaaaaaaatgtttgcaatgccaagcatttatcttagaaaatattaacagtattttatggagtttcctttcttacaagtctttgggaaaaccacatatagatgtgtgtgtgtatgcatgcacacacacacctacactaacaacacaatgaatttttacatatgtatactcctgatcaagatttagaccattatcagaaccccagaaggttccctcatacccactcccagtcagtacttctcaaaggtaactgctattcagacctctgtcaacacagattagttctttatgttcttgaacttgatataaatgaaatcatatggtatgtattattttggcacagagtttttgatgatgatttaggtttgattgtacctgaaaactaaaggaaatacagagctagctggaaggaacttttatagtagtaggggaccctagtacaccatctagatcccccacttcaggactgagcagtcagcccccagctgccaagagtgttggtgactcacccctgagtctccatctggagcttgcccttaccgcagctgaagacagctgccttacccaagtcatgcagggcaacctgcatccaatgaatccagtgactggttgaggtgttataaacgtcccagttcaggacaacattgccctatgcccactggtgatcatcccaaagaaccccccaataaactgactgctcactaatctccatctcagaatgagcttcatggattagccagcctacaatgtaggtcttctgtgcttcagtttcttcatagtactgatgaggaaactgaggtcttttgaagccaaatgccaagtcttcttacccaacttcaaaacactgtctctaataactcaagtaatgttcattgtctacgcatgcagggtgctgcactaggtagttgatttcagaggaattgtacacagtgaaatatgaaatttgtaacctattcaggtatacatagtgtgttcaaggcaaagcccagaattcagtcctaatttcatgcctttcagtaatgtattttccgtggtaggttatattacctctttactagcatgattagaaatgtatttataaagtttaaaaatacttccatattaaatattaaattatttacaaatatacccaggcctgcagtgctaagttcaatagataagttgttaggagtaggtgagttgaaacttatatgtgaggactgtgaatagtatttgagaaaaacaggaagtaatgtatgtttgttgaagtcagttacatttaaaaataaatatttttaaataagacttaatgggtgcattttgggggaaaggagttcactttttaatcttaaggaatattccttagcactcagaaagaattgaggtttcatatatagaaaaaatatattttcaagactagcttattttgaaactttttagatgaaaattacagtgaatgcaataaaaattagtaatttggttattttatctaccaaactaactgatgcatataattttaaagtcatagagttgtaaaccatcctaggctcagtggatcgatatgtaattgggcacactattaaacagccatcacctataactctagttgttgacattattttctgtttatttaaaaaatgttattaagaagaaaaattaagttagactttcagcaaaattggctggagaaatctaaaatacatctaattctttgttctttatttatatacttgaatggtcagttttcctaatttgtcaattataaaataacttccaaccttaaacagtccaaagaagtaaagcattatttttgttttgttttgttttataatttttataattttttgtagagatagggtctcactctcttgttcaggctgggctcaaaatcctggcctcaagcaatcttcctgcttcagccacccgaattgctggcaggcaggagccactgtgccctgcaggcattctttttatatctgcagagtaaactattggtattttaaaatggaattattgctttcatgatctgtgatgagtatatcagcaactgacacaaatttactcgtaatggttttctttaaaatcataacagcaagcataacttcttgaaatttattgtttgtagagcaataattttgagaaatttgtcatcttcaatgtttaattactagtactaattactaagcacagtgactgggttgaaatagagagagtgaaaatcctgtcttgaccgtctcataaaaatttttataaagattgtgtatattattcctatcacataataaaaaacacaaaatatttttctttttaggttgatattttatatgtgttatcaaagaaatgtttaagaaactaacaacatttttgaactggattttacatggaggctggttttagaaatacagaacagtttattttattttattttttttcttaaagaacaaattctgaagtaggagtcagaagcctaattctaaatcctgagtgtttgaataagagacctggccaaaggccaaagtcagattaagttttctgagaattttttttttttcatttatcaagtgagggtcaaatacaataatacatcttacagtgtcttgaatattgtgtacatacagatgcaagttatttctactttggacttgtatgtgaaaagtagtatgcatctggataagatcattagacttgcttattcccctctgcaaatagtatttcacctccgcattctatgtatgctattccacattttggggaaatcctttctaaaatgtaatagccattcataggtaaattccttctaattctcaccaaatgtcttcatcccgtagtgttagttcatttttttctctcgtttttccctcagaagaataaatgtcatcctctgcataacatttacatttattgattcattcatccaccatttaaatggttacagtgtactgaatattattctcaccttatcaagctcattatgcagttgacccttgaacatcacccagttgaccccaccacttcgctatgcagtcaaaaattcacatgtaacttttgactcctttaaaacttaactactgttgaccggcctcctgttgaccggaagataacatattttgtatgttgcatgtattatatactgtattcttataataaactagtgaaaagaatgttattaagaaaattataagagaaaataaatatgtttgctattcattaagtggaagctgttcattaagtgttcatgttgagtaggctaaggaaagggtagaagagaagagattggtcttgctgtctctggtggcagaaaatctgtgtgttaagtggacctgcacagttcagacttgtgttgtggaagggtcaactgtacataattttgtgatgagataatataggatctgtaggtttgtttttgtatcacctcacattaagcctccagggcttagaggagcagaatgagaagctgagtcattttgttttgaagatggaagttgggactcacttatttgtgggcccacatactataaaagggtcaggggaagcccctaatgtcattatgatggttctaaaccaaggacttctgactccttttccacagtgtagggttgtctcgtatattttttatagctgtgatggaggagctttagtcaaaatacgtctgggaagttttgaagcagttggaatattttacttcctaaatgcagcttcatcacaggtgatggaactctattgaaaggagaaaagccagggccaagatctccctgttgctaggctccccatagtgggtatctgggaacaagtcctgcagtcagagtactttaattagtgcacaatacttgcacaggcaggcaggcatactcacatgcagaaaagaaaacatttcagccattcaggcaaaagtctgtatttcacctgaatcgtaaagactgtgcgttttcaactcgtttttgtgtcagttttcatctaaaacttagcccccccaaaaactcaaaaggctttatcataattaccttaaatgaatttttgtcaagaggatttttacctgaattatcaggatatattctaagttttttctttactttttatctaaacattgaagaaaaactatgtttatctgaagtttaaatgcttttatgtaattttaattttgtaatgatactgcgatttcttgaaactcagtaaactggaccagagagtcagtttttaataactgataactaatatagcctccaaggtcctctaaggacttgtaaaacttttccttttaaaatactggttttctttatttcttctcttgacaccactaggttcactctctgccaccattcctcaatgtctctagtaagaatcaccagtaatagtgtgtactgttagagatgctcctgatggtggagttactgcaggctcaaatgctagctcctgcacagctaatgaattctgaacctgtgcccggtccaaaaaaaaagtttcctgctccagacacagggtcatatgatgaaacaaactctcgaaatacaattccctttccttcctctgtggaacacactgtatttcataaatttatgaagtacacttatgtgtttgctttatgctttactgtctttagccatgaattgcaaagcatttcatatctaaatacgttttcgtagtattctacaaattgtaattttacaaaattttaatgttggaaaatagagggtttttttttactttaacataaatgttacattatgagcactaaggtcttattttgctttttagcacttcagtttcttcgtctagactggagtatatatgtttaaaggatgagcaaattaatatcttgtaagataaagtggttaaaacaaaatcccatgtaaccttataaagtattagcatcatcttcatcttatcatcacccttcccttaaagatgatctgtgtaatcatttattcaggaccatctagaagccactggcagggttagtcctggaactcagagttccagggccgcctttgctcagtgacaccaactttaggtcaggtggctagttctttggagtagagaaatagaattcagttgaccttagcattttggaaaatcagttggttaaatgtagaattgtcttcaaagggataattatggaataatgagccacagaaaagaaaatctctagcactttctgtcctctaaattacaccatttttgaaccatggaatgtattttggaagaggtagatcccttaagagtactcagaaactcccaactttgttttaggttctgcttttttgggggatagtatcacagtaatagcttgacatagcgcccctagtaagagtttcatagacttcattttcagagagaatctaacgtcctctgctggtactgtgagctggagaagccgtttctttttgttgctctgatattccctgcatgctaccaacatgttccacagagctgtaggccctacagtaaatctgcttggttagggcagggtgacagaaccttcaaatatagacccacttggattcagatgagttccaacagtggggttggattcttatggtgtctaaattatatagatttactttagaatattcagctcttcgtataaagatggccaagaaagattactcccaattttgggtcatcattggctcaccagacatgtgaggaggctaccttcttcccaatgctttccttgccagcatccccactccccactttttttttgttttttttctgacaatggcatattttactattgtactttcatacctacctcatggggtaagtaaatagaaagctgaggatgaagctagctcaaaagagggcagacacttcaaaatttgtgtttctatgactaacatctgaggaaatattttcatgctgaatgaaatgtcttcttcacttatgcttacatgttttaaatttttttaattaataaaaaatttagccttaatgagtttaaagctcagttttaagaaaaaaatctgtaaatatatatataatttaattttttttggaccataatcttgaaatacagaagtgcagttttacacataataaagaagggggagggaatgatcactttaccaaagaactattcatttaccaacaaatttatggaaatagtctgttaaaaagcaagttcccttaatacagttgaagtacttggcttttacagacataagtcatataatgcatataatacaaatggcatttcaggtatacttgtttgtgtacgagtgttttaataaagtgaaatactcaaaacagtaatttgcaacataaaaaaaatacaagctggcctgttgcttatttgtgtaactctaaggaatattacaaaagaactggtcacaaatgtttattaggtaaaatacgctattgagtaaatatattatgcaataatcatttcaaatctttgataatgaacccatcgcaatatctaaagtgttagttttattagatgtttttttcccccaggttttaattacaacaagaacggctgctgataattttagcacccagtatgttttagatggcagtggccacatactttctcagaaaccttcacatcttggtcaaggtaagaaagtagctttgtatacaaacattctttaccttttctgtcttaattgttggtttaaaaaaaaaaagttactcggtgaatacaaatatattgctttgggcttggtcctgataaaggctagttaacttccaagtaaacattcagcctttattctagccaccaatttcttaaatatttagaattgttctcaaaaggaactgtatgagagactggacacttccatggactagttactcctctgtaaaaactaagagtatttattttaccagtgctggattaccagtgtcatcttcatatatgaagaagattaaaattttattgaaacatataaaacataattgatttggtaatagtggaaataaacgataccatcaagatatgattaaataatttaaaatctatttgttaattgatggaaaacttcaaacatgcataagaagttactgtacttatcactcagtttcaataatttatcaattcattgctaaagttctttcatgtaataccctcgcccatttcttccctttctatattactttgaagcaaatacgtattgtttctacttgtaatgtagttagtgttttatatacttttatgtaatattattacattttaattgatatcttatgttttttattttattttattttattttcctgagacagggtctcactctgtcacacaggctggactgcagtggcatcatcttggttcactgcaacctctgcctcccaggctcaagtgatcctcccacctcagcctcctcagtagctgggactacaggtgcataccaccacacccggctaatttttgtatttttagtagagacagggttttgctgtgttgcccagctggcctcgaactcctgagcccaagcgatacacctgccttggcctcccagagtgctgagattacagatgtgagccactgtgttcagctgataagtgtttaaatttctctaaaaactatttacttataaaggtaaaaaagatctctttaggcttcagtttcacatatctcctttaatctttttttaataatttctagtgatgggatgattaagagactattaaagctattacctctttagagtcatgttcaaaataattattagatctgaaaagggacttgtgggttttgttgttgttgtttatccttctgcttctccaatttgtgttgtaaattcatgtttaattttgtgttccctcattgcagtttatcaaagtacattctgtatattttctgtggtttttttccttcagttttaatattaaattattggattctttttttcaaatgacttctgtcttcatttcatgtataaaatataaatttcttatattttaatactggtaccaaattctctcactcattcacttattttgtaaatccttagcttaattactgattacttttgcccattaggaattgatatttttgttccacataaaggagagagttaatagaaactcctaagacaatgcacattttttcctcatttattcagttaatgaaaatgagctcaagtctaacagctattttatttgatgtagaatgatacaaatattatatatgttttaattaaaaataatagattataattcttttactgtatatcaaaggttaggacagacagaaggcatttttaaaatatggctcctctctagaaatactctgaccccagttcttacgagttcaaattaggacaccattaggagatatttgagtggctatccagtagagtactttgaagtaatctagtcgccttataaaacttaaaggaatttatttttgtcttagtagtgaccagtctaatctggatggccaatggctttgcatcactcatacttctcatgcttttctttattcatctccatgggaactatgaaataacaatccttagatatggaatccatctgatctttgcccttttgctgttgattttccttttcctgctgacctcagtcttataccttaagtaagtgagaccaggtatgcatattaaggaatttctgtagtcaacaaatgaactttactttctttagtatatttcttttatctcaagaaacaagaataaatacttagaagatcagtagttgcaaaactactaattgcttttcataactcagttttttcacctaattatagttgattggttaggaaaacagcagaaagttaaagtcttaattttaagttgttcttggtggacatattatatatatctacaaacactttcaaaagccttttatgtttatattgccttagtgctgataggttttgagtgattgaatcacatactcatatttcaccagctgtcatttagcttccatttaaatattttctgcgtaagataaaattacagttcaaccatcctaatttatacctgtacatgtagggttcttggactaatttctgctgtgaggtgaacatccctgcttagcatttactcttcatgtcatctgatataatgatacctgtgggtggcataattgtaggtacgggaacaacttacaacataattttatttaggcattggaaaatttgttacccctttaaaaaacgtaatttattattattattcttattttgagacagagtcttactctgtcgcccaggctggagtgcagtggcgtgatctcagctcagtgcagcctccacctcccaggttcaaacagttcttgtgccttggcctcccaagtagctgggattgcaggtgtgtgtcaccacacctggcgaatttttgtgttttttttagtagagacagggttttgccgtgttggccaggctggtctcgaactcctgacctcaagaaatctgccctcctcagccccgcaaagtgctgggattataggcgtgagccactgtgcccagcctaaaagacatattttacaatgtttaaaaatagtttactagaaattccagctctggtttttctaggtgtatatttgttttatggattaattcagccatttaaaatgatttatgtgtttaacagtatgtcaccctaagttgcccttgccttctgttcacttccattttaaagcatttttttaaactaaaaagaaaaatagaaatacatctctatcttttaaattattgtaccaagaacatggagtaaattaatagctttagtcctatcattttctgtcatcacttctattccctttaccctagataatcagtattaagctttccaaattgatttaccctcctagtcagattcttttaagatcttccagtacttctgccttagaaatttctcatatatcaaaagtagtatttaaagggctgtgatcattttcctaccctgttactagagtttcagaacatcatgttctttgtaaattcctacggtgtgtgattgtgcgtgtattaaaagatcttttcatcttaatttaagaatggaccttttattccttaaatattttaagaaaactttctgatatattcaagcaaccatacctttacattaggaatataaatagctgccattataataaatggcataccatagggtcatgtaaaaatataacagggagcatattacaacactgcagtttaattctggtgtttgtaggatgtgctaaagttagagagctgaatgattttcttgtaaaacatgatagtataatggggcctcctccctattattggccaatattacttggtgcttttaaggaagcacatttctttttttttttttttttttttttttttgctttttgagacagggttcatttggaatcagaaaagacttttccataagtatgttttattcaaacatataattcttattaatctcaattggctgggcacagtggctcacgcctgtaatcccagcactttaggaggccaaggcaggcagatcttgaggtcaggagttcaagacctgcctggccaacaaggtgaaaccctgtctctcctaaaaatacaaaaaattagccaggcatgggggcgggcacctgtaatcccactgaggcaggagaattgcatgaacccaggaggcggaggttgcagtgagccgagattgtgccattgcactccagcctgggcaacaagagtgaaactccatctcaaaataatgataattctcattttactttcagaggatattttgaggtgctgaagcaataatttatcaatatacagattaggtataatgtggtcttagatacatatatttaaaaatcaacaggtatctctttttactttcatatacacatttatattttgccctcttgatttctgtcttccttctgtctagagctacagtgcatgccattatatttgtcatctaggaacttactgactagtggggaacacaggtgagtgaataatgacaaaatgaagccactgactgcctagagagaggttagcaagtttttcagaaaagatgacgtttgagtttgaagatggtaggagtttgaagatgatagataagaagacatggagtgtaacctttcggcaagagaaaaatgatggatacagattttcaagagaccattgctatctgcgtagcaatgaggggaaaaaacataattttaaaaacttgtagtctttaaactcattgaagacctgtgtcacagagaagtttaaatgaacaaagctcaagagaaacactacatcctcctagaaaagaagtgcctggtggccatttgcatccctgggagcattaactgagtcataggtagataaaggaacaagtcttctacaaataagggagcttttatggtacaaggagaaaccagctgaacttttatagccacttgtgggcagacatgacagattagaatatgggatcctcaaacagagctagtccaacccccacactgaatctcagcaggacttttgttgagtaaaaagtgattaagaaaattgggactgagctagagaaagaaggatcttaaaaccttgctagagaaagagacctgattccatcttcaagacatttgaaaccaaagacatttgaactggaactaaaaggttcaactcagataaactcctagttagattgaagagatatattcttcactctactcttggcaggaaacaaagcactttctctgggagaaaatattttcttctttagtatccttttatattcaatgtttagcaaaaataaaaattttgagagacttgaggagaggaaaatgggatccgtaatcaagagaaacaatagtgtaaataaactcatcaataacccagatgtttgaattaacagacaaaaaaaaaaaaacttatgttaaagaatttagaagaaaagatggtcaaaactggtaagaaggtagcaaatttcagcagagaaatggaaactaaaaaactaaatgaaaattctagaacaaaaagtactatgaagaattaattggttggacttattggagtcaggtcagtaaaaataatatgcaaacagaagcacggaagtagaatgagaaaagagcatcagagacctgtggggcaacattaaatggtctaacatgcctgtgactggaatctcaggagagagaatggggcagaacaaaatctgaaaaaaaaaaaaaaaaagtctgagggctgggcacggtggctcacacctgtaatcctagcactttgggaggccaaggtgggcagatcacttgaagtcaggagtttaagaccagcctggccaaaatggttaaaccccatctctaccaaaaatacaaaaattacccaatttttttgtgttttggcgcatgcctgtaatcctggctacttaggtggctgaggcaggagaatctcttgaacccaggaattagaggttgcagggagccaagattgtgccatacactctagcctgggcaacagagtgagactcttgtcttcaacaacaaaaaaaactaataacataattaagattgaaaaaagaaaatgtctgagaatgtttcaagatttttgaaaagatacaaagccacataccaaagagtgaacagaaccaagtggaaaaaaaataaacagaaccacagctaactacatcataattgaattaccgaaaaccagtaatgtgttggacaggagtgttgttaaggcagtgtattatactttaattggaagtgttttttcttttttagagattcataaaagtgtggcgctatttacagctttcatgaaatattaaaagcagccagaggagaaaatacattgaattcagaggaacaataaaaataatgacagctgacttcccattggaaacatagaagtccaaagaaaatggaatgacatcttttaagtttttaaatttaaaattacaggcgggtgcggtggctcacgcctgtaatcccagcactttgggagaccgaggcaggtggatcatctgaggtcaggagttcaagaccagcctggccaacatggcgaaaccctgtttctactaaaaatacgaaaattatctgggtgtggtggtgcatacctgtaatcccagctactcgggagggtgaggcaggagaattgcttgaacccaggaggcggaggttgcagttagccgagatcacgccactgtactccagcctgggtgacagaattagactctcaaatgaaacaaaacaaaaagacaaacaaaatttgatttagacttctataaccagtaaaaatgtttaaagaatgagtacaaagtgaaggcaatttcatacaaataaaacagagaatctcccaccatgcactacaagaaatactaacagggtttttaagctgaaggaaaatgattctacatggcaacctgaatctgcaagaaggaaagaaaagcactagaaaatgtgtggaaaaaatggaaagacgagtattttaaaaacttattttacaaaaacaaaatcagtatattgtggagtttatcacacagaaaagtaaaacgcatgacaaaaactttacaaaaggtaagagtaaatgaggtacactattacaaagttgttacattgtgaaatataatttatttcatggtaatcaaggtaaactgataatttaagaatatatgttatactcactgaaagtaatacaaagttatatagctaaaaagccaattaaagcatataaaatggagtactgagaatgacatgacagaattcagtgtaaggattttggagtagtagaagcaggaggtttagcttagaaagtggtagcgtaggtgttagattatgaagggccttttatatcataccaggtagtttgtaccttaccattatgagccactggaatttattttaggcagacgattgatatcatgttatttacaaaattaactagtaggattaatatgttatttacaagattaactggtaatttctactataaattttgtcttactgtaagatactgtcttcaactactagggtttgaggggagggaaaggacttgacataaattggagagactcctaggatagaatagatagacctataagacttatgcaatattgcagtaagaagtagagggaagaatcaattctttctgtagtatctgcctttggaaaccattggatgttggtgttatatgagaaaggaaggttaggtgtagtatcaaacccaaggaagaagataatgagttccagcctgagtgtggtcgatttcatataccttgaggatagccaggtggagttaatgagtgagcatctgtctataaaacttaaaagagtagtgtaggtctcagatatgtgtcttagttaaccaattctaagatgcacattttgtcacacttgacgtccctggaaacagattgtggcttataattaatggcctcccaaaatcctttttggaaaagcagcagttttggatgttcttattgttgtatcaattgaattttgtgcaatattaataattcatgtgttgattggaggaataaacaacttcatattttattgcaacaattgctttatgagagttaaaaagggaaatagtcacaactaaatgaagctgcattaagtgccaaaggattgctgtcatatgcaaagcattgaaattgatggcaccagaagaaattgccatattcatgggagtaaagaaatttcaaaggaatgagaggctgatgtgtccatttcatgtgttacacgggactgttgttaaggcagtgtatcatagtttaattggaagtgtttttttcttttttagagatttataaaagtatggtgctgcttacaacttccatgaaaagaatcattggcatataggtagtagttgaagacatgggaatggaggaaacatctaggggaacaaagaatgaagtgaggtctctgtgaataggatctggtatagattctggtgtgtgtgtattttccatttagcagtagaggcagaatgcatacctgctctgactgctaaatgcatgcatttcttgatctccatcagcttttgctccaaaatttggcagtgacctttttactttcctaagccaaagaatagtagcgccaaagaatagtagcaccaaagtgttactagtgagaactatgtgttctcaccatgttagaacatggtgttccaaggaatttaatcctgcctctggaagtgatgtatgcaggtaagccaaggaaatgctctatataaaaatagaggaagacccccccccaaaaaaaaatcattagtaatgttatatgctaatgaggcaccagatcaagaaaaaagcagaaaaacatcaagtgtgagcaaaataggaatattgcacttcctttagtctttttccacaaaaatcttttccccccaatcttcttttatttttctcttatagtaaatttcctttcaaaaattgcaagtactatgtgtcttccataaataaataaataattcagacaaatacaaactttattactttctcttattttctttaagtattcatttaagacttttttgttaaatgcctacagattattcattgttgtttaaggtgctagggatataatggcaaacatggtagttctttgctctcatacttgtattctaagaggcgaggcagacaaaagttttttcaagtagtgacattttctaaaaagaaagaaaacatagttccactgtagaagcagcagccttggatagggcatttaaggatggattttcaaaacatacgatactctgggccaggcgctgtggctgacgcctgtaatcccagcactttgggaggccaaggtgggcagatcacgaggtcaggagatcgagaccatcctggctaacatggtgaaaccccgtctctaccaaaaaaatacaaaaaattagccaggcgggctggcaggttcctgtagtcccagctactcaggaatctgaagcaggagaatggcatgaacctaggaggcggagcttgcagtgagccgagatcatgccactgcactccagcctgggcaacagagagactccatctcaaaaaaaaaaaaaaaaaagatatgatactcaagctgagatctgaaagagttagctgtggaaaggttgacagaagaacatgtacaaagggtctgaggtggaaacaattctgatgtcctctaggaacagaaggaaggacatcggtaggagagaagatagccatggaacaggttgtgtaggacagtgtaagctttaattcccaccccttttctccagttaaccagtgttactgatatggtttggctctgtgtccccacccaaatctcatctcgaattgtaatctccatgtgttgagggagggacccgtaatccctatgtgtttagagaaggtggtgattggctcatgagggcagtttctcccatgctgttctcatgatagtgagttctcacgagatccaatggtttttataagtatttgacagttcctccttcatacactcacactctctcatgccgccttgtgaagaaggtgcctgcttccccttccgccatgaatgtgaatttcctgaggcctcccagccatgtggaactgtgagtcaattaaacctcctttgtttacagattacctattccagggtaatatctttatagcagtgtgagaaggaacggactaatacagttactgataacagtttgtaacattgagttacaagctactgttaggccttctcagacttacattatatctcatgaatctttatttaagttatgttgcaaagcccacccacattagcatcttctgtttacagtcaaacttttaagatgctttgcacaccacatttattttctcatcttgttgtcacaaaatgtctttttttccccccttagaaacagggttttgttctgtcacccgggcttgagtgcagtggcacagtcatagctcactgcagccttgaactcctgggctcaagggatcctctcacagcctcccaagtagctaggactataggcatatactaccatgccagactaattttttatttttaaagacagggtctcactgtgttgcccagtctggtctctacttcctgggctcaagccatcctactgcctaaggctcccaagtagttgggattataggtgcaaccaccacacctggtgaaatctctattttgatattatagtcatttggttagagtttatcttccattattttcatcaaatacatttgggtgctatacttctggatctttgcaagtccaaaaatgtcttcattttgccctatacctatcttaactgggtgtcaatttcttaatttcttcttaatagttagtaaattgtttgtcttctagtgttataggtgagaaatttgatgttagtcttttcttgtaagaaacttgttctttctgtatgacaatgtgtaaaattcttttcttgtcctcaaaatttaggatttccagtagaatgtactttcttttttcttcctaaaatatttctccttataatgaagtaagctcttgaaatctgcacttaagcctttaactcaaaaattttcttctagtatttatttaattacatctccatttgtttctttttctccttttggaactttaaaactaccagtaatttctttttctcctcttggaactttaaaactacgtaaaattttacactacagtttcaaagtcttatacgttccttatgattgccattttctttgtgtttttgctctgtgttataagcagtaggacaaaaattgacctattgcagcaacttcagcctttttgactgattcacggtaataaatatattttacatagcaacccagttcacacacagctaatcaaaacaaaatgtcatgacataatatttatcctaactataggtgatgcactctatttttctagtttattctatctttttattctattttatttttaaaaaaaaaagatggtagtttttaaatactaaatcagtggttctcaaccaaggcaactttgtttcccagggaacatttggcagtatctggagatatttgattgtcacaactaaggaggatgctactggcatctagtgggtaagaggccagagatgctgctaaacattctacaatgcacagaacagtcccccacaacaaattacctggccaaatgtcaatgctgcgaaggttgagaagcactacactataaatttatttcattactcctcagtgtaatgattctctactctgactgtacattcataagaatcacatggggagattgatttcataactcagattaactggtgactagtagtttttaaatgtttcattcttcagtgttttaaaaatatgtacctatgtacctatcgtatatggctatgacaaacattcagtcctaattttatgtggtagtggtgtttttttgagtaaaagctagtggttaatctgatagttcagcagtataatttttgcacctttattcagctttccagttaaactataagttaaaaaaattcttttgttaggttatcctgtgtttttgaatgttgttgaaaatgaggtaaatttaactaggttaccagatattatttcaggtaagaatttccagtaacataaggttattatataaactgtaatattatatctcctataaattatattttaaagtccagaataagcaccattcccaggtagtttgagcacagcagatttcttatgatactgcgttcttgtaagcccatgtttctacgcagtgatagaagtaagattatacttctttagaccacatagacgaggtcatacttcgtaggtcagtcttgttacaaatagaagagtctagcatggaatcagagtagtttgcaaagttgagcctttgggtttctagaattggaggaggagaccttcagttatagaaggggttaattacaaattgtatacggatttgaagatctgtgacgttccttccaaatctaaatgtgcttttctcttgtctgccaacaggtacaactgtaactgctttaagattatttaagaatctacctgtaagaaagcagttttactcaactgcaaaaaaatgtaaagatgaaataaaaaagatccaagatctcctcatgagctttggtatccttaaacctgacttaaggattgtctttgtacataacaaggtaaacattattttatctttataagtttctgggtatatgatataataaacaaacaatgtatactttataaatcagttagatatgggctatgactaaatgtttgtgtgccctcacaaaatttatttgttgaaaacctaaccaccatgtgatgttattagggcatggggcctttgaggagtgaaattcatgctcttaaaataaaggagacctcagagggctgccttccttcttctgccatgtgaggaggccactacatagtcagaggcaccacctatgaaccagaaagtgggacctcactagataccaagtcatctggtaccttgatcttggacttactcagcctccaaaattgtgaaaaataaatttctattgtttataagccacctagtttatggtattttgctatagcagcccaaagacaacatgtaaagagtctttttttcaaaatgttagtccacatttatctagttttatctttattacataaagagtgtctttaatttgttgcctaatatctatatgatctgattgaacttttcatttcttaatctctgaaatcagggattcccccagcagacgtttttcatctaagaaatggcttgagtgcttccttttatcgggtgctgtgatagattctcaaaatatgaaaatgagtaagactggttcttttcctttaaagacttcacaatttagtgacatttttcaccctctacactgttgattctttggaagagtgtgtgtgtcaggaggatacaagtgtaattttgttacatggatatgttgtgtagtggcgaagtcagagcttttagtatatccatcaccagaataacataccttttaccttttaaataatttgtcatcatccaccctcctccctctctacctttgtgagtctccattgtctatcattccacactctatgtccatacatgtggtttagcttccacttataagtgaaaacatgcagtatttgtctttttctgagtttcacttaagataatgacttccatttccatccttgttgctgcaaaagatgtgatttcattcttttttatggttgaatagtattccactgtgtatacatacacattttctttatccatttatatgttgatggcacttaagttgattctgtatctttactattgtgaataatgctgtgataaacatatgagcacaggcgtccttctggtataatgatttcctttgggtagatacccagtagggagattacttggtcaaatagtagctctatttttagtttttttagaactaaaaatactgttttccatagaggttatactaatttacattcccatcagcagtgagtaaatgttcccttttctctgcatcctcaccaacatctgttatttttcatccttttaatcatagccattctgactaaggcaagatgatatctcattgtggtttaatttgcatttttctagtgattagtaatgttgagcattttttcatatgcttgctggccttttgtcttcttttgaggaatgtcaattcatgtcctttgcccactttttaatgggattatttgtttttgttttttgagcttcttataccttctggatgttatctctgttggatgcagagtttgcaaatattttctcctattctgcaggctgtctgttcactctgttgattgtttcttttgctgtgcagaagcttttgagtttaaggaaaactccagctttctttccatttttcaaagcgccgataagagaaggtagtcatcttgttgcttggtgaatcttaaaggaaagaaaggtttatatattttctaattattctgtttatctaatgaaatttcacatgggtatcctgcaggaaagcaaactacacagcaatgtggaaacctgatgggaaatagggaattaacatctattgagggcctacacaatgccaggacctgtgctaggtgtattagttttctgtaatcctcacagcaacaaccaagtgatgtagggattatatcagttttgcagttgttctctgaatggaattcagataggtttaatactttgctcattgttgtgcgactagtaaattgagatgggatttgaaacttaacatgccttcagagtgctttgctctctaccatgctctcttccttttttttttctttccttttttgagagggtctcgttctgtcacccaggctggagtgcagtggcacgatcacagctcactgcagccttaggctcaagcaatcccttccacctcagcctcctgagtagctggggctacacatgtgtaccaccatgcctggctcatttttaattttttttgtagggatatggggggtctccctatgttgcctgggctggtctcaaacttctgagctttcaagcaatgcaccctcttcaagcaatacacgctcccaaagtgctgggattacaggtgtgtgagctactatgcctggccctttttcctattttaatactactttatatttatatagttttttcccatgtttcagaacagttacaataactttgtgagatagaaagcattatctctgtttatatgggggaacttaaagctcagagcaactaatggaattgttttatattttacagtaatagtgctgaggtcagaaccctttttgatccagttttcttattgtcaggaagattctttattaaagctatggtagaatgtttttgatcaaaatctttgatcatttaaaataagaatagcaacctgttcttgttggcatagagctcaaccaaatgataccttgagatcctttccagtgccaccgtgctatgattccttaggatgttgatggatggaggctcatcctattaataaaaataaccctatgacctctggatccagaggatatttagtaataaaaagtttgtccctaaattaaaaaaagaccaacatcagaaggaacataataattaggaaggaaaaatagatgaaaaaggtaaaatataaagagaaataggaattatatatttgtaaaagaaaagtgggctgggcgcagtggctcacacctgtaatcccagcactttgggaggctgaggtgagtggatcacgaggtcaggagatcgagactatcctggctaacacggtgaaaccctgtctctactaaaaatacaaaaatgaaccaggcatggtggcatgcgcctgtagtcccagctactcaggaggctgaggcaggagaatcacttaaacccgggaagcagggaggttgccgtgagccgagattgcgccactgcactccagcctgggctacagagggagactccgtctcaaaaaaaaaaaaaaagaaagaaaagtgagtggaagagaaatctttcgagttagaaaatataataagtgaaggctgggtccggtggctcacacctgtaatcccagcaccttgggaggccgaggtgggtggatcacctgaggtcaggagttggagaccagcctggccgacatggtgaaaccccatctctactaaaagtacaaaaattagacgggtgtggtggcagatgcctgtaatcccagctacttgtgaggctaagacaggagaatctcttgaacctaggaggcagaggttgcagtgagccgagatcgcaccactgcactccagcctgggcgacagagtgagaatctatctccaaaacataaataaataaataataggtaaaaacaagattattacttcacgtgataaaaatgaatatattagaaatatttgaaatgacagagttcttatttcaagtcaaatatgtatcttctaagtttttttgagaggtttatatcattttcccaaccaatgtaagattatcaatgtgggtattttctttagaaattggaaagcaggcgccccgccactcgctctccgggcggggcgggtggcgcctcgggcctccacctccccctgcctgcgcgtgtcctgcgtgagagggcagaggcagggtggaggcgttggcacgggacatgtgggccgcggttgccgactgtggcgcgggcagtggaggaggaggcggggctggcgctgaagtcggatccggatccgttgctgtgcaccctggtcggggagagtccgatgcgcctgggtaggagcaccgactgcggggcctctaccgaccttactagaaagatgaaacctgatgaaactcttatgtttgacccaagtctactcgaagaagtggactggaggcagaatacagctacattttctccagccatttccccaacacatcctggagaaggcttgattttgtggcctctttgtactgctgacttaaatagagggtttttttttaaggtattgggtcagctgatcgagactggagttgtcagccctgaacagtttatgaaatcttttgagtatatgaagaaatctggggattatgttacagttgtagaagatgtgactctaggacagattgttgctacagcaactctgataatagaacataaattcatccattcctgtgctaagagagtaagagtagaagatgttgtcgttagtgatgaatgcagaggaaagcagctcggctaattgttagtatcaacccttactttgctaagcaagaaactgaactgttacaagattacccttgaatgtctaccacaaaatgttggtttctataaaaagtttggatatactgtatctgaagaaaactacatgtgtctgtttctagagtaaaaatcttataagaaaattgtcaaaggagctaatgctacaaggctccactcttcctagagttaaaatattttgttgctgcagcagagtgacctccataaatagtagactgagaaaacattgtaatactacaagtataatgacatctacgagattactttgggctggtgggaaatgctgtgaatttagattacaaatgaatattataaaggggatttttttcatctcttttttctttttttattttattttacataattcatgtcttgatctctaaaactaggcagtcacctttaaaactttggatctttaaaaacaaataccccgttactcctaaaatttaactgaaaaaactcacagatttgggtttttttgttttgtttttttgttttgttttgctttctgcttagattttatttttatttttttaatttatttttattattgtactttaacttccagggtacatgtgcacaatgtgcaagtttgttacatatgtatacatgtgccatgttggtgtgctgcacccattaacttgtcatttacattaggaatatctcctaatgctatccctcccccttcctcccaccccctcaacaggccccggtgtgtgatgttccccaccctgtgtccaagtgttttcattgttcgattaaggggatgatttttaaccaagggaatatattttaaacttgaatcttttcttgcattgtatttttccaaaagtttggcttcatttcttggtagttaagagtatgggtaataaggagttatatgtctgccgtgttgctcatttaaaaaaagtatttattgaataaggctgttttttatcacaggcataaaatttaatctttttgtttcaaagaaacatctcagtacacttaggggtgtatcgtttcccacatataaagtatttattgaataaggctgttttttatcacaggcataaaatttaatctttttgtttcaaagaaacatctcagtacacttaggggtgtatcgtttcccacatataaagtcaggctggataaattagttattataactaaacacagtgtagtccaacatttgttgatcccaatacaggcaaataacctggtcagccttttaaagaagtagaagaaatgaaaattatttgacaagattaaaagtaaaacaatttaaatgttttactaaaagtttatataggtctatgtagataaaaagtaccacttgtcttatctgtgaattataactgttcctttgttaaaaacacctaagagcaattatggtgggacatctaaggtactttttaaacagtgaattagcaaacctcagcatatgtgtttctaccttgatttttttcttttcatgggtatctgaagcctcccttctgagtaacaggtttttcaaaaatggagtatcacaaaattgagtgaaatacaatactgaaacaatacttaaaaatatattgtaccagatttgtcaaattcataaaatgttgatggaagctttactttttagtgtgattataatggcactattctggtcattatcctgtttttattttatttattttaattattttttaaagttgaagaattaaatagtttaatggttctaattttttgcattccatgttacattaaacctgttcatatgatgagtaattttctgttaggaaataaaagaaattggaaagcagtatttatagtgtactacattttattattttcggaggacactgtatcagaacttatatttagcaaacacaagttcctctatagccttcagtaatttcagatgcagttcaaatcctggagagtatgttgaaatgattatactgtgaaagtaatataaagtttttaaaagtctttttgtaaaattaagtattagctattatagagagaaatcatggactgaattagaacaagctatttatgttcaagcttttttctcatagtagatttttttatttttatatttcttaatagtgctgttgcacctttaaaatgttaaaatatattgttaaacctcccaaaatagcaatgacatgttactataaatctctttgaacattgagtcctactttgctcttagcctttttcttttaagcatgcctactttcatcattctatatgtacttttttgtaaagaatttttttgtctgcttagaattttaaacctgacgatattgttgtctttattttttttctgcattagagacaaacaatcatattgcgcataatacgagaagtactattgctattttgataacttggattagatagtgttctttctttttatgaaggtttaacctgccaagacattctttgaatactgataatgttgatgttcttgccagtatggttatgttagaaagaggtatttttcttctttcatcaccatgttccttgaaagcatagtgaataatgacacagccaaagggaaataatttacaagtggattcagtgagtttatttaaagtagatattatttggagaactgctagagccattccttagatgagcactacagaagctttagttgtaataactgaatccctgtgaggtcctactgtaaatatttttatttataaagtagttattttgcagaattaacagttttttctcaatattatagtatctgaaaccactttagtattcttagctatttcatatgacaatgcataatttcctagaccactagttcagaacataatgtgaaatgtatgatttcaaataagggctactcctatatacattataattgctgatttgtgtgtgtacttgcttttccaaaaatattatttgtggttttaagaattgttttgattgaattttgttttgataattagaggcccactggtattgcaaaagctgaattggatgtcattgataaaagaaggttttaactgttacgaaagagagacatgaattaaagaatgttttccttcctattcccacttctatatcacatgagcattaaggcttattgagatgttggttttcagtgttgtctttgtttttgttgttgttgttgttgtttctttgtatgttttgtgctctgtaagaatgatgtcagctccgaagtgttgaatatctctgaattcagttaatctgggaagatgcaggcccttaaccaggaacagagacccaaaaaactggccgtggagatttggcagtgagtggtggctgaagatttggtttataagatgaagataaataagtgatgccctataatatatatcccctgcactcatgatattctccatggtcattttatccttctctaaccttttacgtgatcatcttgaatgtcccaggtttgtttcgcctgtgctatggggaatcaaagaaaagtcttttgccgcatttggaccaatgttaagggtcagttcccctcccgcaatcccagccaggaatgtggagtcagtataatcagagagaggttctaattcaggagtgtggctcaaatgccccttccttaggaatgaattattccagtgccaatctggaaagtttgggtgtgttttgtttttgtttcttttttaattaaagaaggcggacatcttttcagatatattttaagattagcttggggctgattatcaatatggtttggtttggggtcttttttttttttttgctacttacaaattaatgattactaaatttattaaatggttttcatgtgttcctcttttgttaaggattcttttacttttcacctaaattttgtgaaatatagaaaagatgaaagacatataagtcaagttttagtgtagttttatgtttgtaagcactattaggagtctctgaagtcttccattatccctcagtaggacattattcctcaactgctctcattttgttttccacgtatttctgttatgtcattttgcttcagtggcagtgatttgcattctttctttcctatttgacagccttttataggagggagggctgcatctagttcatctatattccccttaatagtgagtgcatagtacaggatggaatattaaattaattaggtagtgttaaagccaaaatagtaagtgtatgaaacactagttttaaacactctggcctctctcagaccttattcataatatttattaataaaattcattcttttgaattccttggtgacctcttatgtatttagggagtatattttcacttgtattcacatatacaattctagtccattgcccttcctggaagctaagtcactgatacatcttctttagaactaataaagaatcatataaagactgcatggatggggcagttgaggggaaacacttgatggacagtctctaagagctgtcaatttaatgtattttgttgctattaacagtcaaatagaacaacataattgttcctttactgatcctctaaccacatacattttatatacttattattaacccaaacacacatttctctattccaacactgtagatttctcttccaaacaataatacccagagaatcctgtacaaatgtagctttttgagattaggccaatgaaagtcaatgacatgatctctaaggccctttttaactctaaaactctttgatttttaaggatgtttacatatgtatatcttgagcacttcatttctttcttagaaaattggaatttcacatttttacttagaagttctactgagttcatatatgaaatcataaaataataaaaggtagaaagttctgcaataaacatggttatgcagatctctttgacatactgattttcaacctaaatgcccatcaaatgatgaatggataaagaaaatatcatgtgtatccactgtatatacaacagaatgccatttagccataaaacagactgaaatcctgtcgtttgcagcaatatggatgatctcggaggacattatgttaagtgaagtgagccaggcacagagagacaaataccacatgatctcacttatatgtggaatctaagaaagttgatttcatagaaatagagagcagaatagttgttaccagaagctggggaggggagggagaaggaggaaaactggaggggttggtccatggggataaagttatggttaggaaaaataaggttttgtttgtttgtttgtttgtttgtttgagacagagtcttgctctgtcacccaggctggagtgcagtggtgtgatctcggctcactgcaagctccgcctcccgggttcacgccattctcctgcctcagcctcccgaatagctgggactgcaggcacctaccaccacgcccggctaattttttgttttttttagtagagacggggtttcaccatattagccaggatggtctcgatctcctgacctcgtgatctgcccaccttggcctcccaaagtgctgggattacaggcgtgagccactgcgcccggcccaggaagaataagttcttatattctgtcacaccgtagggacactatagcaaataacagtgtattgtgtatttcaagatatctagaagagcttttgaatgttgtcatcacaaagaaatgagaaatgtttgaaatgatagggtaattgccccgatttgatcattgtattatgtatacatgcattaaaacatcacattgtacctcataaatgtgtaattattgtgtgtcaattataaatttaaaatcaaatgctttaaacactcaattgcagagttcactggtaaatacttcactgtaataaagcatctctcacaatgtatctctgaagaaacattctcagatttagcttttcaacctgtatatgtaaactcttcacagtgtcacagtggtaaaattaaaatagttaaaaatcatgctctagatgaaaaaactagattatagggtttactggtaaacattaagttcactgtaataaataagctcacaatgcatctctgaagaaacatgcccaaacttagcttttcaacctttgtatataaactctgccataagtcgcaatggtcaaaaccatagttagaaagcatgttctaaacatttgatgacagagttcactgattggtaaacagtttaattcactgtgagaaagcagctcaaagtgtgtctctgaaaaaaaaaaaaaaaaagaggacgtagaaggatccttagatctttacatctgaaaagaccactgaaaatgttttttgtcctgcctcaaatcttttagcaaatagtgtttttaatcctgtccacctccccttttacctttatgtgaccccaagagttttagtggattgcccaatgacttaaacattgaatatagtagaggatgaactacagttcacatatcttaatttttaatgcatcattcatcctcccttactgtagcttcctcccaccaactatactcagagtactgagtaggtgctttggaagggttaagtgatggcttgcactctgaagaaagttacgatgtaaatgaggagataagatgtgaaagtgtgtaaacataacataaatataccgtagaccttgtcattgcccaaaaccacactcactccataatttcactgttaatgtgttccttctctaatcactacctgatgcctctctatcttactctcttcaacaatccttagactctgttggacctgtgatcccttgttcctactgctttttaactgtttcttgccccctggtgtccttggttctctccttaccctgcttaaattttgtggtccatcattatcatccttctcttgggcactctgtcagttctcttggtcctttctcacttaattgtacttgtttgactaaatcctgattaaatccatctggtcatcattttggtatctgagccagtatgtaggggaagaaaacccacacccatgctgaatagtgcctctgtaaattcatgagcattaatcttcatgctgccagacagtcatactcctgtttttccagtcagcaaaccagaagccttagggttattcttcgctactgattctctcacactctaatctgattccagagtaaattccgtaggtctatctttaaaatatatccagaatctaacgacttttcaccatgtctgtgactaccactgtggtccaagccaccattatctgtcacctggatttttgtaatagtatcctaatggactctccctgcttacttcttatcctcttcagtgtattttcagctcagtgattctgtaaaaatgtgtcagatcatataactcatgtttaattagttcccatctcattcagagtaaaatcaaagcctttataagcggactgtgaattctctattggggtcagtatatttttttctgtatagagtcagatggtaaatatgttaggtttttagggccgtatagtttctcttacagctgttcagccctgttgttgtagtgtgaatgtagccataaacaataatactttatttacaaaaacaggaaggccatgggctgtagtttgctgacctccgtagatctgatgcctcctttacctctgatttcattaatctttttccttttgctcattttgcttcagttgtttctggaacctgcgagtcatgcttccagctcaggactgtcgcatttgtagtttctttgcctagaacattttccctcaagtaactggttcaatcctcaacttttaggtcttcacttaaactttctccgtgaggctttctttagccttcctaaaattgcaaccatttcccctgtccccccgcttccccactttcctgctttatttttcttgaacttatcagtatccaatatgctatatattttatttgtcttgatttattctctctcctcctctagaatataatttccttgaagggaaggactttggctcttttttcactgtcatatccctagtgcttacagtagtgcctcaagtgggtgctcaaaaaacatgtcaaatgaatgagggctgacaacaggatcaagggctgagaacaggagcactccattatgctggtggcaccagcccagctggactgtaagcgtaggccttaaagcacctgagatccagaagcagatggtatcagtgtagattaaaggtaacaactggacagagagatagcaaaacagcaagtattagctctcatactctagacacttcccacttctattggttgggagacttctagaaagtcaccaaaaagggaggggtgagcctggccacttggtaggtgggtggtattcattcagtggagtaggaacaactctgaacgtgattttcatctaggacccccaggtggttgggttataggaaaattttgttacagcagaatttggttatgtggataaaatggtcaagattattctaagtagagatagagaaatagtttaaacataaaatacataggcaggagagcacatttagaggcagtgaagaagtttctttaaatgagttggtatttaatatgagagaatagaggaagataaatccagcaatttaaactttttaaatgagaaaattggaaggcattaaaagtttttaagtagggaattgacatgatcaagatgctgctacctttgaaagtcagtttggcagtactctacagggaggagctagggagaccataaacatttaggaagctgctataaattgtaggctttaagggcctgaattcagacaaacacattaggtgtgaaaagcacaaagtgtctattttcttttatagctattatgaggaagaatcaatgggactagctgtgagtggcaaaggaccagaaaaggtttgaagataactgatttatttaacttatatgcctaaggaaataatactgcatccttttttaaaccctgaatgcacacatttgagtttctcctataatgtattaccttcatgaattacactgacataattttgattttactcctaaaagaagcttatagaaacaaaacttttaaagtgaaatcattactgcaccagtagagagttgttagtcaattcagagagaaaagctaatcagctctaggctggatagtatttattttttaaaatttaaaaattttttttttaagacagaatcttgctctgttgcccagggtggagtgcagtggcatgatctcaactcactgcaccctccgcctcccaggttcaagcaatttctggttatttttagtatttttagtagagatggggtttcaccatgttggccaggctggtctcaaactcctgaccgcaaatgatcctcccgcctcggcctcccagtggatgttatttgttacccttaaaacttgttgcttgttttgaaaaaaggcccagaagtagaataaagaaccatattgttgagatgtttgcctgaacaaaataggttgtatgggaagggaaataacattggttaggtaccagggagctagctgatgggagtgttataagctcagtgtctgtgtgtttggtcttaatttgaaggagaataacttaagaatcatgtagaggatggagttgtaatgcagaagagatgattgggatggcttcattttgaatgaaaaacaatgtaatctatagggtgttctattaaatgaaaatagtaaaggctgaaatcaaatactgctatgttgttacaaagcaatagcagcttgatttgtgagtaaccttttctgtaaagtcaaatatgttagaaatgagcaattgcctcagggttcaaagactgaagaacttatcagcaaggctgaccagaagggttttcttttttttttattgagatggagtctcactctgtcgcccaggctggaatgcagtggcacaatctcggcttattgcaacctccgcctcctgggttcaagcgattctcctgcctcagcctcccgggtagctgggactacaggcgcgtgccaccatgcccagctaattttttgtatttttagtagagaccgggtttcactgtattaaccaggatggtcttgatctcctgaccgtgtgagccaccacacctggtcacgttttctttaaacagtattaagaagtacagataatatagaggcagagaagagagcttcaaatattgtcgtatttacctaactttagtgctgtttgaaaggtaggtagtgaactttagaaggccagttattgaaatatttgttacttaaatagtagtctcctattcctaaatcattttattatgtattttaaataataaaatacaaaaatggatactactgtattgaacagctcctgaatattattactagtgtcaagaccaaccatctccctctgccagctttgttcttgaaaacagaatgttacacattttaatgtggtaagtgggccaagagagttctaaaaggtacgtttttaaaattcatccccaatgtctaaaaacacacattaacttctttttcttcttccttttctgtgtgaaatttgagtaaacttactgttgatttgcttctcatagaatagtgttgaccttttctcgtagttgcagtgacctatatttaagttaaagcttgagctggctagtataagaaacaaaatttgctttccattagttatttaaatatagttaatataagaagtaaatttatggccgggtgcagtggctcacacctgtaatcccagcactttgtgaggccgaggcaggtggatcatgaggtcaagagaccatcctggccaacatggtgaaaccccgtctctactaaaaatacaaaaattaactgggcatggtggcacgcgcctgtagtcccagctactcaggaggctgaggcaggagaattacttaaacctgggaggcagagattgcagtgagctgagatcacgccattgcactccagcctggtgacagagtgagactgtctcaaaaacaaaaaagaagtaaattcattttcatttgggtaattaaatatttcatatataccaactgatactttttcattaggctttgcttataaactttaaatgttataatgatatgattatttttaaaaacctgaaccccccctacttccctgctggaagaaaccatacctgtagcagcactatgtgggagacttgtcttgatggatgagaataattcttaattaatcttttttcctttatttgttataggaagtgctttagatcttcaagatttttacttttgaggaaaaaattatagaactttcagagaccaccacaatcttcctttcatccttaggaagaacttacttaactacatatcaataaaatagactctggagcatagtttccagttctgaccttacatattgtcactaactggcttacattacgtgtctaggcttcaatttctttgtctctttaaaatggaataatagtacctaccttacagagtaaggtttttaaatgagagaaagcattcacagcacagcgcctgctccataagtactcagtagaggttaattgctattgttattgatgtgaatattgtttaaaatctgattagagtcaaaaaggattattagaggaagtggccttaagactggttcttcggaaagactatgtgggcagaggtattcaaagcagggagaacagcatgtgcaatgtcagggagtcatcagaggtcagagaaagcttgtctaagaaatgagatgaggctacgaagcttgcttggagccagattctgaaggaccttgtgtatcttacatgggaatgtgtacttcttgttgaagtgaccaagagggaactaaatgagacatttcagtaggagactaacaaaataagataattctcattgcagttggaggatggactaaattatgtttaattgttgttaagaatgtggaaaatgatctcgttgtctggcaagttacacaaggaatggagaagagggtctaggcaagaaaaatatttccgatgtaaataagatttgattacgaattggaaataatctttcttgtttttaaagactgcaaagaaatgagtctcaacaatatccctttgaaagttatgcagagattaactttatacctttacatttttattaatgttttattctatttcattttatttttagagacagggtctcactctgttgcccaggcttgagtgcagaggcatgatcatagctcacttcagcctcaaactcgtgggctcaagtgatcctcctacctcagccttctgagtagcaaggaacacaggtgcatgccaccataactggctaattttttaattttttgtagagacagggtctcactgtgttgcccaggctggtcttgaactcctgcctcagcctcccaaagtgctgggattacaggcctgaaccaacatgcccagcttattatttaattttttaaaagatcatacctttacatggttgaaaacccaaaaatgtatgaaaaggtagaatgaaaaaattattcttttctttatctttcatctgcctagctcctataaactgccccttctttaggtaaaatgtctattaatttctttgcaaccttcaggaaaaataattatgcatgttctctttcaagaaaagaatataaaattaaataagtgtaagagattttagaactcatttatactgcataaattttaccaagacaatcatttttgaaagtttgaggctgcttagcaataatcaattcatattaatgtttattatgtcagtagaatgtggtttgttcttttaacagtagtattgatactgtgatggaataatctataattttatactgaattcaaaacatttagcagtgtcttagtggtaagctgctgtggctcatattgttcctgtgttgccaatgtgggaaataaaacaaccttttaaatattgtgtttgtgcctctgtactttttggagtcagagtcagtgcaagtacatacgcaggagtaaataataatagatatagatctatttatagtaacttgtaagatcttagaagtaaacttatggtacttaagaaatttgcctgggtatggtggctcacacctgtaatcccagcactttgggagcccaaggtgggaggatcgcttgagtccaggagttcaagaccagcctaagcaacatggtgaaaccctttctcttcaaaacgtacaaaaaaattagctgggcgtggtagtgtgcacctgtagtcccagctaatcgggaggctgaggcaggagaatccttgagtccaggaggctgaggctgctgtcaactatgatcacaccactgtactctagcctgtctcaaaaaaaaaaaaaaaaaaaaaattcattggtgctgcttcttgtttggtggaaaaaaaaaaatccaaatatgagcttagtacatctgtgcctacaatttgcaagaattttggctgcagtctaggccaataatatatcctctttatttagaaggagttgactttgctcaagcagttttagcattgtactattcacttaactatgcatcatctgtgtgcagcctacatttctctttatcacaaattgcctttacaaacaattgaggtttactaattaaatatcgagtattctcatctaacttcattttcttcaagtagcgtatgtcagtgaggtaggaattaggggcaagatatatttggctaacttcaaacctaagatggtgtgcatgtaataatatatttttgaggtgtttttgcactgtcatcatactgactagagtcagattcttagttggcacatccaggtgctccaactttgtgtgacctagatagaaaacatatggaggtttgtgtgtatttttagcacatgttaagctttcggcctaagggcaagatttacaaaaaccttcaggaagtgaaaagaaaatctctgtttttgaaaataacatagaattgatgaaacggtagagaaagcaaactgaatactgtattctggattcccagtattcccagttcttattcatcacattttatagtttagttttttagtgatgggtcctgttttgaaaatgaatcttagttgcccaatgagaagattttacttgttggcagaccgctattatttattgctagcccaagtgtaactagtttagaaaatgctcttaaattagcccctcgatctgatgcaataaaaattgcctagtgtgaaataatgctcccagactcctagcatgtttactttaaagtgaaatcacattgcatagttctcatgtttcacagctttttctaggaccgatttcctgaagtgatctttttacggttgtgtatactaactattcagcaggtcaggcagtgaaatagcatccttgcattaatcagcagctaagatttatatctgtatctaaggcatctaatataaactaaaataaacaagatgatgtttacattagtaacactgcaggctttttagctatattcagtgcaggaattttaaaacattagttttttgaaatatttccttgaatgctttattttaaaaatgtcaatatcagagagttagcattcctttaaagaggtacactttttgtgaataagtttggtgtttttttttttttctttttagggagggggtcttgctctgtcacccaagctggagtgcagggtgagccactcccacctcagcctcctgagtagctgggactacaggcatgtgccaccatgcccagctaattttttattttttttttatagaaacagggtcacactatgttgcccagtctggtattgaactccggacctcaagtgatcctcccaccttagccttgtgaataagtttttatggttcagctattctttgtcataaggaacttctgatgtggaaagtatgaagcaggggacatttcatttcctgtaattgcagattattcagaaccttatttacttcctttaattttgaacattgttccttaaattattagctgttggctggcttaaaactagagccataatagcagaagccagtagtttgcctttccagagtgcatgtgcacgcaaagattacagtctggcagttcttcaaaaaacatggagctaccatgtggcccagcagttccactcatagatctatacccaagagaaatgaaaacatatgccaacataaaaacatgaacatgcatgtttatggcagcatcagttataatagccaaaaagtagaaacaactcaaatgctcattaactcataaaaggataattcaaatgtattatctacaatggaatattattcagccatttaaaaggaatgaagtactgatataaataaacttgaaaaggttatgctaagtgaaagaatccaatcaaagaccatatattgtatgattccatttatatgaaacatcctaagtgggcaaattttatatagagagaagatagattagtgattgaaaagggataggagtcactgatgatggatataggttttctttttggactgataaaattgttcaaagattaaatcatgctgttggttgcacagctctgtgaataataaaaaccattgaattataaatctaaagtgggtgaattgtagagtatatgaattataccttaaactgttatgttaagaggaaagaaaagcaaagattggtttggatttccttaggtcaagtagtagacaaaaagtgtaattttaacaggtatggtggtgtgacaactagcagccttatctctgaaaacaaagagctagttttcaactctactggggttacttttccctagggaaaaaaaaatgtgtttatttgctcattcctttaacgaaagtatttagtatttagtgggccttactaggtgtctggtactgttcttggtaccagagactcaacactcaacactgaacaagctgaactcatcatcttcctgccaccaatcctgctcttctgagtttcttatcttgttgagtgttactaccaccattccagtttcccaggtcagaaatctgggaggcattcttgattcttctctttttattccctctccacatggagtcagtcatcaagcccatttcgtaccctttagtctgtccgttttctcttttcctcctaccagagtgttggttctgttaacacagcccagtaattctcagccgcagtatattaatactagtaaagtaccaaagtttgcaaatggtttatcttaaaaagcaaacgaaaaaaacctaagggaataatcctgtcaacatcagtttcactgacttgcattccaccgaacttttgcaagaggaagagaaagctgtagcatgatagctagtatattaggaattaattacacatagtcctcaggtcacctatcggaatattttttgaatgtgaactttcagttttgcatgtctttcgtaaaagctgagagtctctgagttggaggaatacaatcacttttttttttctttttttgagacagagtctctctctctgttgcccacattggagtgcagtagcgcgatctcagctcactgcaacctccatctcctgggttcaagtgattctcatgccttagcctcccaagtagctaggattatgggtgcccgccaccatgcctggataatttttttgtttttagtagagatggggtttcaccatgctggccagctggtcttgaactcctgacctcaagtgatccacccgccttggcctcccaaagtgctgggattacaggcacgagccaccacacctggcctatgatcacattttataaaaatcatattgctatagtttcagttctcactaagtcattcttgccaaagatctttttctaatatctatctctgatcatggtattttcccaattagatttatccagtgactctacattgcacgtaagggaaactataaacccctttgcacgatgtgccaggtcattcgtgatttagcccctatctgtctagtttcatctctagcaaggcattctctctatatgttcatgatttggcatgtactatcctatttgtcaggaatgcacttcttgtgatttgtcttagagacaaactcctgtcaagtctgattgtacttgtggcttctctgtgcaactgacttaggtttcttctatgatgctcccactgtgctatgtaatagtagtttttataatgtattataattattttaagattttgctttctttttatatttttagctcctttagagctgggaccttgtccttttatctttatattcccagattttagtatggaatctggaacaaaattgatgctcaatatgtatttgttgaacaaactcaaaattagttactttaaaattttttatttaaccaaaatatgttatagtatgagacgaaattaagggattaaaatatgcttatggtgactctacatcccatttcctggagcaattccaaatttaaatagtctacttcattggccttgaaatgtaattaacaaaacacaccataattttgtttagaaatgcaatatacacattgaacctataccttatatttaaaattgtatacaatttatttttatactttgatttcatatacttgttaaaagaaaaactttagataaactaaatttaacagtgtttatttgagcaaataacagtttacaaatcaggcagcccccagagccagagtaatttcagagcaagtccagggctgctgcatggtcagatgttatttctggacaaaaaaaaatgaaagtgatggacagaaaaccaaagtgaggtgcagaaacagctggatcggttataacttagtgtttgccttatttgaacacagtttgaacaactggctgcctgtgattggccgaaactttgtgattggtacaagagtaggttacagcctgttgacacatccatttaggttacatttcactatgtatggagaaacttataggccaaatgtaaaatatacaaggaggcaactttaggctaaacttaatttaacatactttatgtcttttttcttatacaggtcactttgaaagcaataatagtgaaaagttgaaatttaggatggagaaatacctgaattattttttagctctgctattttgctgtgcattatgatactaattattgcatatctgtatgaaaatgaatgcaaatttttgagaatttataaatccttaggtataaggatctgcataatatgattaaggttgttaccaagaactatattctcaaaaatattcagactttaggatgctagaatagtagctttcaatctttttggactttactattctaatgtgctttttttgagttgagaaccccagtgtactccttgccctcctaaaagcagattatttatttgaataggataaaaataattttgttttgtcttcactggtaccctcaattggagattacacagcgtatcacaaggccatgggggataatcatacatgaaaaatgcatttgtcagtcagaccctttactttttgagaattcccaattagagtctggagttggttctaaattgttgttgtcattgactagacaggggataaatattggcaaagtaaaaggagtgaatgtttagagccaaaaagattgagtatagatcttggttccatgacctactatttttgtttctttgggtgtaacaatttcttttgagtttcagtttcctcatctgtaaaatgagataataatacctacctgaaatgattgtgaaaataaacagtagtttctagaacagtagtacctaacaaagaataaggttttcataaatttcagctcttatctgattggtatcaatacaactctaggaataggtaaaagatcttcctgttaaactaaatgttgagttatttgtcttactgagtagttgttacactatctctgctttcccaagcaggttgctgtttgagactctaaaaacaaagtggtttgcagatggcacagatcagcaagcagagtcattgattattgtcaccttttccaggagagtgcattccttcatttctattcctgatgtgctagttagagaacatgagtctgtttacttcacctttcatcttattatacgtaatatcattaccactacttcctgactacatagattcctggttatggttaaggagttcctttggccagaatcctttggtccagtctcctctctctttctctgttatagacttctgcctcttttagactgtaggaaaacaagactctcccaagagtgtgctggacatcattggttttcaaatggttaaacaatgcaacttcacacatgtagaatgggaagcagaattttattactcagtttccttagcttggttcactgaaaaccttttttcagtgaaccaagctaatgaaactgagtaataaaattctgctattttatacctcctccataatcatcaaatatttaaatcactgttattttgctttcaacaaaagacctcctttctgcattttagaacaaaggggagctgtctcagcctccagccactgagtctccaaacctgcttgctagtgtacccattcttccccttcagtttcctggtcaaatgtgtcctattcctgcctcgttatttccctgtctgcttgcatttcccagccagactttctgaaacacttgtttcagaaaagtccttttttttatatcctccccatagtcactatccaaattggttccatttacttctctagaactgttctcacactcttgattgccgtttagccagccacgtctgttcctaccatactcactcaacattggaaacatatgatgactactttcttcaaaaacgtccttattctgtgtaccacactttgctgctgctctttctgcctctgtgaccactccttataggttccttttcttcttgtgcctgcccctttaatgctgatattgatgttttctcccaagccctttggacagtttcctccagacttaggaattgctaagtgaatttgttgaattctacctgtactgatgatttctcaagggatttgactgtaattggaccttgttgaactgaagaaattgcagtatgtcaaatctgattatgtacttcacagccaaaccttggtctagtctctctggaccatgattgtcttaaaatctaccccatgttgacctaaaaggaagaagctgaggcagaattaatattgagagtttatttgaaccagtgttgaggacagctgcctcagacacacttccaaattactttggggagtgctccattaggcttctgttacaagcaggtttttaaaagcaaaaagggagacaaagagtgagttgatagagttgtttgtcaggaattttgattagtaattagctatacatcattgagctatagggcatggattatggtgtctggtgtgtggcattgttaggtcagtggctacttgtggcaatagcaagcagttttcaataaatacttagctcaaggggggaaattactatcattttaatgcctctctgggcctgataatttaaaagggctcacattttgcagatacaaagtatttatatatatatatatacacacacacatatatgtgtgtgtgtatatatatatttttttcttattttctttttttaagacagagtcacgctctgtcacccaggctggagtgcagtggcgtgttctcgcctcactgcaacctccgcctccccagttcaaatgattctcctgcctcagcctcccaagtagctgggattataggggcatgccaccacacacagctgatttttgtatttttagtagagacagggtttcaccatattggctaggctggtctcgaactcctgacctcaagtgatccgcctgcctcagcctcccacagtgctgggattacaggtgtgagtcactgcaaacaacctattgtttctctctcatctccaacatactcgcagtgaaaaaatccagcctcattattcagcttttatgtttacagattcagttaacattttgtgaattctctatttcaaaggtacaaaggtaattttaaattatgatttaattaagaatgctctttccgaaatttttatacctgtttgactgtttatgtaaatcctgtaacatagctgatcatcctcagtaaaacagtaataccttacttgaagcagcaatttgtttttaaatatacacggaagtctatgttttgaatgtgaggattggaggtggagagagaatcgatatttagtgaaactgttttatgccaggcacaggcatatgtgcttgtctccatatggatttttatcttccaacaactctgagaaatcttgtaaagaggagaaaaccaaggtaaagggaagttaaatagatggtacactgcaacatatacagcttttaaaattcagaaccagagtttcttctgtcagacctcatagctcatgaatctcttctaagtgatactgaaattttaagctgaggatgaatgcaaaatataggaataaaatactgacttcttgagtttagtaaatctaaattgtattaaaagttatctatatcatttttgtccctaggcagttatttggcagaaaagcagagtatcagatcacaagatggctctcatgtcagttctggggactgctgttatgaacaatatggaatcctttcagtaccactctgaagaatctcaggtatactgcaaaaacattctcagataattctgatttactcatgaagctgttcacatatttccctttgggggagttacagtggcaagaggttagtcttttaatattttaatcaaatatgtgtgtaaggtaaaacagtcaatacagagcttatgttaaacctctttccccagccctgcttccctttttatcttttctgtttgttgcttacattgattttcaaaaaaattatgttcaatttagaatcttttctgtttactttctactataaaagaaaaatagttggctgggcatggtgactcatgcctgtaattccagcactttggaagtccggggcaggcagatgacgtgaggtcaggacttcaagaccagcctggccaacatggtgaaaccctgtctctactaaaaatacaaaaattagccaggtgtggtggcacatgcctgtaatcccagctactcgggaggctaaggcaggataatcacttgaatccaggaggcagaggttgcagtgagccgagattgcaccactgcactccagcctgggtgacagagtgagattccatctcaaaaaaaaaaaaaaaaaaaactgttttcccccacctttcccattccaaatatgtacttaaaactttttcttgatctatcagtttagatagtacttttttactccctaatactggatgacgttcttaactcaaacttttcttcttactccttcctctttcagtcatatcagcaatagttttatattttcaagcttaattatatatataatttttttcttctttctttttttttgagacagagtctcactctgtcacccaggctggagtgcagtggtgggatctcagcccactacagcctccatctcctgggttcaagtgattctcatgcctcagcctccctagtagctagaattacaggggtatgccaccacacccagctaatttttgtatttttagtggagacatcatttcactatgttgcccaggctggtctcgatcctctgacctcaggtgatctgcctgcctcagcctcccaaagtgctgggattataggcgtgagccaccacgcccagcctcataatttcttatgtagccattttttaagtcttctatcttttgtctgaagattgattctaaaagttgaaaacttgtatggactataaaacaatcttcgttaaaagcccagtattgtagtgggattacattttacctctaaagatccattgttgtatctcttatgccatgcaaatgagaatattcctagagccctgattaaatggaatctctgttcttgtactcccatcagttgctcaaaatttatcatgtttttctttgcttaataaatggactatcttatgtagtttttcgctttttctgggattttcaaaagtttttttttaatgaaaaagttttcttcatcatgttagcaataaaatccaactcttagtcatcctaactgtagttggtaatccagttcattacgtctttttgaagtcattgttcttagaccccacttatttcttatttggatcatatcttaggccttctgcacaactctcatcttcagatatctttttataggaatgatggttggttgcattattactggtatgtcatgccttcctctttcttggcacttatactcatttttcttttttttctttttgagatggagtctcgctttatcacccaggctgaagtgcagtagcgcagtttttgcacactgcaacttctgcttccgaggttcaaatgattctcctgcctcagcctcctgagtagctgggactacagccacaacacccggctaatttttgtatttttaatagagatggggtcttaccatgttggccgggctggtctcaaactcctgacctcaagtgatctgcccaccccggcctcccaaagtgctaggattacaggcgtgagccactgcatctggccccatgctcatttttctgaggcatatctttaagtaacttccacagaaagaggggacatgagaggtaatttttcatgtctgtggctgggcgtggtgggtcacacctgtctcaacactttgggaggctgaggcacttggggccagaagctcaagaccagcctgggcaacatagtaagaccctgtctctaaaaataaaaatgcaaaaattggcccggtgtggtggctcacacctgtaatcccagcactttgggaagccaaggcgggtggatcatctgagatcaggagtttgagagcagcctggccaacatggcaaaaccccatctctactaaaaatacagaaattagccgggtatggtggcaggtgcctgtaatcccagctacttgggaggctgaggcaggagaattgcttttgaacccaggaggcagaggttgcattgagcccagatcttgccactgcactccagcctgggcaacagagcaagactccgtctcaaaaaaaaaaaacaaactagtcaagcatggtagtacgtgcctgtagtcccagctacttgggaggctgaggtgggaggatcccttgagcccaaaagttaaaggttacagtgagctatgatcatgccactgcactccagcctcggccagaaagagaccgtgtctcaaaacaaacaaatgtaaaaaataagtccaaattttcatgcctgagaatgatttcatcttgcactttcgcttgttgatagtctggcagacatagacttttagattgaaattaatttttgaggtcttgagtatttttttactatccatttttgctaatgggaaacaatacattccacttcttttttttcttttttttttttttctgagacagtctcttgctctgtcacccaggctgaagtgcagtggtgcaatctcggctcactgaaacctctgccccccgggttcaagtgattctcctacctcagcctcctgagtagctgggattgcaggtgcgcaccaccacatccgactaatttttgtatttttaatagagatggggtttcaccatgttgaacaggctggtcttgaactcctgacctcatgatccacccgcctcggccccccaaagcgcccatttctttttttctagatgatatgttttcttctatttgaaagttcttaggatctgtcctttatccttacaaggatgtgtctaagtgtgtgtcttttattatttgtttattgtgctgagcatttgatgtggatcttttgaatctgaagggtcatttctttctcagccccaggttatatacttccatccattatcacttcgataatttctattttttatgaacctccctattgttattaagacctcctgttaattttctcctattgttttttctcaggtttcccgtctttaattttttccataagttttgagagatctgatttttaaactgtctatggatttttttttaattatgtttaatttccaagagtattttttattgcttttttatacatactgttttatggatacaaaacttgggtctctctaaagataattgtttttgtttttaaattatttgttcctttaataatttctgtttattaggaggtcagttttgttttacttgtcaggtctttttcctccagtcctctaattctcttgtctttctccatgaataggaaatctaattgggaacagggtgtttgtggctgggcttattcactgtcaggttccacttgagtgttgagtaattaaggtcctaattctgttcctggagttgtgctaagcagttggcttcttttcttctcttccattttttttcataatttgttgaaacctcctctgctactatgtcccttcccattctctttgtagtattgagttcttaatattgcttatcattttattaaaatcttggatggaagcttgtactcaggtaatgcttgggattttcttggccgggggaaaattcaggccaaccttagtggccagctacagtgttagccatgatgtgacatgggtcctatttttcagagctccctgaagagttgttttctagttttgacacactccagtgctacttcaaactggttacggtcgctgacttgggatggcaagggtactgtctgaattctgctggattcctcgtagcttcgtggtactttgttgcctacagtggtaacccaggcagcttatggcaggagatctagacttgatacctttaccatcatgccctggatattctagctatcataatttagtctgaagactagcagtgttggcatcacctggaagcttattgaaaataaagaatcctgggcttcatcccagatcgactgaatcagaatctgcattttaacaaggtccccaggtgcacattcaagtgtgaaaagcactgatctagactttggtcagctatgatttcatgagtgaacgagactattgcatgaatcagtcctgtacttggaaatcttttcctcccatctgttttgagatgtgttgccagatctgtgcttacccattgaatttttattttcaatgggcaagcacagatagaattgcataaagagtcctagtaatccatcatagatatgagaatttttgctgcacctctatgtggtttttttttcatggtggattgagggaatttggtaagcatgtgttaatgttccagttccatgggctgtcagaatgataaacttttgagtgtctctctggtgagagtgatcatctaaccaaatccctcttctgttattgcactgtgtgtctaaggtgttgtatttatgttgccaccagctacccattatcactccattctttctgggcttatatggttgaaggagaatggtcctgtatcacagtttctttgagccctttctccatccctggccaaaagcaatcttaagttatttgccactgctggttagtggttgtcctcactcacctcacttctgtccccattatatgcctttaagttgtgcaacttggccaccaaggcctcttgactagtctgggatgacagtgctattggccattaaggaaccttggatgtggagaatctttatatatctcttcccataatgtgagggtaacttttttttttttcctcctgcagggaccccacatgggaagaactaattattggtggtgatctcaacagggccactgctctggtggcttttgtgaggcatttcccatcgtgactttgtgggcttgatggagctcctgaagttatcctttttgacatctgtcttctctttgaaatttccatctctgcattagtttatgctaagttctgaataaattcctcatcattgcctgattttaattctcaaaactatatattttgtttctaggatttacaatttatttgttttcatattcttctcttctaaacttgatttatagctaccaattctaatttctttacctttttttaagtgtacgctacttttcttttttaagaagcatgttacatatactaataatttcaaagtccttttcatattgctctatcatttctgctttcttgagacaaaattatctaattctctgatatttcatatgctttgaaaatttaatttcaaaatcatcttgaatgcaggtttattgtttttgttgctttgtttttgctttccccaacttccacttctttcccatagtttggcagataattcactcgccagccccaatttgacaccaggtatcatattagtaatgcatgcctcatcctgccaagcttttacaggccccttttcttagccagtttggctcagccttgttcttggtttggagttgtctctgttctttcttgtgactctggcaagcagctccagacagtggccacggtatttttaaactttttttttttttttttttggagaagaggtgctatatgagcccccttttttaaatggaaagacagatttcagtcccctgtcttgaatggggtgttttcagtccttatttctgtaccagaatttaatttccagctgacacatcttgtttctgatcctagaccacataggacatttgaccttagccgtcactccctgttaaatgttttgcagtcataacatctttaactacttttatgtgggtggccttttgaaaatttgtattttatctatcactgttatatatttgcagttggaatggcagagaaggggatttcacatgaacttgtttcactgtcctgaacaaaagtgcttaaattactactgtaaaaatgtaacttcttggtgttgtggaggtttactgaaagaggagaaggattagtgttaggagaccagccagggttacatcaatataatcagggttaagaagaggagatgggtttaacagactaggtagctggcagagcccttatcatagtaaaggagtataggatgagctagcaggatagaagtaggatgaaatattttaccaagttttgaatgtggtgagattgagaatatttttgtgacagccagttgaagatggtaagcactggggagtgaaataaatagcagctatacagctatatcttagcatcactggtgtatgggtagttgttgaaactataggtgtgaatgaaattaggaagagtaactagagagcaggaaaaagggggctgataatggaacttggggaccatcatcatttatacgggataaggaaaaggagagaaaccagcaaaccagaatgaagaggaggcattagagaggaagcagaaagaccaaaggagaaggatgaaacaaattcattcagtgagacacttcccagatgagagaattgtgagggtgtcgggctgcagggagtcaaataagagaagggctgcgtagtgtccctttagtgtcccttggagttggttattgaagtagaagcctgcttatacgggattagagatgaagggaagagaggggcggaccatagttgagaagcaattagggaggagaggtatttgtattttgccttcaatttttgttatgctttttaggaaattgaggaatacatttgggtacagaattttgtaaagtcttatctaattttcaattttgttgcactgatttggtgtctcaagttatttttccatgaactggcctgattttcactttttacagcattttatgagtctactgttttattttactttgccatgtaacttaaacatagtttgttcttaagattatcctaaaccatttttaaagctcagtatctagaatagtaattattaagtggccaaccaaggtggtgtgaaaggaaatcactagcaatattacatatttcttcttcattttattatttattcttatcctctcagggcagactttttttaaagtcacaaacccaataagtctttcagaggctaaacaggttctccctgatgcccagcaggtgctttaagaagggtctcatgttacctggtaaattatacaaccatttttaaatgctgtgaagttttgcagttaattaagtagtatcattttataatggattatacagattaatttattttttcaaattggcacaatttggcattgtgacaataatgcacttagtgttctaaaactggtaatgcatctccttaaacacttatttccaagggcagggatagccatagacataggtggtggcttacaggctatgttaataaggagccccacggttcctgcttaactaaaaatagtacccccagtgacttgcttgtttttctcaacctaagctaaaattttactatgagtgttccttgacagattaataacacatctagttctagttgtttctgataagagattttaagcctatattttaaataacttaacaaaaatcacatagctagtggtagaactgggtgggattcaaaccttgtcaatctggctctgtcttatattcttaacagtataggatgttgtctttagctgtgttcattaactaaagataaaagtgggagcatgttctctgcttcctatcccttcaatatctttctcttctctctggtattcttttctagtatccttcttcattttctctttcttctttatacatttgtaaagtagagaaagatagcatataaatattcagtaaaatttttatagaagagttttctgaacaaaaatgaagctaaagtacaacagtgcaatcagtatttagccctgaggaagttaatacagagtaaaagagtttttttttttaactcagaaatgaaaacccagtaagattggctttatatagcatactcagaatgaagatagaaacagcaacttctttataggaaaagatggttaaagacaaaaggacaaacagccagagaaaagtcacaatgtgaggaaagaaacttttaaaagacagaaaaaaggttgagtatagattgaatgctctatgtcctatgacagttaaatatctgaaagtataaccattcatgaagattttataaatgccaatttttccttagagttgccaacaaaaagaggcagacagcaccagtgtagcatgctttactattttatttaaagttaatacttaagacatgattatcaggaagtatatggctttttagaccttaagatgaaaatctgttttttaatttttttatacctttcaaagtgttatatatagccagacccgtggaactacattgttgacattgcatattctgtaattattatatagatttatctcagtggatttcttccaaagtgtgatgcagaccactctttcactagtctttcaacaccagaaagaagtttcatcttcataaacagtcgaccagtacatcaaaaagatatcttaaaggtagtatgctttagaaaaaaaaaattatttgaattggaaatttgtcacattgtaacaaggactgcttccaagaatttgctctaaaataaaaaaaaagaaatacaatgtcatttattaaacattatgcatgatagaaagacatatgatgtctctcttattcttcctggcaattctggactgcattatcatccccatttatagtgaggaaacaaatgttcaatgtttctcttaggccacatagccaggaaattagagagttagtagttttttttgtttttgtttttgttcttttgagatggagtttcgctctccaggctggattgcaatggcgtgtcccgtgatcttggctcactgcaacctccatctcctgggtttgagcaattcgcctgcctcagcctcacaagtagctggtattacaggcacccgccactatgcccagctaattttttttgtagttttagtagagatggggtttcaccatttggccaggctggtctcgaactcctgtcctcaagtgatccgcccacctcggcctcccaaagtgctgtgattacaagccagagccaccatgccagagttttgatttgaaccctaagccttcagaacttccatgacattgtgatgtttaattattaagccagttttattgcatgtttgtacttgttttgaatgcttgtgcttcatttaggttcaaggcctccaaaggagtattacagataatgcttttcttttcttttcttttctttttttttttttgagatgcagccttgttgttttgcccatgctggaatgcagtagcatgatttcggctcactgcaacctccatctcccaggttcaagcaattctcctgcctcatcctcccaagtatctgggattacatgttcctgccactatgcccggctaatttttgtactttttagtagagatggggtttcatcatgttggccaggctggtcttgaactcctgacctcaagtgatccccccaccttggcctcccaaagtgctgggatcccaggcatgagccactgtgccgggtcatgataatgcttttcctaataagcagttgcatctactcaatttctcagttgaatttgctgggttttattgtactttttaattacatattattttttcttttatttattacatgtatttctagttaatccgacatcattacaatctgaaatgcctaaaggaatctactcgtttgtatcctgttttctttctgaaaatcgatgttcctacagctgatgttgatgtaaatttaacaccagataaaagccaagtattattacaaaataaggtaactcttttcagataattttttcttatgctatttataaacatatattactgttttcatataaaaagatttgtttatatttatcttttttattatttaaaatcttgtctattattttcataatttcccctaacatttgttaatttgtatttttaggaatctgttttaattgctcttgaaaatctgatgacgacttgttatggaccattacctagtacaaattcttatgaaaataataaaacagatgtttccgcagctgacatcgttcttagtaaaacagcagaaacagatgtgctttttaataaagtggaatcatctggaaagaattattcaaatgttgatacttcagtcattccattccaaaatgatatgcataatgatgaatctggaaaaaacactgatgattgtttaaatcaccagataagtattggtgactttggttatggtcattgtagtagtgaaatttctaacattgataaaaacactaagaatgcatttcaggacatttcaatgagtaatgtatcatgggagaactctcagacggaatatagtaaaacttgttttataagttccgttaagcacacccagtcagaaaatggcaataaagaccatatagatgagagtggggaaaatgaggaagaagcaggtcttgaaaactcttcggaaatttctgcagatgagtggagcaggggaaatatacttaaaaattcagtgggagagaatattgaacctgtgaaaattttagtgcctgaaaaaagtttaccatgtaaagtaagtaataataattatccaatccctgaacaaatgaatcttaatgaagattcatgtaacaaaaaatcaaatgtaatagataataaatctggaaaagttacagcttatgatttacttagcaatcgagtaatcaagaaacccatgtcagcaagtgctctttttgttcaagatcatcgtcctcagtttctcatagaaaatcctaagactagtttagaggatgcaacactacaaattgaagaactgtggaagacattgagtgaagaggaaaaactgaagtaagtttccagagcttgcatgtgacttgaatgttcagctatttccattctatatgactcactgtttaaaaagaatttttttcacttcttatttatggaaaagcagatcagaaaatacctttggcttggatagagtaccttttttggtaacactttttttttctgctaatttaggttttttgttggggcgggggcttgtattattttgttttttttttgtttaagccttaactgctttctgatattattaaattttttgctaaaggttttccattcatcttctcaatttcaaaccaccatttatcttctattttttttttgttttatgtttaataacttttctgttgtagaactttttaaaaaagcttttgcattggaacagttgtaactggtgtttttaatatcttaactattccctttcttaaattggtctccaaaatatgtaatacaacacaaaaaaatttgtattattggcgattcaatttagtgttgttcatttatactgtttctattcagtataacttaaggcttgcttctaagatgtattatttattataacttataaactatagtgggtatttttattacataaataggtgatttgatctgtctttgattaaaatagtatttgccatatttaaattagattttctgaataaatgttccaaaataatatgatgaatgtttttaattgacttaggacacttaatataaacacaaaatattatgttctggtgatctaatccagcagaaaatgagagtgaaattatacctccaatcatatacaggtatctgagtatctcaatattatgtcaaatgtgtggaaaaaattttaaacgtaatccatcatctggagtttatatttggtgataaactacctagatacttgaccaattttttttttcattctttccttagcttattcagtcttataaaaacaatatcaatttaaaatgataaagaccactattaacaccaaaatgaaaagcctccataaagcttttctcttcagccttttttgtcatctttttttttttttaagtgggaatggttattatattttgttcttttggaaatatccacaaaagtagacattttgaagtataaagccattaccccatttcaccaccaatcatctcatagtcagccctattagtcctgtttcatccatacttccattcactttctttccctttgtttattattctgaagcaaatcataggcatatcatctatttcagtatgtatctctaagagataaagatattcatattttaaacataaccataattgtcataacttttttaaaggtatagattccttaatatatcaaatactcagtgttcaaatttataattgtttcataaatgtcagatttttaaagatttgttttgaattatgatgcaaataaggttcacacaattgtgattgtctttagttttacctaaatgacacaactatgcagtttaaaggtgaggggacttaacttttaaatacagtaagcccacaaaagttgaattgcattgcccagggaaatgaattgagaattgtctgagaataggaaaaaaccatagatgtttcaagttctcatggaaatagggacagtgtacaagcttatgatggaaacttatcttgctgactgttcctttgcagcctcacaacagcaggtatcattccagttgctttttggggaatgtctgcattgtttctccttgtgggtcccaaggtgtcaggttactaggattatgattaataggcctcatctaaaaatccatttaccatcaattaccggaatattccaggtaatattctggaatcaagcttactttctctcacattgccataaagtagacaaaagaggctttgatggtcaagacctctgaagcttcacctggattctaatcacagttctttgttagctttgtatttaaaagtgtggacagtctctcatggattgttgtgaggattaaataagatattgtgtgttatgatacaagatcaattactaacacatagtaaatgattgctcacaatgtcaatatgatcagtttttaatctatgaaagggaatttttctgttgagaagaacatttctcatttgttgagtcaagattaaattgaatttggaggccagaaatagaaacctatgaagaaaatataggtatcttgggatcagagttctaattgtatgtcacagagtgctgtgttagaacctttcagagccagggttcctgggaccatgatcagctgagtctagttgcatcatgattagtgagaaggtagagcaaaaatgatacaacacccaagaatcgtactagctaccatttctcttcctgtctttatcttggagttctgtccatgatcctaaattctctaaggtatattaagagatatgagagtagacgcctcttctatagaccttcagtccatccttttcttccttcttctttttttcttccttttttccttttcctttcttcttctctcgattcctcctttcccttcccttctttcaactaggaaatattaagggttttctgcatataaggcctgaggtactctagctagtcacagataaaacatactttcccaactcatgaatggtgtaggctagtaaggaagattcagttaaacaagaatgtgatgagctttaagatacaagttttaaatataaggaattaggggaaaacttggcagttggacttaatattatctgtgggacaggtaatgcttccctgcatagaaattagccagaaggattttagggaattgtgtaggttggaggaacagtatatgagaaggcccagaagctagaaggaacatggtgttattaaggaaataagattctatgacaggaacagaatatgagggagtatgtgtaaagaaagttgggggaaggtgagggatggataatggaaggttctcaaagctataacaaagagtttgaataaggagtaggatcaggattgttcagttttctgatgagagcttgggacagattttggagtcagggagttactgacattgttttagttcttcctttctggagtttgtttgttgttttttgtttttttccttcctcgcctttcttctagtggattaaaatccagatttgggccatgtgccctaccactggggtctcactcagttgacgttagcttgaacttttcatttgcagtagttatgaatatattgctatttaaactaaaaaaaaattgcaactagggtattatgaaaatgataaactttataactaaatgcaatgtttagtcgcaagaacattatttgacttgacttctggtcaaatcaggattaatattttccattcaagttactaaatcccttcttgacattaagtacaacagtagcagctgcttttacttaacatttacttaatattcctttggacataactttttatatttcccaaagatgagtaccatatgtgaaaatttgcacattataattaattacaaatggggacctttgttttgaactcattttaccactgcacaggaaaaatctttaatttgaatgtctaagagctaaaaatactatttctaggacctgttgaaagtaaactattgaaaatcatgtgttttgtatagctaatccagaacctcagattctaagtagaaaataactttaaaattgtgaatatagcaaggtaagtaaccaaaggagccatttttttaatgtagtttacagtgaaataaggtctttttttaacactcttattcaggtaacatttcttcattcagcagacaggtactgagcacaaactacatgccatgctgtgatctcctgtcttttaaatctcacttttaacagcactgttctctcaataatatttttatttcttcacattccatatttttccttgagattattatatgcagataatgaaattcagttagtgtttgaagagtatgagactagaaataaccttaattctctagtcccaagtttaaaactttcttaaaaagtaatcttttagcaaagttacttaatttccaaccattactcgcccctttgttgtgagatttgtgtttcttggtagaaaataatgagagcaaaacatttatcaccacttactctgtgctaagtaatattctaagtacttggcacactttaactcattttatttctcacaacaaaactgaagtagatgtgtattatccataagttacagttgagcatgagacacagaaagattaaataattttcataggtttacagaactactaaatggcagaaccaagccaggctgtcttcagagtctgtgttattaatcaccacactttgctgaacaaattacagtagtttccaattctgggtatgtactggaatcacctatggagctctgtgacagcagctgcccaatctcaacctaggcctagagaattagaagctctgaggatgggatccaggtatcactttttaagaaaaggggtgacataaccgctgtgctaggtctttggccctggaagtttcatttttctcatattgttgacaaaaagatctcttaactttctacccagtgtaatttttttttattcttgagttcttagaatctatccagtataatttttcgaacatccattatcttctacctttgaaattgagttaaattagatggtttgggtgtgtttaatttatccaaatttgtcttttcattgatgactaaaatgagaattaaaaaaactaacaattagctaatcacatactttctgttttgtgattattgtagtgactataatttcactagcagttaccaaatgaagtattatatacaaaaaattttccttaatgttgttcaggaaattgtttattccatgttgatgttaaagcagatatataaggaatgcttcagatctggaattgatccatttctttattcatcctctctttttctgattgtttgtggccccacactttcttaaatggtttttttaactgggtaaaatttacctaatgtgaattgcagagatgttaatggtgtaatttgatgcattttcatacatgtgtacacacacataaacatcaccccaaacaaaatagagaacatctccatcatcccagaatggttcctcatgccacctctcagccagtctccacaggcagccactcttttgagttttgttacactagtttggttttgccagtacttgaacttcacatgtgtataaaatcatgtgatgtatactctttcatatctggcttcttaggctcaacaaagatatttttgtgactcatccatgttgttgaatctatgtgtagtagtttttttttttaaatcaaagaataatattcagttgtataaatataccaaaatttgtttaatcagtctccagttgatggacatttgggttgtttccagtttggggctattatgagtaaaattgtgttgtttactttccaaatatttggggcttttccggatattttatttctaatttaagtgtttcatggatagagaaaatgctaagttagatttcaatcttttgaaaagtaatgagaattaaagcccagtatatgttctgtcttgacaaatgttccatgttcacttaaaaagaatcaggattctgcagttgctagatggtagtgttccaaaatgtcagttaagtcttaagtaggtgataatattgctaaaatcttctatatctttgaggaatttttttttttttttttttttttttttttttttttttttgaggaggaggatctctagttctgtcagttactgagggaggagtatatactgttgcaactctggcttcttatgcttactatttgcatggtatatctttttttcagtcttttagactatcctcgtctttacatttaaagtgtagacaaagttcgttgttactttttaaattcagtttgataatctttgcctttgaattgcaatatttagtccatgtaatataataattgatatggttgggtttaggtctgccattttcctgttttctgtttgtcctagctctattttgttcttttgttcctcctttttggggggagaggagccctttagggttaaaagaatatatttcagtatctaattttaatttctttattgagtttccattagtttttgctttggtgattacattatgcatccttataatctacttggagttaatgtaaaaaccctgtaagtataatttcacttgtatttggtgtcactttccttaattgtgcacatatactggcaactaattctcatcttaatctgaaaacatctatttcatcttcatttttgaaggactttttttttttttttaatgatatagccaaattctgggttcttttgccactgaaaagatttcactgttggccaggcgcagtggctcatgcctgtaatcccagcactttgggaggccaaggcaggtggatcacctgaagtcagaagtttgagaccagcctggccaacatggcgaaaccccatctctactaaaaatacaaaattagccaggggtggtggtgcacccctctaatcccagctactctggaggctgaggcaggaaaatcgcttagaacctgggaggcagaggttgcagtgagctgaaatcgtgccactgcactccagcctgggagacagagagactctgtctcaaaaaaaaaaaaaaagatttcactgtcatctggctctgcattgctctttacaatatccattatttttgcggtttcctatttgtactgtttttttcctctttattttcaggattttatcttaatctttggttttcagcctattatacctacctgtaaatttatctaatatacctacctgtatattagatataaatatatctaatatacctacctgtaaatttctttgcatttattctctttggaggtttgctgaccttcttgcatctgtaagttgtatttctccaaatttgctgattatcaaccctaatttcttcacattttattttctttcccagttttccattgtttatctgggactccaatgacatatatattagattgtttgttttgccttaggtcactgcaatgcttttccagttgtcttcacttttctgtaaaaacaacacattttatcatttctattgatctgtcttgaactttactgaccctttcttttgccatcttttatctgctgttaagcctacccggtgaatatttaatttctgatattgtattttttaggtctagaacttccactgtattttttttataatttccactaatctgttgagattcccccttctattttctcattatgataatcttttaagaccttaaacatttattaaacctgtttttaagtggttttttggtaatcttgacatctgggtcatcttgaggttggcttctactgaccactttttcttttgaccatgactctcattttcctgttttgttagagtgataacttttgattgtatagcaggcattgtgggtgatatgtttaaaactctggattctgttatcttcttctgaaaagtgctgatttttgttctaccaggtatttaaattactgacagatcaccttgagcttgtagaggttttgttttatattttgttagggagaagctgtttcaattttgttcttggacccagggcaacttccttagtttaggacgtaggttttttatcctaagatgtggccctcttccagttttaactgaaagcccaaagtgttcacccggccatgaaactgtggaattcagattccaaactttgtttccctgcaatgggcagcagctgaaatctctgttcagctcatttagccttctaatggttgtttttctttgggttcccacacatggaattttctgggattttctttctcaattttcagttgttctggaagcagacagctctgtgtcctggtgactcaggctaataagagtgcaactttctgactgagttctggccaccctgctccccattaatactgaggactgccctctggttaaaagtcctataaatgtgggtctctatttttttcacccctcaaggagtgaatccattctaatttcttcctgcttttggctgttcttcagtgcctactttaaataattgagggttttttgtttgtttgtttgtgtgtttgtttgttgttgttgttttttctttttggtgtttttttttggtttttttttttttgagacagagtcttgctctgtcgcccaggctggagtgcagtggcacgatctcggctcattgcaacttctgcctcctgggttcaagcaattctcatgcctcagccttctgagtagctgggactacaagtgcacaccaacatgcctggctaacttttgtgtttttagtagagacagtgtttcgccattttggccaggctagtcttgaactgctgacctcaggtgatctgccaacctcagcctcctaaaatgctgggattacaggtgtgaaccaccactatgcccggccaataattgatttttatattttgttcagtgtttgtcatagttatatgcaggagagttagtctaatacatgttcctttgtcattactatatctggaacaccagtactttatttttataaaatttacttcagatggttaatatatttctgattatgatctcattagttctattttatttctattcttagatatgaagagaaggctactaaagacttggaacgatacaatagtcaaatgaagagagccattgaacaggagtcacaaatgtcactaaaagatggcagaaaaaagataaaacccaccagcgcatggaatttggcccagaagcacaagttaaaaacctcattatctaatcaaccaaaacttgatgaactccttcagtcccaaattgaaaaaagaaggagtcaaaatattaaaatggtacagatccccttttctatgaaaaacttaaaaataaattttaagaaacaaaacaaagttgacttagaagagaaggatgaaccttgcttgatccacaatctcaggtttcctgatgcatggctaatgacatccaaaacagaggtaatgttattaaatccatatagagtagaagaagccctgctatttaaaagacttcttgagaatcataaacttcctgcagagccactggaaaagccaattatgttaacagagaggtatgatgatacaatactttttaagagtaaaaatatttattataatagttcatactagattaaaatcgaaggtagaaggttgggaatgtttcctagtaaggattagtggtatttatttattttaatcttttaaacatttgatttctaggccgggcgcagtggctcatgcctgtaatcccagcactttgggaggccaaggtgggtggatcacgaggtcaggagtttgagaccagcctggccaacatagtgaaaccctgtctctactaaaaatacaaaagttagccgggtgtgatggcacgcacctgtagtcccagctacttgggaggctgaggcaggagaatcgcttgaacctgggaggtggaggttgcagtgagctgagacggtgccattgcactccagcctgggtaacagagcaagagtctgtctcagaaaaaaaaaaaaaaaaaaaaaaaaaaaaaaatatatatatatatatatatatatatatatatatatatatatatatatgatttctaatctttaatggaattgtttagaaatagtatcagaatactctagatagttcacttctacatttaataagtatgaagctcatttctctggtacattagtgacttctctagggtaattttgaagttagattgccatgtctttattccattatgtactcattgttttgacattttcaaacacataataaaatagaagtatacgatgcatacctttatcagtaattatccaagactttgccacatttgctttacctttctatacagtatatacacgtacattttctttccttcgcaaaattagtttagaacaattccccctcctatatctttcaatatctctctctcaaaaaatggctgttttctcaactaaacacaatacctttttcataccttaaataataataattccttggaatttttcctcattatctcaaaatacctttttttccagttttttaaaaaatttatatttaatttgtatctaaacaagatccacatactacatttggttatcttgtttatatatcttaaaaatcactctattattgtagattctgagtcatttgttcagtggaatgttctgttgtctgtatttgctttcttatgttgttcaacttctctcccctatgtttaattgggggttaattaaacatggagggctgaatagatttagattctattttctgatgaatctacttaataggttggctatatgcttcatatttcatcacatcaaaaggcactatcactaggttcaggtaatgacagcctgtctttcactggaaagtttcccatcaacctttccatgcaatggtgccaatcattgatgatttttgcctgaaataattttattattggttgtaatatagggtatttccttttcttattctatatgagcaaattgctttctgtaaaaataaataaccttggatgacaaagcctggggaaacaaaaataaaaaagattaaaaaataaataatgactaacctattaacatttcccttttttaacttaatatttctttttcagtcagacacaggtagaagagaatcatgacaaaaataataaaaacctgaagtttaaaaagataatttgttccctaggacacatcgttagataattctgtttcagaacttccaagaataaagcagaaatcatttataaaatgtgttaaaactcttgttaaagacactgccatcattggaggagaaaaaaacagggacagaacacagaaaaacatctgttaagtctgtctttttaaataaggaaacagcaaccacattaaccaaaatccagtatgtttcatagtattctcttgagattggcttaggaaactgtcagaggaacaattagaaaatagtgtcttaggctacattcaaacagtttaaacatctgatggtgcttttctctttcttacctaaaagagctagggtacatctgaatttttagacttgactgcttttctgaatggcattttgtaaacttcatttaaatttcaaaaatctttttgagctttttcaaatgataggtttttaaaaatatttttctatgtgatgttctgttcttcaaaaaacaaatacattaaaaactattattgtgggaccatattggcctgaaaaaaaaatctttcttaattgagcataaacaggaataaagattaattcaaaatagtttttcctccttcttttggaatgtggcatccccatcacagttaatgatgtaagtttttcaaaactgagtcagggactagtttatcccacaatgcgacaatgtgggcagggtaattgtaggttgggctcagttttcttgccagagttctaatgctgtttgtgtaacttacctctaagtggaataatttaggtacctataaagtaagggctcaataacaataaccttaatgatggctaatatttattgaacatttactgtatgataggaatttggcaaagttttttcatgatcttcacatcaactttatgaggtagataatatccacattttatagctgaggaaactgaaatgtaatggttaaataacttaactaggctcacacggacagtaaataagctgtatgtccaagattacaatctagacagtttaactgtggagcctgcaccattaattgctatacagtatcataatcatcaccaccaccaccatccctactgtctctcagatcgatttttaggatattggttagatgaaacagagtacatgtgatatatagccaaagctctcttctctataatattagctctcacagccattggggtcttcaaccattcagagctgataagcaaagatatcagcgtactggaacacagaacagtgccttgcatacatacctaggacaatatctgccacaaggtaggcactcaaatattcattgaaggagtggcaagatggtaactattcacatcaaccccgacagacacctttttgcaatgactataacgcgtcctgaccaagcctaaaaccaatatgtgtggttgatttgtaccctaggtgatctttggcttcctcaagtttttgcaccactcagaatcatttcatataccacctttggcaaacatgccagacctgcagtagactgaaggaagctctcccaagctctaaattgattaatttattagttcctagaagaaagagattacatgtttatctttttgttacagaagaaactttgaatagcagttgaaaatttggcagggtggaccacctaacttgacagtgtattattgtgtctgttttgaaggaataaaatggaattatttataaagttttcatttgtattagagagagccatttttaaaatttcacattcaatttgtaacattctagaagacagattatcttctttctgtatactgtgtgcagtaggtatttaataaaatattaacagaaatgtaaaacagtgatttctcatagggctacttatacctttgtattttggttaatgatgataacacttgtcaaagggccctaggattaactttttcccgtaaacccccttattttgtgtttttaataagttaaagggccataatttctttttcagtctttttaatggatctcattatttagacgttttatataaaatgacagcagatgaccaaagatacagtggatcaacttacctgtctgatcctcgtcttacagcgaatggtttcaagataaaattgataccaggtatgatagtgtggtttaatattttctgatgtggaaaaattagtcttgttccaagagttacatttgggtttcatgatttacagatatggtggtatatttttgtctcactataagtacagtgtcagctatgttaaaacatttttttcaaaacatcacctctgcctgaaacaagtaagtttggcatctctttcagtccaatgctttgcatttgcattttcataactaatcaaatagttttattgtaatttttgtcatcctttgacacaatattcaaactgcctgctttgtttaaattattaaaatactcctttaaatgataaaacacaaacatgtaggatattggaattgcctaacaaaaatggacatctttgcttttcaaaaaacatttgcttgttttgccaattagacgtgtaacatcagcagttgtactatatggagaatggatgatttggttccatggctttggtaaaagactgataaccctctttgctcagtatggaaattcattgggtggatttaaaaagaaaaaagaaaatccatctggctagagacttcagttttcctggctggccccttctctgttcctttatagtttccatactcaactgccttctgccctatcttctgttactttctcttcatctggtatcagagaggtacattggaaccatgaggaaggactccactgtctcccttcctgcctctaaacttgtcatgcccaaagtatagaaaaacagagctcgaccaaaatagtgtttgaagatttttaaaggaatgctttactgagatatgaaaataagtaaaaacaatgtacaaaagcatggagctgggtatatacagaaaatactttggtgtcccaaacataaactaattttacttgatttttgtgatttttaaggatacctaacctaagcttcttacctcctacctcaattctattagtccaaatcccagcactgccatttaaaaacaatgtgttttggggaaagtcacctggcctcactgtgtcttcattgaaaacaactaataattattgaataattattatgtacagggcactattctaagtattaaatgtattaatttaatctccctaatatccttgtaaagtaggttctattactgtccccattttacagatggaaaaattgaggcacagaagttaagtttgctcaaggggacacagttattggtaaaaccagaatttgaacctaggcaatctgcctttaaagcctagctcttaactcatttattatattgccttcctgtcaaaatttagatatttactccaggaagtattggtgagcattaaccaaagtaacaattaaatcagtgagcatggtacttggcaatgggagatgctcacatattctcttttcttaccatccattagccccctttagcaggcttgcagtcatctgttttagtcttcctagaaatatttcttgctcagggtccctggcatcttaaaatttatgtgaagtgaatttacttgaagcaagggatgggtgggggtatatgtgttttattctcaacttaatctgtttttctaattatatggcgttggtggcaggtactggtttttttcatgaaagatattaaacaggccaggcacggtggctcatgcctgtaatcctagcactttgggaggccgaggtgggtggatcacctgagatcaggggttcaagaccagcctggccaacacggcgaaatactgtctctactacaaaatacaaaaattagccgggcatgtggcaggtgcctatgatcccagctacttgggaggctgaggcaggagaatcgcttgaacccaggaggtggaggttgcagtgagccaagatcacgccactgcactctagcctgcatgaccgagtgagactccatcttaaaaaaaaaaaaaaaaagatgttaaactgcaggttgttgttgttttaaggataactgtcctttcttacctgccactcaattccaagagcatttttttttaactacccagtaagtttatatctcacagatgctttcagctcttagcttgtaagtagtatttttttaaatcttattgaatgcctaatactttccatagcatcaaagatgcaaaaatgattaagtcacctgtaaactgacttgatttgattggaattaactttacttagattatcatcagcattatttcccttgtcaataacagagcaagttaaagatatttatgttttctttcttcatttctttgtttttttatttttttaattaggttgtattttcttaacagttctgtcttgtgtgagagtattgtattttactaactttgaatcaacagtttgcctgtagtcacagtacttctttggataaggataaaaacatttgaaagagaaggaatacatctggctttgagagagaagattctcaatgtgactctaagaactttgcatgctaataggaatagctttttgtcctgcatcaataagaattccatattttaggaagtgaaaacttgtcaaaccacttactcatttgatgtattttccctgaaaattggtaagcatttcacagtattttatggaaacttttcaagggttattgttacatagttccaatgtctctaacttttccatatctgaattttacaaacacagaagttaaaatattgctcaatttccttattcgttgccaagtaccttttacccatttccactagtaattctgtgaaatgtgtatcattttccagggcaaatgtagttagtattagacttttcattctaatcatactgtaaaagatttaaaactaccaatagtgaaaaatcacttagactgatatttttggcaattttcatatctatataaatagttaaaagagatgtgaactagaatattctgctactgctttttgcctaccacacacagttttgagtttcatttacgtttcccctattgctcaaactcatttcgtttccactgttagttcgtttgtgtttctataaaggaatacctgagactgtgtaagactcaggtagacctgagactaaaagaaatgaccacaagccttccttacaaagaaaagaggtttatttggctcatggttctgcaagctgtacatgaagcatagtgccagcgtctgctttccttttacatataagttccaagtttaagtcatttctttgctctgatggtagccatgccacttcttgaatgatttgctgcttaggaacttctttcgctagatagtgaaattaaatagtgatgacctgggtcatcactcttaagttcaaacttctaccgatcctaagggcagaggtgtccaatcttttggcttccctgggacacattggaagagttgtcttgggccacacataaaatatactaacactaataatagctcatgagctttaaaaaaaaaaattgcagaaaaaatctcatgatgtttaaaaaaatttacaaatttgtgttgggctgcattcaaagttgttctgggccacatgtggcccacagaccacaggttagacaagcttgccctgcggcatggatacagtgcagccaaaatccttgcggggacataaaaaggatgacctttactccagtttccaataaattcctcaatatcatctgagactttgtgagcctttcactctgcgtatttctatcagcattttagtcacaaccatttaaccagtttctaagaagttctaaactttccctcatcttcctgtcatcttctgagctttcaaactcttccagcctctgctcttacccagctccaaaaccacttctacatcttcagttatctttatagcagtgccccactcctcagtactaattttctgtgttagtttgtttgtgttgctataaaagaatacttgagactaggtaatgtataaagaaatgaggtttatttggctcatggttctgcaagctgtacatgaagcatagtgctagcatctgcttctggtaagggtctcaggaagcttacaatcatggcagaaggcaacaaggagccagcatgtcacatggtgaaagagggagcaagagagagatgccaggctcttttaaacaaccagctgttgtgtgaactaccacagagacctcactcattaccatggggatggcaccaagccattcatgatggatctgccccatgacccaatgcacctcccactaggcccacctttaacagtagaggtcacatttcaacattagatttggaggggacacacatctaaaccatagcatctcacttcattgaactctgtatctcatcccttaatgcttgataatataatattatatattattctccagttgttctctgggaaaaatgtttaggataccatctctgtagtctaccagcattgcatctgccaaccaggtcaaggatgtagtctgtaattgggaacaggtaagggattggattattgaagtctcaggatctgaaactcttcaagttatatcacatctctttttttaaattaatccattgatagctactacttatccaagattggactgtctcttttcctttaattccaggtagcattatgtagacttcatgaaagaacactgttacaccgatacagccaaagaagacacatctttgctatgttccaaaaatatgcattctaaagccaaatctgatgctttgaaatatgtgctgttatggattatgtacccagttatacatccaatcctttagctagtttctagttttattttattttattttattttttgagatggagtcttgctctgttgcccaggctggagtgcagtggcacgatctcagctcactgcaacctgtgcctcctgggatcaagtgatcctcccatctcagcttccctagtagctgggactacaggcacgtaccaccacactcgtctaattttttttgtatttttggtagagacagggtctcaccatgttggacaggctggtctcaaactcctgatgttgtgatctgcctgcctcggcctcccaaagtgctaggattgcaggtgtgagccactatgcccagccatttagttttattttaattactaagagtaatttaagtaacagttaacatgtcagttttatttgtcctattaaaatattttgaacaaacagtattttcttctaattaataatatctccataaattactatgtgactgcttttataattcgtaagttaaaatcacagaaataattcaggcgtttagatattgaaatggtagggtagaatttgaagagcagcagttgttaaaacacttaaaccagttttattttcataaatatcatgggactccattttctctccaaagcaagaaatgatctaaacaaatttaaggaacagaacagcaataactgggattaagttaaattatataaagcacatgtggtgtcagtgagcacttatgacttaatgtgagaccctatgggaaattactatttgttctccaactaaggaacaaaactttgtcctgactgtattaaatttgaatgagggttcactaaatgttttaacagcaatttttgtttttaatggacatgttctggaatatgaacttaactatgtgtttttattttttttctttcaggagtttcaattactgaaaattacttggaaatagaaggaatggctaattgtctcccattctatggagtagcagatttaaaagaaattcttaatgctatattaaacagaaatgcaaaggaagtttatgaatgtagacctcgcaaagtgataagttatttagaggtacgcattattttatatatatgttattgtatacaggggtcccaactcccgggccaagccggttaggaaccaggccacacagcaggaggtgagcggcctcctagcgggcatcaccacctgagctctgccttctgtcagatcagtggcagcattagattctcatggaagcacaaaccctattgtgaactgtgtatgcgagggatcgaggttgtgcacttcttgtggaacaatttcctgaaaccatccccacccgccaactggaaaaactcttccacaaaaccggtccctggtgccaaaaagcttggggactgctgctgattctatatatagaggtattatagattggccagactttaagatacttatttcttaaaatagtaaattatttccaaatagtagaatattatctgtaagttttattatgtatttgcaagaagaacactattaaaaaaaaaaagaacactctattaagtttcacatcatagactgactgtggtaaactctatcatggattcttaccataacattttcttgggtacatattgaggaaagactttataaatgagatattttgcagtgaagttcttttttaaaaacatttcataaataatcccctcagaaggggtttaaactaatgctacctttatattacatacttgtctaaaaagtattgtaatataattctaagtcctgatctcatcaagaggagtagaagggaaggaaagtgaaagatgggaatctttgaataagcggaaattttcatttttgtgacagtattcaccacaaaagagaaatgtaagagtgggttaaaagaaaaggattaaggaaggttataaactttaaaatataagatagtagcaggaaaacaatagtgtttccatctatatatcttgttctagatatccctcaagattggtattatttaaaaaacaaacctgaactctaatgaagtttttctccctttttaaaaatgagccatttttgtttacagttggtagtgtgcctgctgtattctgaaggtcggacttccttaacaggaaagtctgcttgttaaaccttctgaagaatgtattcagtaatgttctgtgaatcctttaggaactttgtcatgtggaaattcccagcctattgtgcgggtagcttaacattgatagtttctagagacttcaagggaatattttcttgtgaaagagttagtatgaacttaaaggttgagggagctgtgggttggaagaaccatgtggggagaaataagagttcagaaataacaggaataaagtaaattgggactggttttaaatatttttttgctaatactttacctttcagtatgttaaggtaatagtggtataagtgttaagaaaaatgggctaggaaaaaaaaagagagaacttaaaccacggggatgcttccatttaaggtcaataagatgaatcagagagaaaggaaagtgaaaggagaaccaagagaggggtggatgtaaaagtcaaggaaggaagtaaatttaagaataagtagtatcatgttctgtatagggtaataattgctagaagactatcagatatggctactagatgacattggtaaccttgaagagaatcgtaatggcaaagtacaattgtccttgtatatactcagtggattggttccagcaccacctgtggatactaaaatccaggcatgcttaagtcctgcagtcagccctccagaacccacatatatgaaaagttggccctccgtatatatggatttcgcatcccatggtactgtattttctatcacagttggggtcggaaaaacatccatgtataagtggacccacacagttaaaaccagtgttgttcaagggtctgctgtggtaggaatagacgacatttgccagtagttaaagagtgtagtagtggaaaagtaggcagcaagtcgtatgatagtgaatagtgaaaggaaggaaagagtatgttaaacatgtctgtgttgaactggtggaagactgacaataaaaaattgcagaggaggccaggcttactggctcatgcctgtaatcccagcactttgggaggctgaggtgagtgaatcacctgagatcaggagtttgagactagcctggccaacatggtgaagtcccgtctctaccaaaaatacaaaatttagccaggtgtggtggtgcgcacctgtaatcccagctactcaggaggctgagtgaggcaggagaactgcttgaacccaggaggtggaagttggagtgagctgaggacgcacactgcactccagcctgggcgatagagctagactctgtctcaaaaaaaaaaaaaaaaaaaaaaaaattgcaggggaaatgttccccaaaaggcaagagggaagataggatatgaatttaaggtttagaaagaagaaactgaatcaagagcagaaaacagaaaaggggaaaaatgaaaataatatttttacgtaaactttaaaaaaaaatttcttaatcattagaacctgtgaaattttaggggaacttgagagaagtcatgttgatatatgtggtgaaagagtagaagttacctgctgagagtggaggggttgtgggaaggagttggtaattttagtacagtaacaaagatctgaaaataagagctgtaggtactataagagaaggttaattagagaggaataagaagatttccaggtgtcactgagggatcttaagagttaacatttgtattggatccagccaggacagttttatgactcaacgatgctcagtagaatttgtccaagggtaaatcaaaacaccaattcctcaccctgtcctagagggtgatctggcctctgcctaatttccttttcttgttcctcttttttttaacaactatgatgcacccacactgaacatttagttctttctcttctgtctgcgtgagatgcttttctttgcccatgatctttccattaaggtttcttatttattaatttttatttatttattttgagacaaggtcttgctcaaaagctggagggcagtggcatgatcacagctcactgcagtcttgaccttcaggctcaagtgatcctcctgcctcggcctcccatgtagctgggactacaggcatgccccaccgtgcccacttttttttttttttttttttttgtggagactgggtctcactgtgttgcccaggctggtctcgaactcctggcctcaagcagttctcctgccttgtctcccaaagtgttgagattacaggcctgagccactgcacccagcctggttccttatttaaattcaagcttaaagtcatctcctcaagtaatctttttccaactctacaatcactctatcatgtggcccagtttaattttacgcattatttattgactaaaatgttctgtcttttgtctgttttctgtttctctgcactagaatgtaaattgcacaagagcaagtcttgttttttggttcaccactacatcccgagagctgacaacatagttgatacttaataaatatttgttgagtgaattcataaaatgaaaataatcaagattctgtcttcctttttgccaggataacatgttttcagcttcagggtatatcatggtaaaatgtgtgactttccctttggacagggagaagcagtgcgtctatccagacaattacccatgtacttatcaaaagaggacatccaagacattatctacagaatgaagcaccagtttggaaatgaaattaaagagtgtgttcatggtcgcccattttttcatcatttaacctatcttccagaaactacatgattaaatatgtttaagaagattagttaccattgaaattggttctgtcataaaacagcatgagtctggttttaaattatctttgtattatgtgtcacatggttattttttaaatgaggattcactgacttgtttttatattgaaaaaagttccacgtattgtagaaaacgtaaataaactaatatagactattcatttgattctcaagaaccaaccatcatcataattatgagttgtaggctcaaaattggaaaataggtagtatttttgggtggttatttactaggtcctctgtgcagggagaaatcaaacatcacacatactggcatatctgacaaacagtgtcaatattttttaaagtacaatggagagtcagagtgggagaaaatgagaaaacgaagtttagaggaagaagaaaaccagaaatccttcctttaacttcaatttagggggtaacagattagatgttgctgtctctttattatatggtaattattggatttgggggtcaacttttgttggaatacatgggaagacctagatttttaacagaaaacttaggggaatttttttttttttaagactctcgctcttgtcacccaggctggagtgcaatggcacagtcttggctcactgcaacctccacttcccaggttcaagcgattctcttgcctcagcctcccgtaactgggattacagccgtccaccccacacctggctaatttttgtatttttagtagagatggggtttcaccatgttggccaggctggtctcgaactcctgacctcaggtgatccatccacctcagcctcccaaagtgctgggattacaggtatgagccgccacaccgggccattaggtgaaaattatctattgtacatatgccctttcaaaaaccaggtcccacagtgcaccaaaatacctttataaaaagttgaaacatgatttttaatgaacatatttgttgtgtaaaataagacatgttattctggatacgatgtccccacactcacaccatctcccataactctcaaagatcatctttaaattcctaagatccttgtgttaagtacaaattgtgaaacctggattctgccttttcttctgccaatatcatcctattttgcatgacccaaaatactgcttcccctgactctccatttccccttttataaatgtgaggtcctgctctgggagagctttctgggagtaatccttttaaattaactgggtaaactgagggaaga

SEQ ID NO: 24974 - DNA, 1797 bp, Homo Sapiens
gcgcagagaggggccgcagtctccgcggctgcgtcgagctcccttgcagtcccctccatgttccccggcgccactactccccttcctaaggccgccgcttaccccggggtctatggaagtaatggaaggacccctcaacctggctcatcaacagagcagacgagcagaccgtttattagctgcaggcaaatacgaagaggctatttcttgtcacaaaaaggctgcagcatatctttctgaagccatgaagctgacacagtcagagcaggctcatctttcactggaattgcaaagggatagccatatgaaacagctcctcctcatccaagagagatggaaaagggcccagcgtgaagaaagattgaaagcccagcagaacacagacaaggatgcagctgcccatcttcagacatctcacaaaccctctgcagaggatgcagagggccagagtcccctttctcagaagtacagcccttccacagagaaatgcctgcctgagattcaggggatctttgacagggatccagacacactactttatttacttcagcaaaagagtgagccagcagagccatgtattggaagcaaagccccaaaagatgataaaacaattatagaggagcaggcaaccaaaattgcagatttgaagaggcatgtggaattccttgtggctgagaatgaaagattaaggaaagaaaataaacaactaaaggctgaaaaggccagacttctaaaaggtccaatagaaaaggagctggatgtagatgctgattttgtagaaacgtcagagttatggagcttgccaccacatgcagaaactgctacagcctcctcaacctggcagaagttcgcagcaaatactgggaaagccaaggacattccaatccccaatcttcctcccttggattttccatctccagaacttcctcttatggagctctctgaggatattctgaaaggatttatgaataattaaaatggaaggccacagaaaaggggaaaagaggaaataataacagtaatcgttaatccagcaaaaagaaatgaaaagggaaaaccacatagaagggtaatcccggaaatgcttcatctggtggactgtgggagcagaggcattgccaggacttgggaaacagtcactgtgaaatgcgctgcgtatctcattcactcacttcagctaatgattccgacttggcagacgctaaactcatggaggttcggtttctcctgatacaaaccaaatggctacctggaagaatttctttcaagcaacagttatttttcttatcttcagggttaaaatgtataaaagttatgtgtaattaatctataatgccataaatgataatgcaaaacctaaataatatggtcaccggaggggctgccttatatttgaaacatgctttctatcatgcattgactgtatgcattttgttaatgcacattctgtttgtttaaggtgtgtaagatacacacccttctagatgaaactatatgtgccacactttgcactactcatgataacctcaagactatcagaagaaatatttaaatttccattttatgaagaaaggaaccaaattattatgctttttaaaacaaattaccagtttacataattaatcagggtgcattttaagttctaacttcgtttattgtataatgcatcatttgaaaataccaaggaggaaataccctttgtttttaatgatgcaagagtggacgtaatgctagttggcagtattttattgtaagaaatcaataaagtaattgtgttttaaaaaaaaaaaaaaaaaa

SEQ ID NO: 24975 - DNA, 1637 bp, Homo Sapiens
accaggcgggcactgttgcccggcgacgctccggcgctgggtccccgaggcccggcccctccccgggaggaggtgggcttcgagtcacgtgacccgtgccctacgggagggggtgcggtcggggacccggcaggaggcggccgagaagagaggaccgtgggggcgttcgcgtggctcccagcccgggaccccacccccgctggacagtgggggaaactgaggcctgagcggagtgaccaccccggctatggccagccagcctccagggagcgcgagtgctgctgacaggggccaacgctggtgttggtgaggagctggcctatcactacgcgcgtctgggctcccacctggtgctcactgcccacactgaggctctcctgcagaaggtggtagggaactgccggaagctgggcgcccccaaggtcttctacatcgcggcggacatggcctcccctgaggcgcccgagagcgtggtgcagtttgcgctggacaagctgggcgggctggactacctcgtgctgaaccacatcggcggcgccccggccggcacgcgagcccgcagcccccaggcaactcgctggctcatgcaggtaaactttgtgagctacgtgcaactgacgtcgcgggcgctgcccagcctgacggacagcaagggctccctggtggtggtgtcctcgctgctcggccgcgtgcccacgtcgttctccactccctactcggcggccaagtttgcgctggacggcttcttcggctccctgcggcgggagctggacgtgcaggacgtgaacgtggccatcaccatgtgcgtcctgggcctccgagatcgcgcctccgccgccgaggcagtcaggggagtcacgagggtcaaggcggccccggggcccaaggcagccctggccgtgatccgcggcggcgccacgcgcgcggccggcgtcttctacccgtggcgtttccgcctgctgtgcttgctccggcgctggctaccgcgcccgcgggcctggtttatccgccaggagctcaacgtcacggccgcggcagcctgagcaccggggggtgcccctccagtcccagacggcaatgttcctccctccaactgtccctggagccagaacactcacagagacacccctgagagggtggccacagcccaagatgaagtcatcaagacagaaaagcaaaaccgagaaaaacgacgggcacctggaaccagtcacggcttgggaggtgcaggtgccccgtgttaggcgcctttgtcggggacttgcaaggcctcacctgtttggccatgattgatgacgtgactgcttccattttgcagatgaggaaactaaggctcagagaggccacgccacccttgagccacccatggacccctctccatctcctgcctgcgcctttaagtccctgatttattctttccattcattccatctgggaggaacccccccaactcctgccagcttcccctagctggggtctctggtactcttcacacctgcaggggcgtctacactgttcgtctacctggtggcagggtctgagcgggaggaggagggaaagagtgtgttctgagctggacccagcctcttgttcgagaataaaaactcttcttctcttgcaaaaaaaaaaaaaaaaaa

SEQ ID NO: 24976 - DNA, 23759 bp, Homo Sapiens
tctgcagtctcagaagtggcctgttggaatggggtctgcaggcagggaagccttgggccagagtccctcaggggcaggaacacagcccccaggcttgtcccacttgtccctctgaatagttaagggctgcccacagggaacttccctccctccctcccttcctcccttccttcctgcctccctccctcccttctttccccttttcttctttcatcctcccctttcttccttccttactgtggtaaaatacacataacatgaaatttaccatctcaactatttaaacacgcacagttccatggtgttgagttcactcacatcgttgtacagccatcaccagcatccatctacaacactcttttcatcttcccagactgaaactcaacaccgttcacagctccccattcccgccttccccaggcgcccaccattctcctctctatttctacgaatttgatgactccagtccctcagatatgtggaattgtggctgggcgcggtggttcacatctgtaatcccagcactttcagaggccaaggcaggcaaatcaccttaggtcaggagttctagaacagcctggccaacatggtgaaacccagtctctactaaaaatacaaaaataagccgggcatggtggcacacatctgtggtgccagctactcaggaggctgaggcgggagaatcgcttgaacctgggaggcagaggttgcagtgagctgagatctcaccactgcactccagcctgggagagagagcgagactctgccaaaaaaaaaaaaaaaaagttaatagaatcgcatggcatttttccttgttggactggattttacttagcataaggcatcaaggctcacccacgctgtagcaggtgtcagcgtctcctccctttctagggctgagaaacattccatctagagacagactcactccgtgcagccatgacgccttggtgaacaccacggctgcttccagcttttggctatggtgagttccgttgctaggaacacagatgtgcacatgtctcttccagaccccctttcaattccttgggtgtatacacaaaagcaggattgccagctcatacggtaataatatttttatttttatttttatttttattttttgagaaggagtcttgctatgttgcccaggctggagtgcagtggtgcgattttggttcactgcaacctccacctcccaagttcaagcgattctcctgcctcagcgtcccaagtagctgggattacagactcgagccaccacgaccggctaatttttgtatttttagtggagatggaggattcaccatgttggccaggctggtctcgaacttctgacctcaagtgatccgcccgcctcggcctctgaaagtgctaggattgtaggcatgagccaccgcgcccggcctcgtacggtaattctgtgtgatgttttgaggaattgccacaattttttcctgcgcctgcaccagggacacgtctcggagctggcgaactggacttggggtgggagggaaaggaagcattaaagatgcccccagctttcacggagatgagaacggtgccccgggagggcgggacgggatcagggtcctgtgaacggggtatcagtgtaaactcctctgagagatatcaggaaaagcaggaagaagcctctgggacccttcgggaggtaactcctcttcgcagcggggcgcgctctcccagtccctgcagccgccgccgccctctcctgagcttcctcgagcggacgccaggcaagggcgggggtcgtagcggggcggagcggggctttgtccacggaccgcgcgaagaggcctcagggcccggcgcgggcgccggagggggactcgctcgcagggggaacgcgaaggttcctcagtctgcgggacgcagagctccgtggggccgcgagccggggccggggaagcgactctgcctagggggacgtcgcgggcgcggggcacagggtcctgcggggctggagggctacaggctgcggcgcgcgcgagccggaaggccggggatcgtgggttctggggccgcagcttcacgggttcgtctcccccgcctccccgggggagcaggatgtcagggggtcgcccccgcccgggagacagggtgtcaaggggcccccggggacggggcttcaggggcacccggagccgctcggccccagggcgggatgcggggacagggccccaaggtaccagggccacgaggggcgcgcgggtcccttggggatgcgcgcgaggaggcgccgtcccttcctagcaggggtccctggggacccgcggccgcctcccgcgcccctctgtcccctcccgtgttcggcctcgggaagtcggggcggcgggcggcgcgggccgggagggggcgcctcgggctcaccccgccccagggccgccgggcggaaggcggaggccgagaccagacgcggagccatggccgaggtgttgcggacgctggccggtgagtgcaggcctcggccccgggtgcccgcgagggagccgctaccgcagggaatgcggggtgcacccgacagccgggccggggtgggggcgcccagggctgcgaggcttcaggccggccgccgccccagcctccgagaccctgcgtcctggggagccggcgggcaggtgggctcggccgcgctgtgggtgcctgggacccgcagggaggatgggcgcggtggcgcggcctggcggggggctcgtctccggggtccccgggtcctggtgagagcggggtccctcgacgccgtggcggtctccagcctctcctcgcccctccacgctccccgccttccatgagctgctattttcagcacctaccgcccgaccctggactaggacaaggctctgggctgccctgcccgccccccagcccttccctcgggcacggcggccaggcgcccgggttgaccgggaacagcctccataccccaaacgcggaggcgcctcgggaaggcgaggtgggcaagttcaatgccaagcgtgacgggggaactgtgccccgggccctcaggtgatataggagttaagaagaaattattgaggcaaccagatgcggtgactcaggcctgtaaccccagcactttgggaggccgagggtggatcacctgtccttaattttcttggcgccagaagatgaattgagtatttacccagacaacaacgtcgcttcagagggagggatgcagaacgcagggccacggggcgcaggctgcaggccagtgaaccccaacgccaaaggccagggagagccgggtggggtacccagagccagcacacagccctttaatttagaggagtgctgtgtacacatctggggagagaatgttttactttgatttggaatcaggtggcggataaggcatactgaggcctgacttggtgagggctcctgccccggaggtgcagccctggaggagcgggaggcagaggagtggaaaattcatgaagaaaaccgggtatggtgtaggtcgaggccctgccctcagtaatgctcaccatttgtcagtgtttactgtgaggcagcactgtgttcaatatcgctgagttctcaggaaggaacggtaaatacttcccgggtcattctttcacccacgggaaaacaggtttggagagatctgggacagtgctctggtcccaggcaggaagggctgagtggggcctgggactcaggtctgactgcaaacacctgcctcctccctgtgctgccagcgccttccgggttcttccctgtccctcctttgtggtctttgttttcccttttttgtcttaatatgtttcaacggatgtatacaataaaccgcacataaaaggtacagctggatacatcttgacccagtcaagatgatgaacacagctgccaccccaggagtctgtcctgccccacgggttatgctgtcttagttggtctcatgtcagggagccttggaggaccagggactgggcagttggtctctatactcctggggttctggcactggctctggcccatgaccgcacccaagacaaacgtcttgaagactaagaggttaggtctttgagaaacctggcaaatgagtgcccattctcaggttacccacattctgcatgttgatttagtcatccaaccaatgttggttgaacactgatgagaacaagcaggcctgtgctagaaggtgcctgcagccaggagctggtgagctggtgtccttagggacaccaatggcgagggacccagtgtgtggaaatctgggggacaagcatgccagggagaagagctcacatggggaaggcccggctccacaaatcagtcaggcttgttggggcgggcaggagagcagggtagtggagtcagagggagtgatcccccgaaaggcaggaagaggacatgagagagccttggagatgacggtgaggatgtggttggtgggcggtgagctgggtgtcatgtgctggctccttagagaatgctcagctccttcacacccatcataatccctggaggactgagaccacgtgcaggagttttggaagctggcagtgcacccagtcccggctctcctccattctggtgggtctcaccagagattggccaagaagagatcaaactgttcctggaccaaactgagggtggggctgctatctctcgcggcccaataacgagatgcagatgaactggggagaaagagagtttttatttctgtaaccagttacaaggagaagacctggaaattatctccagaccaactcaaaattacaaagttttccagagcttatataccttctaagctatatgtctatgtgtaagtgtgcattcatctcaagacataagtaattgacttatgttaatctataactaaggtctgagtcctgaagaccttcctctggatcctcagtaaatttacttaatctaaaacccttatcttgtctcctaaatcatgggggtttgggaagttccttcagacccccagtaaacttatttgtggagtcctggggaatttcttcagatccccaataaaacttgtttaatcctaaatgggtcctgttaagaattccttcgttattttgtcatgcttgaaggcccaggaaaggtctaggcaaaactcttggtgggattttgttatattccagcctttttataagggcactggcttttaatatttaatttaaccactcagtcagtactgaaacagttgttagggaggcctgcgttagtgagacctgacctgccacaacacatcttactcggaatgctgcccataacttcaaaaaatcagctttgacggagccctactgaacacacctagcatctctcttccttcagcttagggtcaaggggctggggttgatggcaccattgaaagaaacagctttattgccgtgtcattgatatgccataaaattcacctgtttcaaatgaattatttttcagttagtttacagagttgtgaaataaattttataacttttccatccccagcccaccaaaactccctggaactcctccgcagtcattccccattcccacctggcctcagacaatcactttctgtctctccagtcttgccttttctggacagttcctatgaatggagtcctgtgttacatggtcttttgcatctgacttccttcacttagaataatgattccgagattcatgtatgttgtagtatgtatcagtatttaattcctttttattactgaataatccattgtacagatagaccacattttgtttatccattcatcagctgaaggacatttcggctgtttctgcttttttagctattttaaactgcacgcagcactgctatgaacatttgtgtacaagactttgtgtgaacatgttttcatttctcttgggttgatacccagcagaggaattgctgggtcatacaggaagtctgatttaacattttaagaaactagcaaactgttttccaaagtgactgccccattttacattcccatcagcagtgtataacggttctaattttcttttcctttttcttttcttgagacaaggttttgctctgtcacccaggctggagtgcagtggcatgatcttggctcactgcagcctcaatctcttgggctcaattggtcctcccacctcagcctcctgagtagctgggactacaggtgagtaccaccacatccagctaatttttgtatttttggtagagatggggttttgccatgttgcccaggctgttctcaaactcctgggctcaagtgatctgcccacctcggcctccccaagtcctgggattataggtgtgagccgctgcgcctggctgagggttccactgtctgtacgtctgcagcaatacataccattcttgtgggtaaaaggtggtatctcattatagttttgattgcattccccaagtaaatatgatggcaagtggcttttcttgtgctttttagccatttgtatatgtttttggtgaaatgcctgttgaaatgttttgcctttttaaaaattgagttgtctcctttgttcagttttgagagttctttacatacacagtatcatatatatatatatatatatatataccagatatatgatttgcaaatattttcaatcatcaatagtttgtcttaacacttttttattggtgttttgaagtagaaaagttttacattttgatccattccaatttattaactttttcttttattgtgtatctggtatcatatctaagaaatcttaatccagtgtcacaaagatttaatcttatattttcttctaaccgctttctagtttatgtgtaagaatctgtccattttacctaagttgcataatttgttggcaaacagttgttcatagtatttccttgaaatccttttaatctctgtaagattggaattgctgtctcctcttttagtcctgattttagttatttgtgttctctctctctctggtcaatgtagctaaagctttgtcaattctcttgatcttttcagagaactgacatttgattttttttactttatctttttctctctgttctctagttcattggtttccactctaatatttattatttccttcttctcactttgggtttaatttgttctgtcttttcttattgtagttacttacaatggaagcttacacacttgatttaagatttttttttctaatgtagacatttacagctataaatttcccttgaaacacagctttagttatatctcataaattttggtatgttgtgtttacattttcattcagctcagtgtatcttttgattttcttctttgacccattgcttatttagaattatgttgtttaatttctatgtatttataggtttcccaaatttcttttgttaatttctgatttcattcccctgtggctagagaagaaactctgtggatatcagtcctttcgaatttctcagaattgttttatggtccagcatatgattgaccttggacactgttccatgtgcacttgaggagaacgtgacttcggctcttgccaggtggagtgttctagagatgtcagttggtgtccagtgatgtcaagtcatttgtatctactgattttctttctaatttttctatccattattgagagtggggtaggattttggtgtccaattattgtttttttgttgtttttgttttgttttgttttgtttttttgaggtggagtctcactttgtcacccaggctggagtgcagtggtatgatcacagctcactgcagcccccacctcccaaggcttaggtcacctcagcctcctgagtagctgcaactacaggcaagtaccatcatgcctagctgatttttgcattttttgtagacagggttttgccatgttacttaggctggtcacgaactcctgggctcaagtgacccacccacctcggcctcccaaagtgctgggattacaagcgtgagtcaccatgcctggcccaaccgttactggtgaattgactgtttcacccttcaattctgtgagtttttgcttcatgtattgctgcgggataattaaggaatcagagagaccgatggggttgaggaggaattatttaattatttaggcgcaccgacccaatcagattaacatccaaaggaccgggccccaaacaaagagtcaagctaccttttaagcattttgtggggtggggggagatttgtgcagggggaagagtattacagaagcgagaaacaaagacagttattcagttaagacatgcattacattatttcttacttttcaaggaacaacacgttttatgactcaagattatctgtttagtgaccttgcagctgcacagctagagaaacagagtcttcgcaatgcctgggaaagggagagataaggctcactagccacagaaaaacagccagttaatttttaaaggactccagccctttctcttcctcaaggggaattggttttttacatacaactgagtttttgcttacacagtttttaatttcttttaattcctgttctagtattttggggctaggttgtcaggtatgtatatatttctgtttgttatattttcgtgatgtattcactttatatcatggcagaatgtttctctttagtaagatttttgatcttaaaaaagttggccagatggggtggctcatgcctgtaatcccagcactttgggaggccaaggcaggtggatcacctgaggtcaggagttcaagactagcctggcgaacatggtgaaaccccgtctctactgaaaatacaaaaaaattagccagccatgatggtgtgtgcctgtaatcccagctacttgggaggctgaggcacgagaattgcttgaacccgggaggctgaggttacagtcagccaagatcgtgccactgcactccaacctgggtgatagagtgagactctgtctcaaaaaaacaaaaaaattatttagtctgacgttagcatttctcctcaagctcccttacggttgtttgcatagcaaatctactatccttttgctttgacctatttgtatctttgtttctaaagtatgtatgtctctcacaggcagcatatagtcaaagcttaaaaaaaaaatccagtctaacgatctctgccttttgattggcatgttcattctattcccattcaatgttattattgctgtggttggatttccatctatcagttcacaatttgttttctatgttttatgcctttttgttcttctgttcatcttttactaccttcttttgtattaagtattttctagtgtagcatttaaattccctttttctttttaagtgtatattttaaagttattttgttagtgtttgctccagggattacaatatgcattttaatttatcaggatctacttcagattaatactaattttagtaaaatacaggaacttgactccagtataactccatttcctccctccttgcttgtggtttgtagtattattgtcgtatatgttcatctatatatgttataaactcaacaacatggtgttataattattgtttcacacaatcttatttcttttcaattcagtaagacaagtaaggagaaaaacacttttcaagtcttttatattacactgtatatttatcactgactttactcttgatttcttcctgtatattcaagttattgtctggtgacctttccttgctccagtatatataataacttcattgcctccttgctcctttatgctgttattgtcatatatattatatatgtttatgctgtgagcccatcagctaagtcagcttagcaaggtctcaagatacaaagtcaatgaataaatcaggctgggtgtggtggctcacacctgcaatcccagcactttgggaggccaagataggtagatcactcgaggccaggagtttgagagcagcctggcccacatggcaagactccatctttacaaaaatacaaaaaaaaaaaaaagttgagtgtggtggtatgcctgtaatcccacctacttgggaggctgaggcatgagaattgcttgaacccaggagggagaggttgcagtgactggagatcacaccactgcactccagactgggcaacagggcaagactcagtctaaaaaaaaaaaaaaaaagaaaaaagaaaaacaagaataaatcaattatttttctataatacttgccacaatcaattgaaccatgaaaaattttaaataccatttacagtagcatcataaaacatgaaatatttagagaataatttaccaaattaggagaaatgtctatacaattaaaactgcaatataaaccaggcaccatggctcatgcctgtaatcccagcacttgggaggtcaaggtggccagatcacttgagcccagaagtttgagaccagcctgggtgacatagtgagaccctgtctctacaaaaaaaaaaaaaaattagctgggcatggtggcatgcacctgtagcccctgctactcaggaggctgaggtgagaggatgacttgagcccagtaggcagagattgcagtgcattccagcctgggctacacagcaagaccctgacaaaaaaaaaaaaaaaagaaaaagaaggtcacaaaaaaacagaaaactgcaaaatattgatgacaaaaattaaagaagacataaataaatggagaaatataccatgctcatggattggaagacttacattgctaaactgtcacttctccccagatggatctacagagtccacataatctcacttaaaaccccagaagaaatttttgtaaagttgacagctgattctaaaattttacatagtaatcagaataggttgatattaggatagacagatagttcaatggaatagaatgcagagtttagaaatagacctacacagaaatagtcaattgattttttaatagttgctttttgataagggtgctaaggtaatgtgatagagaaaggaaagtattttcaattcaaatggctgaaatgactggatatccattgagggaagaaagggactttagcctttcacacaatacacaaaaattatggaattctgaagaaaataagagaaaatgttcatgaacttggggtaggcaaaaatttaatagatgaggcaaaaaaaaaaaaggcccaaaccataaaaatggtttcatttttataaggataaattagagtttataaaaattaacacttcccttcaaaagaaaaattaaggaaaaatgaataaataagccaccgactgagagaaaatatttgttttctaagaagtattttgtttttcattttatgggttcatagtaggtgtatatatttatggggtccctgagatattgtggttcagtcatacaatggaaaattcacatcatggagaactggtatccatcctcttgagcaattatcctttgtgttacaaacaatccaactatactcttttagttatttttattctttttttttttttttttttgagatggagtctcgctctgtcacccaggctggagtgtggtggcgccatctcaactcactgcaacctccgcctcccaggtttaagtgattctcctgcctcagttcctgagtagctgggactacaggcacccaccaccacgcccggctagtttttgtatttttaaactttttttttcttttttctttttcttcttttttttttttttgagatggagtctcgctctgtcgcccgggctggagtgcagtggtgcaatctcggctcactgcaacctccgtctcccaggttcaggagattctcctgcctcagcctcccaagtagctgggattacaggcatgcgccaccacacccagctaattttttgtatttttagtagaggcaggatttcaccgtgttggtcaggctagactcgaatgcctgacctcgtgatccacccacctcggcctcccaaagtgctggggttacgggcgtgagccaccacgcctggccttagtttttgtatttttagtagagatgaggtttcaccatgttggccaggctggtcttgaactcctgatctcaggtgatccacctgcctcggcctcccaaagtgctgagattacaggcatgagccactgtgcccgacctctcttttagttatttttaaatgtgcaattaaattattattgactatagtctccctgttatgctatcaaatactgggtcttattcattctttctatttatttgtacacattaaccatccctacataccctctcacccctgccactacccttccaagtctctgcgaaccatccttctattctctatctccatgagtttaattgtttcgatgttttgatactacagataagtgagaacatgcagtgtctgtctctctgtgcctggcgagaaaatatttgtaatatttgtatttggcaaaggacttgtatccaaaatatagaaataaattctgctcaataataaaaagagaaacaacttaatgagacccagtgtctacaaaaagtagaataattagccgggcatgttggtgcatgtctgtagtcccacctaatcaggaggctgagggggaaagatcacttaagctcaggagttcgaggttgcagcgagctgtgatcgtgccactgcactccagcctgggtgacagagtaagatcctgtctaaaaaaaataaaaatagagggccaggtgaggtggcttatgcctgtaatcccagcacattgggaggctgaggcaggtggattgcttaagcccaggagttcaagaccagcctgggcaacatggtgaaaccccatctctaccaaaaccacaaaaaatcagctagatgtggtgcatgcctatagtctcagctactcaaaaggctgaggtgggaggatcacctgagcccaggaagtcgaggctgtagtgagccatgatcatgccaccacactccagcctgggcaactggagtgggactgtgccccccaaaaatatatataagtaaataaataaataaataaataaataataaaatgagctaaagatctggacaggcttcataagaagcaagcaaatggccaataaatacatgaaaagatgatttacctccttagtcattggacacacttagataccactcctcatccactagcatggctaaaggataaaagagtgaccatcaagtgttggcaaggactgtggttctcgtacattcctggcgggaatggaaaattcagtcaccactttggaacacagtttggcagtttcttacaaagttaaacatacacttaccatatgacccatcttttccattccttggtatttactcaagggaaatgaaaacacaggtccacaaatacctgcacatgagtgtttacagaagctttgttgctagtggccccgaacagtgaaaaaaccacagtgtctgtcaataggagacagaataaatgaattgtggcggattaacaatggcgtgcttctcagaaatgaaaaagaacgaacgattgatacacgtgacaatataggtgaatcttcaaaacagcatgcggtgtgatgcggccagacataaaagagcatgtatcagaggattccgtgtatgggaaacgccagggaatcagatccatggttgtcagggtcaggagggaccttactggggtgattacatgtgtacatacattgtgtgaaactcatcaaaaccgtatacctaaagtgggcacattttattggatgtaagttatccctcaaattaaattaattttcaaagttttaaaaaatggaaccatttttgccacattgaaggaaaattatttccaccaagatttccctacagccaaacgatctaccaactacaaaaatggaaaaaataatttaggacatgtaaagttcaaatgttttgcctcccacgtttcggtttcaagaagctattcgagataaatcgctccgtggtcacaggacttagaaaggtggaggtaaacacacacaagcattataagataagaagtaacagatgaattagttgaaagggactgatttcgggggaaggaataggaactgggccaggagatagacgcctttcaggcttgcccttgtgaaaacgatagtcccctcttacctgcgggggataggttccgagatccccagtggatgtctgaaaccacagatagtaccaaaccctacagagagtatgttttctcctgtacacacatacctatgatagggtttaatttataaattaggcaccgggtgggattaacaaccataattaatagtaaaatagaacaattataacaatatactgtccgaggcgggtggatcacttgaagtcaggagatcgagaccagcctggccaacatggtgaaacctgtctctactaaaaatacaaaaaattagccaggcgtagtggtgggcgcctgtaaacccagctactcgggaggctgaggcaggagaattgcttgaacccgggaggcggaggctgtagtgagccgaaggtgcccctttgcactccagcctgggcaacgagcaaaactccatctcaaaaacaacaacaaaacaacaacaacaacaaaaacaatatactgtaataaaggttacgtgaatgtggtctctctaaaaaaaaatgtgtatatatcttagtttgtgggttttttgttgttgtagttttgtttattattaagagacagggtcttgctctgttacccaggctggagtgcagtggtgtgatcatggcttactgcagccttcacctcctaggctcaagtgatccttccacctcagcctcctgggaccagaggcatgcaccactatgcccagctaattgttttttggtttttttttcttgatagaaatgagttctcactatgttgcccaggctggtctagaactcctggcttccagcaattctgctggctcagcctcccaaagtcctgggattataggcacgagccacgatgcctgtcctcaaaatattttactgtactgtactcacctattattggcctttggttgaccatgggtaactgaaactccagcaagcgaaggtgtggataagggaactactgtacgtgactttaatatacataaaatcaccttaaagacaatgattgtttccagaacatgagcctctgagacagcagggagatactaggggaagttggtggctcctctccctggcaggaactggtctgggctcctggctcagcctggccatgaggctgtcctggcctccctcggtgggttcgacagtgacctcgacgtgctcatttcagtgtggttcattccggtctcccaggggaagggggtgctgagtggaaggaggtcaatgggaagccggggtggctctcagagtctgcaggagcagtcgggctgatgagctgggaggagcagaccgcctccctcttctctgagtgggaggagggccagatctggactgggtttggagatgctcaggtggggctcagagcatcacctgtggggcagagggaccatcttggcagatgaaggcccgtcgcagggtgtgatgcctgaattacaaggcgggacaggtaaagtggggcaggtgagagaaggagggtgagtgatgtgatttttctactcctgttttccaggaaaaccaaaatgccacgcacttcgacctatgatccttttcctaataatgcttgtcttggtcttgtttgggtaagacacatttgaccatcgaggctggcctggtttggggagaagtgaccacagcagccaatcagacccatggggccttccctgagctccccaagtatcacagttatcagggtcctaaggacagttattgcctgcgtccagctctggcggagggtgtgcttacttgctcccttattttagcctcacctgggcaacaggctcatctcactcccatttaaaattttcctaagtgtggagtctggggctgggagagcaagccccttgcccacaattgcgtggctgggggtggggaaggcaattctgggtcccaagctgttagtcgcttccagacacagaaggtcccagaaccaagagtgaagtcacctgtcacctctactggggcatctctggacacggcctggaaacactccctgacgtggcctcagggactgcactgatcaaggcactggtggcggggggtgagggagctggggctctggagctccagcaggtgcccatacgtgagcaatatcccagggaccaccctcctgcccacctcccggtgtgggacgtggcgaggcgcctgagctttgctgagaacttgccctacctgcctcgaggccttgcagcttcaccgggaactcttgtgctcacgctgctggccgcaccatgcactttttggaggaagggaccaacaggcagtcttcgttctgtgtcctgagtcttggcacacttcctttctgcagttacggggtcctaagccccagaagtctaatgccaggaagcctggaacgggggttctggtgagtgcagggaagagcaggtggagcatccatgctggccggggtgctggctgtgggcgggggtcccactctgggaactccccctccccttcctgggcccgctctctatgctctgcccagtgtagacatgctcaactctgtggccttgaagggtcacctggatacctctggagtcagccttgacctcccttctgacctccagtccccaactccaggcttacccagagttcccatgcatggtctctgctcccccatccccacccctcctccaccagccatcctcaactctccctttgctctcacccctacactgggttcccaaatcctgccagccctgctcttcagcagctcgcgtgcccactggcctccctgccttcgacgtcctgctccagggctccggtggggctgccctcatctctgtgacagcctcagacttgtctccccatccccatcagccctgtcccccttcttctcacagcagctggagtgatctttccagaacataaggtaggaggctctccatgatctgatcctgccttcctgacctccccagcctcatctctccctcctctgccctcgccctctgtgctccagccaacgtggcctgtcactcgtccacctgccatactgtcctgactccaggcctttgcctgtgctatggcctctgttgggaccactcttgtctctcccctgctgtgtctgctaattcccactcgtgtcagtgatccatggctgcagaacacaccactccatccatggaaaacaatcacaatcattgattactatctctccctgggcttcctggggtggactgggctcagctgggtggttcactttggggcctcagcagtcatgggcagacagtggctggggtcactgcaaagacttccctgcatctctggcagttgatgctggctgtcatctgagacacctacccagggcctctccctggggcctgggctcctgcttagcttggttgggaggctccaagaccaacatcccaagaaagatgagacagaagccagatcacctttttgggcctggcttcagaagtcacccagcatcacttctgctgcatttatttcttagaaacacagaatatcagaccccatctcttgatgggagggggcctcatggtttgtagacatgttctgaaactccactctgcccggccttggcttcgacgtgtctggtgaatgtgtgggctgtgaggctccccgaacgtagacctcagactgcaacgctggccgttacagggtctggcacacgggcccacgtcaggcccatcgccacagtgatggttgttctgtgactgtttctggtggcctctgctccacactccaggctgacgctgtgccccttccactgggaccctcgggtggcttccatgcacttgtgccctaaatcctgctcctagactaaacttcatctcctgtgttctcattctgcagcatggctgttagggaacctgaccatctgcagcgcgtctcgttgccaaggtataatgtcagtgcctcccttcagtggctcccatgtcacagaattgtcctgcagccctggcacatgtgtgcgtgtggacagaagcatgtgggagctggggcaggtcctctttcctcctgtggctccgagggagggggccgctccttccccagtctctaccctgacttggccctcgtcctgcagccactcagagagcacgatggagctggagcttcagttttgaccaaatgcgtgtcgccggcttttgtgtgtgtgtgtgtgtgatggagtctcgctctgtcgcccaggctggagtgcattggcaccatctctgcccactgcaacctctgcctcctgggctcaagtgattctcctgcctcagcctcctgagtagctgggattacaggcgcccaccaccacacctggctaatttttgtatttttagcagagacagcgtttcaccatgttggccaggctagtcttgaactcctgacttcaaatgatccgcccgcctcagcctcccaaagtgctgggattacaggcatgagccccggcacctggccttcaaattggcttttaaagaagatgaccagctggtctgttctgtctggggccttggagggctgtttcccaggatgtgggcctttatcagtgctgacctaggcaatcaaggccaagctggccacactgcttttgattttttttaaattgtgatgaaatacgcttaacataaaatttgccatcttagtcattttggagtgttcagtagctttaagtccattcacattgctgtgcagccatcaccaccatccatctccagaactcttttcatcttgccaacctgaagctctgtccccataaaatagcaactccattttccctcccccagctcaccattccatggtctgttgttatgagtctgctactccaactaccttttataagtggagtcaatggtacctgtgtttttatgtcgggctcaaatcactgagcgtgatgtcctcacggtccatccaggttgtaccaagtgtcagaatttccttcctgttttctgctgactccctgcttttaaaggccatcttggacattcaaattgtggccattactgacagttaaaatggccccggctcatgtctcctgagcctctacaatcctttaggtggggacagtactgcggcccacacgtccccacaggctgcgtgtgacacctgacagtgctttgtgccactgtggagcaggtgtcactctcccacttctcagagaggaagccgggctctggaagccagcagcccacaaggaggcccagcaggcttcgggcccaggtggggaggtctgcacatctcagggcctttccctgggaacaaccagggacagaggccacacacccagcctcctctctgcccacagtgaattgagacacaaccccttacgtccctcccagccttaagtcaagtggaaagcaatggcccctgaggtcacttagtccctcttgccagtttgtaagtgctgaatcagagactctgagctttggccctttcccgagttcccgggattatgagctgacacagcccccaagcaaccacagtgattccagcctgggagtgtggccttggcgggagggtcaatgcccagtcatggttcagcggctgtgcacaccccctgcttacctgcatcccacgctttccatgcaaactcacgtggcggcgctttgtgcttgcaggatggtctacccccagccaaaggtgctgacaccgtggtgagtaaagttactgacactgaaactgaacgcagctcaaggggctgttctgaaggtattagagggcggtttccttgatgtaaatctcagttggggctgcttccccgttctctcctctcagattctcctgacatctgaattcagaggcccacatggctgtcctctttccctttgctttctctgacttgcgtctcttgtttcctgtccctttgttctccaaagcccctgcaaaggcctgataggtacctcctacctggggaggggcagcgggggttgggtgctggggagggtttgttcctatctctttgccagcaaagctcagcttgctgtgtgttcccgcaggtccaatgttgagggagggctgggaatgatttgcccggttggagtcgcatttgcctctggttggtttcccggggaagggcggctgcctctggaagggtggtcagaggaggcagaagctgagtggagtttccaggtgggggcggccgtgtgccagaggcgcatgtgggtggcaccctgccagctccatgtgaccgcacgcctctctccatgtgcagtaggaaggatgtcctcgtggtgaccccttggctggctcccattgtctgggagggcacattcaacatcgacatcctcaacgagcagttcaggctccagaacaccaccattgggttaactgtgtttgccatcaagaagtaagtcagtgaggtggccgagggtagagacccaggcagtggcgagtgactgtggacattgaggtctctccttgtgttcaagacagagtggggtggcggccagccttgtcctcccagagggtagatgggaaaggtcattcatgcagcatcttactgagctcatgtgggctcgtgggctcgtgggctcgccaggtcggtaaaacccagctccttctccagaggctgcgtctcacccagggatggtggcttctgctgccccctcctctctgtaactgtggccggccgtcatgctgagccaccccctcaatacaaggctccagatgtttcctgctcactgaccagagatagcaggagggggacacctgtttgctgtccttggaccctagaaagaggatgctggcagagccgtggtcacttctctgtcagatgtaggtggggcaggcaaagcagttggccccagacaccaaaggaagtggctgacccacaaggccctgggactctgggccaggccagagagggagctagccaggcaaccgcagacacatacttgacttctcggcagctgtgggcagctgggccagcgacagtggcggaggccaggaatgacttactcttaggaataggtgcagttcaagcctggagggaggaagctctagggtgcagaggcgggtgtgtggaggcctcgcgtgcagcttataatgagggagcacgtggccggcctggccataagaggggcagctgcgtggggaggcgtggctcaggccaggctgagggggagtgagcggacgccagcctgcggcctgctaccagcctccagccacctgccctcagccctccttagtaagagggggtgctggtggtcccccatcgctgggaagaggatgaagtgaatcgcagcccgaggactcgctcaggacagggcaggagaacgtggtgcatctgctgctctaagccttccaatggccgctggcgggcgggtgcaggacgggcctcctgcagcccaggggtgcacggccggcggctcccccagcccccgtccgcctgccttgcagatacgtggctttcctgaagctgttcctggagacggcggagaagcacttcatggtgggccaccgtgtccactactatgtcttcaccgaccagccggccgcggtgccccgcgtgacgctggggaccggtcggcagctgtcagtgctggaggtgcgcgcctacaagcgctggcaggacgtgtccatgcgccgcatggagatgatcagtgacttctgcgagcggcgcttcctcagcgaggtggattacctggtgtgcgtggacgtggacatggagttccgcgaccacgtgggcgtggagatcctgactccgctgttcggcaccctgcaccccggcttctacggaagcagccgggaggccttcacctacgagcgccggccccagtcccaggcctacatccccaaggacgagggcgatttctactacctgggggggttcttcggggggtcggtgcaagaggtgcagcggctcaccagggcctgccaccaggccatgatggtcgaccaggccaacggcatcgaggccgtgtggcacgacgagagccacctgaacaagtacctgctgcgccacaaacccaccaaggtgctctcccccgagtacttgtgggaccagcagctgctgggctggcccgccgtcctgaggaagctgaggttcactgcggtgcccaagaaccaccaggcggtccggaacccgtgagcggctgccaggggctctgggagggctgccggcagccccgtccccctcccgcccttggttttagcagaacgggtaaactctgtttcctttgtccgtcctgttgtgagtaactgaagcctaggccccgtccccacctcaaatcacacacaccccctccccaccacagagacaccattacatacacagacacacacagaaagacacacacagacacaaaatcacacacacaccctccccgccacagagacaccattacatacacagacacacacagaaagacacagacacaaaatcacacacacaccctccccgccacagagacacaccattacatacacagacacgcaatcgcagatacgcccttccggccacagaaacacaccattacacacacatacacagaaagacacacacagacacacaatcacacgcagcccctccccgccacagagacacaccattacatacacagacacacacagaaagacacacacagacacaaaatcacatacacatcctccccgccacagagacacaccattacatacacagacacacacagacacacaatcacacacagcccctccccgccacagagacacaccattacatacacagacacacacagacacacaatcacagataccccctcccggccatagagacacaccgttacacacacatacacagaaagacacacacagcccctccccgccacagagacacaccattacatacacagacacacacacacacacaatcacacacacaccccccgccacagagacacaccgttacatacacagacatacacacacacacagacacacaccagacacgcaaagacacacagacacagatacacagatacaaagacacagacatatagacacacagacatgcacagagacacatggagacacatgcaaaaatgcacagagaaagacatacagaagtgtacacacagacacatagaccacacagacacacagacatgcatgcaaacacacagacatgcagacatgcacacaaacacagactcacgcacacagacttaggcagcccaaattcagcgcctggggcataagttcctggaggggtggccaccttcagcccccacggtaaggtcctgaggaaccttccccttagacaagggatcatggaggaggtctcttccggagcctggagggaggcctcaagtggtccttccacctcggcatcccaaagtgctaggattataagcatgagccactgcacctggccccaacatcatttattgaacagactgtcgtttccacattgtgtttcttggcatttctgtcaaaaatcagttgaccgtaaatgcatggattcacttccgggctctctattctgtttcattggtctgtttgtttttatgccaataccatgatgttttgattattatagctttatagtatatcttgaagttaggtagtgtattgtctccagctttgttctttttgcttaagattgctttggctatttaggggtctttgtggccattactgacagttaaaatggccctggctcatgtctcctgggcctctacagtactttaggtggggaagtactgtggcccacatgtcccaacaggctgtgtgtggcacctgacagtgctttgtgccactgtggagcaggtgttactccctcatacgaattttaggattattttatttatttcagtgaaaaatgtcaatgaaattttgatagggattgcattgaatctgtagattgtt

SEQ ID NO: 24977 - DNA, 82374 bp, Homo Sapiens
agttagaagtcgactgccagtagggctcgcgcagaatcggagagccggtggcgtcgcaggtcgggaggacgagcaccgagtcgagggctcgctcgtctgggccgcccgagagtcttaatcgcgggcgcttgggccgccatcttagatggcgggagtaagaggaaaacgattgtgaggcgggaacggctttctgctgccttttttgggccccgaaaagggtcagctggccgggctttggggcgcgtgccctgaggcgcggagcgcgtttgctacgatgcgggggctgctcggggctccgtcccctgggctggggacgcgccgaatgtgaccgcctcccgctccctcacccgccgcggggaggaggagcgggcgagaagctgccgccgaacgacaggacgttggggcggcctggctccctcaggtaggtggcaggaccgggtcgtggatgccgggggagccgggcggcggggctgagggatcggcttccagggcgaccgggcctgggtggcgctgatggagcggcctcgcggctgccgggcagagggcttgggccaggccgctgtcaccccggggtagcgttgggcgggggccccggagtccggtgtcatggccggcgagccgagttcccacatcccactcaaatttccttgtgtttggcggaaacgtgccaacgccacccttatgccatgcgcattcctcatatttggcagtgggaaaatccgcccagagctgccccatatctgttgtcacttggatgggccaattccttttctcttgggccgccgaatgtgggacccgggcttgcaccctttctcagggtacttcagtcaagtgacacacttttagagacgacgtgaggaatcgggtaagagaggaggaaactggccagtgccctaccacaaaggcacaggggcctcttcttgggtatcaggactagccttgggtatcaggactctgggttattaatgaaaggtttgggatacttatagaggattggcctcaggacgctttggaatgaagagccagggctgtcttttgtgtgacgcgagagccgccgggacgcttcagctctgcagctgctgaggctctgcgagcgagtcgatgcccaagagagaggggtttggacgtcgtgagaggcgaggcggccgtgttcattcattgttctcgttctagggctctgggtgtgcccctggtattcattctgtggtgggaagaaggaatggaacttagtgtatccttgagatgtgaacgggttctagggggtcacttaatctaagtggaaaatgaattcaaggcacgttcattgagcgtttctgcttgcctggtcctctgtgggctgagtggagagactctgccctccctgcgctcctaaggcgtgaaaacaatgcagtgtgataagaattggcttatcaagtgttatggggatttagaacagttagttttgcttggggaggagttgaggaagcttctacactcgaggagacttctgagtcgagttttgaaacacctgtgagtaagtgctcatcgggtgaggaggagctcagggaacagctggtacaaaggcttagagccatgtgggagttgggatgagtttggggagcagcaaattgcctggggtgcaggaaggaaatggtgagagatgagagtaaaataaaagttgctagaattgtgagggggctgtctttgttgtagatagtgaactagttgaatttggattattgtacatgggttgccgagtcttcattcttgctgataattttctccctttgttgatgttgaagctgatagtgattgaacatatttagtttaacttagttaatgacttttaaatttttttttattttttcagaacaatgcaaacttttttttttttttttttttttttttttttttttaaaggaacaggatctcactctgtcgcccaggctagagtgcagtggcatgatcatagctcggttgcagcctctaactcctgggcttaagcagttctcctgcctttgcctcctgagtagctgggactacagacaggtgccaccacacatggctaattaaaaaaaaaatagtagagatggagtctggcagtgttgcctaggctggtctcaaactcctgggctcaggcgatcctcctgcttccacctctccctcccaacgtgcttgctgggattacaggggtgagccactggccaggcagaactttttttttttttaaataatagagagggggtcacactatgttggccaggctggtcttgaactcttgggctcaagtgatcctccagcttcagcctcttaaagtgctgaaattacaggtgtgatccactgtgcctggctagcagaacatttttgataagtgttttatatcaaatgttttgacttacacagtggtgaatgaattgaactcatatattcctggggattcttgcaaaaaattctcttaaagttatacttgctcacaaaaatgttaactttataaatgtagaacactctcctactaatttttattttattattctattgttttttatttttttgcgacggagtctcactctgttgcccaggctggcgtgcaatgatgcgatctcggctcactgcaacctctgcctccttggttcaagcagttctcctgcctcaccctcctgagtagctgggtaggcacactccaccacgcccggctgatttttgtatttttagtagagatggggttttgtcgtgttggccaggctggtctcgaactcctgaccgcaagagatctgcccacctcggcctcccacggcctcgctgggattacaggcatgagccactgtgcctggcctaaattttaaatataagtaatgtactccccagtcttacagaaattggacgactatagaaaacaaacatcaaaaaaagtgtagaatgtgagtatttttagtttaataagtgtattttataaactatttatttgtattgacttctcggataacaacctgttataaaatctttatccccataaacataattttcctaaaatagctataatattgtgattaatgtttatgctaaagtgactattatggaattaacagacttcagttgcagtttctaaatcttgctttggttgtgatgattatataccactgaagaacattcaggattattttggcttgtttttacccttatcactcaagggctaagctgtttaaaatgcaacataaacatttgacccagttgaatgctgggatacttggaaaaataaacctgttactgtttctgtactaaaggcttatcttttaaagatatgtggtgtttttttagcgcagtggtgcgatcttggctcactgcgacctctgcctcctgggtttaagcattctcctgcctcagcctcctgagtagctgggactacaggcgcctgccaccacgcctagccaacttttatgtttttagtagagacgggatttcaccatattagccaggctggtcttgaactcctgaccttgtgatctacccgccttggccttgcaaagtgctgggattacaggcgtgagccactgtgcctggctgatatgtggtgttttgtgattataaattgtagtggagttccttagttttgttaaagtcttgtcagtagttgtaaaaacatcagccagttgtggtggctcaggcctgtaagcccagcactttgggaggccgaggctggtgaattgctagagctcaggagtttgagaccagcctgggcaacatggtgaaaacctgtccctacaaaaaatacacacacacaaaaagaaaaaaatcagcagggtatggtgtagtatgcctgtagtcccagctgcttgggaggctgaggtgaaaggctcacctgagcccagggagattgaggctgcagtgagccatgttcatgccactgtactccagtgttggtgatggagtgagaccctgtctcaaaaaaaaaaagtgtgccttcaatagaaggcttgaacgtattttatgggatttggtttagctgaaaaaaacagtgagaagcagattaagctggtaatttctgacaaaaagtatctaaaagatgaagtgaagaatgttaaacatcaagtattatattacagttgctcttagactagtagcttttagtttataacatgtcatttgtttgctctgaagattaagcaagttcatacttcttggaagttaaatttgacttttccagaagcactggattatttacgaaataaaaaatataattgataactttaaactactatttcaggtagtctattactagtaaatgtatgattctacatttaaatttcaggtaaatctttgttagtaacctactgcctaaaaaaatgttacatgagggagtacttttgtttgcatgttaggatcataataggccatacataataatcttgagcttgggaggagcttgttagccaaacagcatgccttaatgttgacttgcagaagacaattttaaatattgcctttgaaaggcagtggataatgtgacagtgagggggtttatgaaaccataaaattgagctttttgacttagtttttgtttttaagttgttcagatcttgggagtcatttcttcaaaacaaatgactatgaggtggaaaattacttaccttgaataaattaattggaaaatcagagaacactgggtttatttaggatgaggttgtttggtatgtgtatgggagggtagaattcctaattgctcatctgactgggttcaaaatgtaatactagatatttgtgttgcaattcagttggtacttttggtatagggctaacttatcttgcgtgtaattttttttttttttttttgagatgaaatctggtgctgttgcccaggctggagtgcagtggtgtgatcttggctcactacaacctccgtctcccaggttcaagggattctcatgcctcagcctcccgagtagctgggattacaggcgccggccaccttgcctggctaatttttgtatttttagtagagacgaggtttcaccatgttggccaggctggtcttgaactcctgacctcaagtgatccacctgcctcggcttcccaaagtgctggcattacaggctcgctcaggcatcttgccttgtaattctcatgatagtaatggctatttttttcttgccttagagttgtaagtaaaaattccttaattacacattaaggtttgatctttaattttacaatgtttgagtcattttgttacttcttttctcccagaatgacttgcgtagctctaaatgattttagttaatttcacatctgtttgcctttcttctaaaatgacccctagaatctcagcttaactaaggaaaatgtcaagtgggtgttgtttctttgttagtggttttggcctagactatctaaagtttggcaaattactcacaaagtatgttaattggcatcacattccaatcagtgtacatagcattttttgaggaacacttgacacacggttttatttttagaccagattctaaggggttttactgggtggggcttaacaatcctaaagctagtttacggttttaaaatctttatgatttagaggttgtttacattttttgttaataaatgggaagcagcaggcagtggcagtcaattttgtttgtttctttttttgttttttttgagacggagtttcgttcttgttgcccaggctggagtgcagtggcatgatctttcctcaccacagcctctgcctcctgggttcaagcgattctcctgcctcagcctcctgagtagctgggattacaggcatgcgccaccacacctggctaattttgtatttttagtagagacagggtttcactgtgttggtcatgctggtcttgaactccctaactcaggtgatctgcctgcctcagcctcccaaagtgctgggattacaggcgtgagccaccacgcccagccctcacataacttttatgatattatgttcttataattgttccattattaattataattaatctctcactgtgcctaatttatatgttaaacttgatcatgggtatgtatgtacaggaaaaaacatagtgtatacagtatagtatactgttcttgctttcaggcattcattggtagtcttggaacatattccaagtggatatggaagcactactatgtgatggaatgttactcagtaataaaaagaaaggatgtactggtgtatactacaacattggaaacatattaagtaaaagaaaccatgcaggaaagaccacatattgaattattccatttatatgtaatgtccagaataggaaaatccttagtgacagaaagtagatcaggggctgagggatgtagggaatggtcagtgactgtgatagggtttttttttgttttgttttgttttgttttgttttttttttgggtgataaaagtgttctacaattatggagatggatccacaactgtgaatataataaaagccattttattgtgtacttttttttttttgagatgttttgctcttgttgcccaggctggagtgcagtggtgcacaatctcagctcaccgcaacctctgccttgggttcaagcgattctcctgcctcagcctcctgagtagctggggttacaggcatgcaccaccatgcccgactaattttgtatttttagtagagatggggtttctccatgatagtgagactggtctcgaactcccgacctcaggtaatctgcccacctcggcctcccaaagtgctgggatttacaggtgtgagccactgcgcctggcccctgcctggaaattcttaagaattaaatattattttctttgagtaagtaataatgtcagatgtcacaaaatttaaaggatatagaaagttatgttgtgcatagttattctacgttctcctttgttctctagctacccagcttcctttcacagagggaaatgtgaattcttatgtatcctattttgtgacgacacaaaaatatttaagggtagatgtgctggccttactttcttgctcaaatcttccaggctctccctggctaccagactaagtatatacaattcttgcttctgtgtcttgctcacatggctttctcatagtaatagtatgtttagtggaaatcaaaagccagtatttttaggcccctgtaggtgcaggccagtgcacttggtgcagcataaggcaagttcctaccttcaaggaccttatctaattgagagaggctgacatttccttacttttatctattcctcttttttttttttttccccgagatggagtttcactcttatcacaaaggctggcgtacagtggcgtgatgttggttcactgcaacctctgtctcccgggttcaagtgattctcctgtctcagcttcccaagtagcagggattacaggcatctgccaccacgcccggctaaattttgtatttttagtagagatggggtttcatgatgttggccagactggtcttgaactcctgactgcagatgatccacctgtctcagcctcccagaatgctgggattacaggtgtgagccaccgcagtggccaagttgaatttcttgtatagatgtcttatgtctcagtttaaaaatgaggcatgtcttactcttgcctatatatttccagtggggcatgtcttatccttttttatatatctccagttctcaaaaccttgtcttacacagcaaacattaatcagaggttaatcacttatggatttagtttcactctactgccatctctccaaaatgcttacagtaaagaggctacacttactaaattcaaacttagaactttgtaacttaggacctgtctgttggaggaggtaagttgcttaagcttctccctctattgggcattatatgtagagtgctctaggttctgcctgctagctccttgatgacatttgcctgctttagcaggacactgactcttcagctcaagcagctgttaccatgctggctatttccttttgcattcataggttttagatatggaagaaagttatacccagagagaatggggggataaatgataatcttctaccatttttgaccttagtctggtccagcattatagtgtgattttgagaggagagattgtgatttccctggctagtattatctagtattgcctgacaatgcaaaatggacccctaggctgtcttatgtaagttggaagggggcggattgggggtggggtgtgtgtgtgtgtatctacaatccagtgacatttaacaacattcacaatgtcttaaaaccatcgccactactcgtttccagaacctttttgttacctcaaacagaaacagtactcattaagcaagaactcctcattcctccctatgcccagttcctcgtaacccctattctactttctctctatgaatttgcctattccaggtacctcatgtaaggggagtcatacactatctggccttttttgtctggcttattttacttagcacatttttgaggtttatccatgtggtggtggcatgtatctgtattttattcctttttatggctgaataatatttcattgtatgaatatatcattttgtttatctcctcatcagtgatggacacttggattatttccaccttttggttgttgtaaataatgctgcagtgaacattggtgtacaaatatctgttggagcccctgctttcagtgccttagggtaatgcacaggagtagaattactggatcatatggtaattctgtgtttactttttgaggaactgccaaactgttttgcacagtgactgcaccattttacatttcccaccagcaaagcacaagggttccagttttgccacatcttttccaacacttgttattttttcttttttaatttttaaagtaacaatcttgggctgggcacggtggctcatgcctgtaatcccagcactttgggaggccgaggcgggcggatcacctgaggtcaggagttcgagaccagcctggccaacatggtgaaaccccgtctctactaaaagtacaaaaaaaattcgctgggcttgttggcgcatgcctgtaatcccagctacttgggaggttgaggcaggagaatcgcttgaactcgggaggcagaggttgcagtgagctgagattgcgccattgcactccacaagagtgagacttcgtctcaaaaaataaataaataaaataacaaccctaatgactgtgaagtggttgtaggctttttgcattttaaaaaattattatttttactattttagagatggcggggggggggtctcactatgtttaccaggttggtctcgaactcctggcctccattgatcctcccattttagcctcctaaagtactgggattacaggcttgagccactgcgcccagccctccttttcttcttattgctacttagatgtaatgggcaaaccagaacctttgaatttggctatatttggatctgatgggttttttcctccctcttaaacttgtgtataatgttgttcaaagggatacattatgtacacaattaatgacatctttttaaaaagaacactttctttcatccttgtgaggtgtaagaagaaaaataagcaaaaaaaaaaatgaataaagtttttctataagttgatacacacagttgtagttactttatactcataccctttttttgtgttgtgagtgacacagtctcactccattgcccaggctggagtgcagtggtgcgatctccactcaccgtagccttgacctcccaggcacaagccatcttccctcctgaacctgctgagtagctgggactacaggtgtgtgccaccacactcagctaatttttgtattttttgtagagatggggttttgccatgttgcccaggctgatgtcgaagtgctgagctcaagtgattctcccgccttggcctcccaaaatgctgggattataggcatgagccactgtgcctggcctctcatacttttttattctataatgtatttagggccagcctctgtggctcatgcctataatcccagcactttgggaggccaaggagggaggattgcttgaggccaggagttcaaaaccagcctgggcatcatagtgagaccccatctctaaaaccaaaaaaactagtcaggcatgtggtatgcgcctgtagtcccagctacttggtaggctgaggagagaggattgtttgagtccaggaattggaggctgcaataagctatgattgtgccatggtgctctagcctgggcaacagaacaagatgctgtctcttgaaaaaaaaaaaaaagaaaaagaaaagatgaatagtctgtctgaaatggccggcagtcgcagctgctgacctgacctgcatctactgtataagtcaagtagttcaactttttattataatgtcatggcttttctttgcttcttgggagcgcttccagcatcactagtggtacttcatatgggacccatgctgttattcaaagtttatggtattgtactgtacatgatgaaaaatacagaagacccatgagagatgacttttttttttttgagacatagtcttgctctgtcgcccaggctggagtgcaatggcatgatctcagctctcctctgcctcctgggttcaagtgattctcctgcctcagcctccctagtagctgggattgcaggcactcgctaccacaaccggctaatgtttatatttttagtagagacagggtttcatcatgttggccaggctggtctcgaactcctgacctcaagtaatccaccagctcggcctcccaaagtgctaagatgacaggaatgagccaatgtgcccagccaagagatatcactttttactgcaataggaaatgtactggagagaccaactgctcagagggacacaaggccttttaagtggacacatgcaacttgtaacacttgagttcactgcaatagaaagaagaggtggctatgaaattactgtagtaatatagtttgtacaacaggtttgttttcttttgaggcaaagtctcactctgtcacccaggctggagtgcagtagcaagatctcagctcactgcaacctctgcctctcaggttcaagcgattctcctgcctcagtctcccaagtagctaggattacaggcctgtgccactatgcccagctaatttttgtatttttagtagagatggggtttcaccctgttgcccagggtggtctcaaactcctggcctcaagcgatctacccgcatcatcctcccaaagtgctgggcttataggcatgagctaccgcacccagccaacatcatttaattttatgcagttatttatttatttaattaaaaaaattttttttttttgagatggagtctcactgtcttgcccaggctggagtgcagtggcttaatcttggctcactgtactcactgcaacctctgtctcccaggttcaagtgattctcctgcctcagtctcctgagtagctgtataacacctggctaattttttgtatttttagtagagacagggtttcaccatgttggacaggctggtctcaacctcctgacctcaagtgatccacccgcctctgcctccccaagtgctgggattacagatgtgagccactgcacctggcttcagttatttaatatgctgcagttatttaatatactgcatcttaacatttgtttacatttctctcaagtgtgaatgtgtgtctgtgcaaatggtgttatgtatggtctgtaagtatatgcataagttttgattttttttttctttgagaccgagtctagctttgtcgcccaggctggagtgcagtggtgcgaacttggctcactgcagcccctgcctcctgggttcaagtgattctcttgcctcagcctcccgagtagctgggattacaggcaccggccaccatgcccagttaatttttgtatttttagtagagacggggcttcactgtgttggccaggctggtctcaaactcctgaccttatgatccgcccatctcggcctcccaaagttctgggattacaggtgtgagtcactacgcctggcctatttttatttattattgtttttttgagatggagtcttgctctgtctcccaggttggagtgcagtggcatgatgttggcttactgcagactctgcctcctgggttcaagcgattctcctgcctcagcctcccgagtagctgggattacaggtactcatcaccctgcccagctaattttttatatcatttatttatttatttatttatttatttatttatttatttattttagagatggagtttcgctcttgttgcccaggctagagtgcagtggcgcgatctcggctcaccacaacctccacctcctgggttcaagcagttctcctgactcagcctcccgagtagctgagaccacaggcatgcgccaccacacctggctaattttgtatttttagtagagacgggttttcaccatgttggccaggctggtctcaacctcctgacctcaagtgatttgcccgccttggcctcccaaaatgctgagattacaggcatgagccatcgtgcccagctcatatttttaatttgtttccctccctctttgaacatgtattctgtgatcaattcgtgtatctttttttttttttgagaccaagtctcgctctattgcccaggctagggtgcagtggtgcgatctcggctcacggcaaccgatctcagctcactgcaacccccgcctcccgggttccagcgattctcgtgcctcagcctcccgagtagctgggactatgggcatgagccaccacgcctggctaattttttttgtattagtagagacagtgtttcaccatgttggccaggctggtctcgaactctggacctcaggtgatccaccctcctcggcctcccaaagtgctgggattactggcatgagccaccacacccagcccaatttgtgtatcttaaaaaattattgggaaaagaaattattgcaaaaaatctatatatattggtatgagattataagcatgtagggaaacactgaagaataattggttattgggagaaggaaaggaaagataaaacaaagaaggggttaaaagatcccctctaatacatgtaatgtttaagtgctatagaaaaaaagcagggtaaacattttagaagtaaaaaggcttgctatttataatgagtgcctttgtaaagacattaattgtgaatatttaaaataaaaggaaacaaagttatgtaataagaaaggctgtatccttcatcaggctcatttctttacctgcttgtctgtgcttattccctgggcacactttagcttttgttttacctctgcgttagtctgttgaaatattgcccctttaagctcaaatacacaatgaaatatccttgtctacctcttcttccactcaagctagaagtgaccttaccacatttcagattcttatagtacgtttcttaagaatcctccctacctttaatttcatattttgttgtaggcctacttgtcttcctgaaagctcttagcccagtgcctagcacatattcaatttttgttaaacggtggtggtttttacttctactttaaggggttctgaaatgcaaggaccatgtctccctgaactttatattcctcaaagcagctaacagttgaaagtagattcttagaaattgttgaatgaatggtgctctttattctttttttcctttcattccatgctgggttacagtctatagagaggcattctggttctttagatttatgtgatagtgattcggtattcatgaaaaagggttaggaaaatattgtaattgttaacttttctccattgatattcagcagatatttgagtacctaattttgtgcaatgtcctatactggatgatggattataacaagattataggaaatacatgtagttcttcaatgctttggtatataattatgtaggttatattttcttttttgagatggggtttcattttgtcacccaggctagagtgcagtgatgcagtcacggctcactccagcctcgacctcctgggctcagacaatccttctatcttagcctcctgagtagctgggactgtaggcatgactaccatgcctgattaaatttttttttttttttttttttttttttttgagatggagtctcgcactgtctcccgggctggagtgcaatggcgtgatcttggctcaatgcgacctccgcctcctgggttcacgcagttctcctgcctcagcctcccgagtagctgggattacaggcgcccatcaccacacctggctaattttttgtatttttagtagagatggggtttcactatgttggccagactggtcgcgaactcctgacctggtgatctgcctgcctcggcctcccaaagtgctgggattacaggcatgagccactgtgcctggctgcccagctaattaaaaacaatttttttgtagagttgatgttccccctcagttgcccaggctgatctggaattcctgggctcaagcactcctcccaccttggcctcccaaagtgttgagattacaggtgtgagcctgaccctaggttatatttttgtgtttcatttactattttatcctctggcaaaatagcagggtataatttagagctttaatgaattaatggtgtaactaacagtgaaaactgtgtgtgtgtgtgtgtgtgtgtgtgtgtgtgacagtctctggcccccatgctggagtgcagtggcacgatcatagctcactgcagcctcaaactcctgtgctcaagtgatcctcccgcctcagcctccttagtagctgagactagaggcatgtgtcaccatgcccagctaattttgttttatttttataaagatgaggtgtcactctgttgaccagggtggtcttgaactccttggctcaagccattctactgctttgatttcccaaattactgagattacaggcatgaaccaccatgcctggccagggaaaaattttaaacatgtctttcttttgagaaaattattattgaaaagttggttaaaagtaatttctgaagaacaaatgatattatcagttttacaggtgtcttactgtaactcttagaagttgttaaagtttactattgagcgcaccactaaagactagggaatttttctttttcttttctttctttctttttttctgagactgagttttgctcttgttacccaggctggagtgcaatggcgtgatcttggctcactgcaacctctgcctcctgtgttccagcaattctcctgcctcagcctcccaagtagctggcattacaggcatgtgccaccacgcctgggtaattttgtatttttagtagagactgggtttctccatgttggtcaggctggtcttgaactcccgacctcaggtgatccgcccacgtcggcctcctaaagtgctgggattacaggcgtgagccaccgcatccggccgatgggaatttttctatttgaaagccattgactccagaaggaagtgtaggggagctggctgaatcagatggttacttttttttttttgaagcagaatctcactctgtcactcaggctggaggacagtggtgcgatctcggctcacagccacctctgcttcctgggttcacatgattctcgtgcctcagccatctgagtagggaatacaggtgtgcaccaccacatccggctaatatagatggttacttcttgaaactgctttggtaagatgtaaacttgggggaatacctcttctcttgaggacacatctcctctgccaaatgagtgatgccagtgtgtagaatgaatgattcacttatattctgtgtccttatctttgaggagggctaattttttttaaccacttgttgaatatgcaagatttactgtgaaaattaatgcctttagtatgaaagagaaattagtgtggaaattgttagtgtttccaggtgatttttttcccccttccttcctacttcattatgtagcttttttttttttttttttaacttcgctgttacttggctatctgaataatcattcctaaaccatattttatttgtacattgtgtgttttggtacttgtgttaatggtgtactttgaatacacatctgtttattttaaaaatcagcagttgctgactagatgaagaaaacaatgactgatttgaaggtgaaaagaaaaactcgggttaaaaaagagtccagacaatgtgatttaaaatgaaaataatttaagcttatttgtggtgagagttaaaaataaagttggctccaggtatcatttgtggaactgatttgttttagcataattgtttttgaactagctcgtttttaacttgtatttttaaagttacacttttaaaatgtaggagtctgttttgtaaacttgtacagcccctgctaacttttagaagagtagagtggcttatttcttcatgtgtgtttattctgggctgtcatctgatgaagttaccagtttgtggtcagaaattgagaaagaggagtgaggaaacgaaaaatattgacacgtacacatcaccttgcagtgcatgagagtgcccttttggactggttaggaaactaacatttgagcatatttgctcagcagaaactttttatgtgtgaaagttattttttttccagtgttgtgaccacttaaaatttatttatttgttttgtttgtttgtttgtttgtttgagacagggtctcactctgttgcccaggctggaatgcagtggcacaatcatggctcactgcaacctggacctccctgggctcaggtgatcctcccacttcagcctcttgaatagctgggactacacatgtgctacaccgtgcatggctgattttttgtagagatggggtttctccatgttgtccaggctggtctcaagcttctaggctcaagcagtctgcttgcctcaacctctcaaagtgctgagattacaggggtgagccaccatgcctggcctgaatttctttttttttttttttgagatggagtctcgctctgtcgcccaggctggagtgcagtggcgcgatctcagctcactgcagccttcgcctcctgggttcccgccattctcctgcctcagccttccgagtagctgggactgcaggtgcccgccaccacaccaggctaattttttgtatttttagtagagacggggtttcaccatgttagccaggatggtctcgatctcctgacctcgtgatctgcccgcctcggcctcccaaagtgctgggattacaggcgtgagccaccacgcctggccggtaatgaagattttaataatgactttaaaaaccaggcacagtggctcactcctgtaatcctagcactttgggaggccaaggtgggtggatcatttgaggtcaggagtttgagaccagcctggccaacacattgaaaccctttctctactaaaatcacaaaaattaggctgggcgtggtggctcacacctgtaatcccagcgttttgggaggctgaggcaggtggctcctgaggtcaggagtttgagacaagtctggccaacatagtaaaacccgtctctactaaatatacaaaaaattagccgggtgtggtggtgtgtgcctataatcccagctactcgggaggctgaggcaggagaatcatgtgaacccgggaggtggaggttgcaatgagccgatattgtgccattgcactccggcctggcaatagtgtgagactctgtctcaaaaaaaaaaaaaagacaaatacaaaaattagcagggcgttggtggtgcgcacctgtagtcccagccactcaggaggatgaggtaggagaattacttgaacctggaggcagaggttgcagtgagctgagatcgtgccactgcactccagcgtgggtgacagaggaagactccacctcaaaaaaaagacttaaaagaaaccggtaatatcgttattatatttctgcctgtcttaattctttatccatttgctgtagattataatgttagctgcatgaatgaaagattatatttttccagctactcaggaggctgaggtgggaggattgcttgagcccaggagtttgaggctacagtgagctatgatgaagctactgcacttccagcctaggtgacaaagggagactccgtctctaaaaaacaaagattagatttttgatacaccatctattagtatattatttaatgagtaaaaagaaaggataagttataaaaaagcattaagaatatgactgctctaatgaatttaagctaaatcctttgttgtttagaagtgaagtaaaaatctcttaaatatgaagaaaaattttaattgcttgtgatatataagacatggtatatacagtctttttctttcctccacacagaggtctgatgcattatttacaaacaatatttatttaaaagtaatgtaataagccaggcacagtggctcatgccttgtaatcccagctctttgggaggctgagctgagacgctgcttgaggccaggagttcgagactagcctgggcaacatagtgagacacccccctcaccccaccccacctctacaaaaaaaagattaaataaatacagtacagtacaataattaggaactcttctagatagctcttaaacttccagcctgggtttttctgagttcagtgcctaaaactcttaaccactacattactgtattccaaaaattaagtcctaggtttcaaagtacagatcaactgtgaaaaacaaacaaaaattttaaaggtaatagtaacatcattaaacaataaaaatttcaaatcccattgtaccattcaaatcagtgtattataatggaaagagatgtaaagtctgagtatctgaatttttaattttgcttctcttaaattgtcactaaaccttttgaattttactttttttcttcatcaaaaaaagggatagtatgaataatacctgctttagcctgcttaattctaacagttctgtgagataatggaaagatgagctgaataaattgtaaagctgtgttaaattctgagttctcttgactaagtaaacttttttgagtcggaactacacaaaaagcattgctgggttctcagaagttaggttttaggtagatctaagaatctcttaaaaccttaataccaaaaggctggctaccttagatatttttgtcctgccaccttattttttttttttttttttttttttgagactgagtctcgctctgtcaccaggctggagtgcagtgatgcgctcttggctcactgcaacctccaactctctggttcaagcagttcttctgcctcagcctcccgagtagctgggattacaggcacgtgccaccatgcccagctaatattttgtatctttagtagagacgaggtttcatcatgttggccaggatggtctggctctcttgaccttgtgatccacccatctctgcctcccaaagtgctgggattatagccatgagccaccacgcctggccgccttaatatttttgagtgaaatatagtatttgaggaaaaactcaaaaatgaggtttttcaaagtgcctgattataatgattgatttgctaaggcgtttttgaagaaaacttaaaaatgtccatgcctgaagtatttacattgtttattgcatgtgggtgtttccctactcagaaagggcaataggaagatttgactgctagcccttgctaagcaaaaggatagagccaagggatagggcaaaacaaagtcatccttaaccctaagtttgtccagctgcttcttgactctcttttggacagaagttttaggacttgtagttcttgtacacttaactcctgagaagcttgctgcattagtcagaattgtgataattcttaccactgtccaaaggaatctaatctcattttttgggagagtagttggcggcagtacaatccatgagaaaacttaagtgggtgttctagtttggcttacttctctagacgttgataaaataacattttcactgaaacatttatgcctcagatttagctttaatgtgacagatgtaccttaaaatattaggattcaaatcacttaaaatgataccctaagtacaggtagtaagtttttaataattgtagtctctccagatttgacttgtcccgaagctacttcattgtactttgtatgtgtgctgctccctaataatcttgcaccttgaacatagttgtgctttcttattttttacaggatatgataaactgaaaaaaaccagcaaaacctttccagggtttttgaaagtttgttgtctaatttatagtttattaatctggtactacttaacttatttttagaaattctctgaatgcaacaattcactgaagttatttctagaggtggaccacagggtgagaaggctgaaatgactgttgagttgaaaatgcctttatcacaaccctatattcttctggattatgagcatcagaataaattatacaagattcctatgtaagatcacttctcagcaatttattaggaattgcacaaggaggtaaactggatttcttttttgtttttatttttatttttttttttttgagacagagttttgctcttgttgcccaggctggagtgcagtggtgcgattttggctcactgcaacctctgccttccgggttcaagcgattctcctgcctcagcatccctagtagctgggattacaggcgcctgccaccacgcctaattttgtatttttagtagagatggggtttcactatgttggccaggctggttttgaactactgacctcaggtgatccacccaccccagcctctcaaagtgctgggattacaggtgtgagccactgcacccggcttctttttaatttttaaacaagtcactttttggcaaatatagtatggcccctatagttactcttttcttactttgatccttaacatgtttgcatacccaagagtgttgtgcctgctatataatctgtttcttagcctgatggtgctttgtgtagattgagatatgaggattatgggattagtgctcagaactctgcaagctctctggaaatacagtacacctttttgccttagccagcagaatgtttgtgagttctgtgctgaagcctgggggttgagtggtagatattgtgcttttatctgacatttgatttgttgcctgaggacagagatgcagtgttatgggtgggagttgtgtcttgccttaccagtgtttagactttttaaaagataatggatcttacttcttgaaagaataggagatgaaaaccaatgtcctcctgcttctgttcttctctttcttcatagctttccacttggcatatagcagaaaactctttggctatatttggtgcattttgttggtggaattcctcaagaatgcattcttgacttttttcttttttttttttctgagacagagtcttgctgtatcacccaggctggagtacagtgacgtgatcatggctctctgcagcctcaacctccctgttaaggcatcctctcccctcagcctcccaccccctggccctgccccaatagctgggactacaggcccatgccaccatacgcagctattttgtgtgtgtgtgtgtgtgtgtgtgtgtgtgtgtgtgtgtgtgtgtgtgtagagatggtgtctccctgtgttgtctggactgtctataaaacttgacattcaacagtctcttgtttttattcattgagaaactggcttcatccttttactgaaatgggagaagtgttatttatcttactgtttttttaattaattaattttttttttcctgagatggagtctcgctctgttgcccaggctggagtgctgtggcgcgatctcagctcactgcaagctctgcctcctgggttcactccattctcctcctgcctcagcctcccgactagctgggattacaagcgcctgccactacgcctggctagttgttgtgtttttttggtttgtttgtttgtttttgtttttttgttttttggggttttttttttttgtatttttagtagaaatggggtttcaccgtgttagccaggatggtctcgatctcttgacctcatgatccacccgcttcagcctctcaaagtgctgggatttacaggcatgagccactgcgcccagcctaaattaattgatttttttgagacagagttttgctcttgttgcccaggctggagtgcaatggcacgatctgggctcactgcaaccactgcctcctgggttcaagcaattcttctgcctcagcgtcccgagaagctgaaattacaggtgcctgccactatgcccagctaatttttttgtgtttttagtagagacagggtttcaccatgttggcccagctggtctcgaactcctgacctcagatgatccacctgcctcaggctgggattacaggcgtgagccaccacactgggttcctatgggactattttaagttaacatccaggaatctaaactacaactagcattacgtagttacacttaagaaagcatttttggggccgggtacggtggttcacatgtgtaatcccagcactttgggaggccaaagcaggtagctcacttgagctcaggagttcaagaccaacttgtgcaacatggtgaaaccctgtctctatgaaaaaagcaaaaattagccggatatggtggcacatgcctgtggtcccaactgcttgggaggctgaggtgggaggatcccttgaacctgggaggcagaggttgtaatgagctgagatcgcggcactacactttagcctgggtgacagagcgagaccctgtttcaaaaaaaaaaaaaaaaaaaccaaaaaacatttttttttgggggggacatgtccaccaaatatttggaaattgttatatttcctgtaagtggaactattttttctccatatctgaaatctttctgtacattcttttttttttaatactttaagttctagagtacatgtgcacaatgtgcaggtttgttacatatgtatacatgtgccatgttggtgtgctgcaccagttaactagttaactcattgttcactttaggtgtatctcctaatgctatccctcctccctccccccaccccatgacaggccccggtgtgtgatgttccccaccctgtgtccaagtgttctcattgttcaattcccacctatgtgtgagaatatgcggcgtttggttttctgtccttgcaatagtttgctcagaatgatggtttccaggtttatccatgtccctacaaaggacacgaactcatccttttttatggctgcatagtattccgtggtgtatatgtgccacattttcttaatccagtctgtcattgatggacatttgggttggttccaggtctttgctattgtgaatagtaccacaataaacatatgtgtgcatgtgtctttatagcagcatgatttataagcctttggatatatgcccagtaatgagatggctgggtcaaatggtatttctagttctagatccttgaggaatcgccacactgacttccacaatggttgaactagtttacagtcccaccaacagtgtaaaagtgttctatttctccacatcctctccagcacctgttgtttcctgactttttaatgatcgtcattctaactggtgtgagatggtatgtcattgtggttttgatttgcatttctctgatggccagtgatgagcattttttcatgtgtctgttgtctgcatgaatgtcttttgagaagtgtctgttcatatcctttgcccactttttgatggggttgtttgatttttttcttgtaaatttgtttaagttctttgtagatgctagatattagccctttgtcagatgggtagattgcaaaaattttctcccattctgtaggttgcgtgttcactgtgatggtagtttcttttgctgtgcagaagctctttagtttaattagatcccatttgtcaatttgggcttttgttgcccttgctttcggtgttttagtcatgaagtccttgcccatgcctatgtcctgaatggtattgcctaggttttcttgtagggtttttatggttttaggtctaacatttaagtctttaatccatcttaaattaatttttgtataagatgtaaggaagggatccagtttcagtttctacatatggctagccagttttcccagcaccatttattaaatagggaatcctttccccatttcttgtttttctcaggtttgtcaaagatcagatagttgtagatgtgtggtattatttctggcggctctgttctgttccattggtctctatctctgttttggtaccagtaccatgctgttttggttactgtagccttgtagtatagtttgaagtcaggtagcatgatgcctccagctttgttctttttgcttaggattgtcttggcaatgcaggctcttttttggttccatatgaactttaaagtagttttttccaattctgtgaagaaagtcattggtagcttgatggggatggcactgaatctataaattaccttgggcagtatggccattttcacgatattgattcttcctacccatgagcatggaatgttcttccatttgtgtcctcttttattttgttgagcagtggtttgtagttctccttgaagaggtccttcacatcccttgtaagtcggattcctaggtattttattctctttgaagcaattgtgaatgagagttcactcatgatttggctctctgtttgtctgttattggtgtataggaatgcttgggatttttgcacattgattttgtatcctgagactttgctgaagttgcctgtcagcttaaggagattttgggctgagacgatgaggttttctaaatatacaatcatgtcatctgcaaacagggacaatttgacttcctcttttcctaattgaataccctttatttctttctcttgcctgattgctctggccagaacttccgacactatgttaaataggagtggtgagagagggcatccctatctggtgccagttttcaaagggaatgcttccagtttttgcccattcagtatgatattggctgtgggtttgtcataaatagctcttattattttgagatacgtcccatcaatacctggtttattgagagtttttagcatgaagggctgttgaattttgttgaaggccttttctgcatctattgagataatcacgtagttttgattttggttctgtttatatgatggattatgtatgttgaaccagccttgcatcccaggatgaaggcagcttgatccagcagcacatcaaaagcttatccaccgtgatcaagttggcttcatccctgggatgcaaggctggttcaacatatgcaaatcaataaacgtaatccatcatgttcctgtacattcttttgcattctacatgaccttatgtatgtttaaaaacacatttttacatttctttttttgtatttttaggccgtgttggccaggttggtctcgaactcctgacttcaggtgatccgcccatctcagcctcccaaagtgttgggattacaggcatgagccaccatgcccatttttacatttcttgagcaggagccctgtagtttaaaagtcccctttattttcagcagtgtacatttaagacaaatcggatgtgtgagtaggtagaaaatatttaccgtttactgtgacagaacagatgaacaagaatgtatttggttttatttgtaatataaaacaactgtgaagggaatgccaaacaatagtagtgaatcaaactttggaaatacctctgacgtagaattctatagtagctttaattgggtattattatcagctggtctgtttgggacttgtttgatgaactgttagatgactgactgccagccaatcattatcctggctgctccttagctgactgccagtcaacaattactccatgctgattctacagtttttccacagttgtcagtgttctagttctgagtatagtctcttggcataatgtggttcataaacgactgcactgataacttttgttagaactcaccacttgccagatagcccagatgccatatgttactcattcagtaaataactcttaagagcctgccaaatgctagatacttaaaggcagtgggttataagggtgaactgaacttagcttcttagagcatactacctagtggtataggcagtcaataatcattgagtaggcaaatacctaatattatttcaaatggtgataaattattatgaaaaccaaaaagctgagtaaagagaagaatgatggggaagggtaggatacacttgaaccagggtggtcaggggaggtcctgtttgatgggtaacgggccaggccatcatgaaaggtcttgtaggtcacagttaaagaattcgagtgctaatttgagtgaaataaataatagataaagggtatttaataatatgtccaaatttgtgttttttgttttgttttgagacagtcttgctctatcgcccaggctggagtggagtagtgcaatttcggctcactgcaacctctgcctctcgggttcaagcgcttttcctgcctcagccttccgagtagctgggatttcaggtgtgtgccactacacctggctgatttttgtatctttagtagagacagggtttcaccacattggccaggctggtctcgaactccctgacctcaggtaatccatccacctcagcctcctgcgagccactgtgcccggcctccatttgtgttttaagaacacaatgactgtgctccatagaggacagattgctttcaaatgttaatagagatggaggcgggtggatcacctgaggtcaggagttccagaacagcctggtcaacgtgtcgaaaccctgtctctactgaaaatacaaaaattagccaggtgtggtggcatgtgctgtagtccccgctactggggaggctgggcaaaagagcgaaactccgtctcaaaaaaaaaatgttaatagaagcaagacctacaaagatgtacatatgcatatatacaatactctgtattcagtttctggaagttcgtgaattcactgaagttctcagaagttgaaagattgaagttaacccgataccctagttcctaggtgataatctagttcccaggtttactagtgagtataatacacttaaaaattgagcgagttcagcttttcacttgaagaatttgttttactagcggaggtacacaatttttgctaacttagaatgttttttatatgccggactctaaattaggtactttatatacactatcttattcattcttcactgcaattcagtgaagtttgtaccattattatctttaccctagatccatggagttgcccaagtagtgaagctggatttcaaactcagtacctgttcttttatctactaaaccaaaagtgttcagtatagtctccagggtatgtagtatgtaatgaaactgttgttgccgctgctgttcattgatgtagcaaatattttttctttctttcttttttttttgagacaaggtcttgctctgttacccaggctggagtgcagtggcatgatcttagctcacagcagcctccacctcccaggctcaagtgattctcccctctcagccgcccaggtagctgggactacaggtgcaagccaccatgcctggctaatttttgtattttttgtagagaaggggtttcgccatgttgcccaggctggtcttgaacttctggacccaagtagtcttcctcatctcagccttccaaagtgctgggattacaggcatgagccaccacacctagccagtgtagcaaatgtccctttttttttttgagcaaccatgcttactgcattttaatgtaatcaatcagtttttttttttttaaagatatacagtcttgttatgttgcccaggctggtcttgaactactgggcttaagcgattcttccaccatggcctcaagtgattctcatttctcagcctcccaagtagcttggtggtatgtaccaccaaacccagctgtttttttttttgtttttttgaaatggagtctcgctctgtcacccaggctggagtgcagtgtcgcagtctcagctcactgcaacctctgcctcccgggttcaagggattctcctgcctcagcttcccaagtagctgggattacaggtgcccaccacaatgcccagctaatttttgtatttttggtagagacggggtttcaccacactggccaggctggtctggaacccctgacctcaagtgatccactcacctcggcctcccaaagtgctgggattgcagacatgagccaccacgcctggcctaaaaacaacattattaatgtttttttttttgaggtggagtctcgcactttcgcccaggctggagtgcagtggcgcgatctcggctcactgcaagctctacctcatgggttcacgccattctcctgcctcagcctcctgagtagctgggactacaggtgcctgccaccacgcctggctaattttttgtatttttagtagagatggggtttcaccgtgttagccaggatggtctcaatctcctgaccttgtgatccgcccaccttggcctcccaaagtgctgggattacaggcgtgagccaccgcgcccagcctaataaatttataaagtaatctctctctctctttttttttttttttttttttttggagctggagtttcactctttttgcccaggctggagtgcaatggcacgatctcggctcactgcaacctctgcttcccagattcaagggattctcctgtctcagcctcccaagtagctgggattacagatgtgttccaccacaccgggctaattttgtatttttagtagaggtggggtttcaccatgttggctaggctggtctcgaactcctgaccttacatgatccgcccacctcggcctcctgaagtgttgggattgcaggtgtgagccatggcccctggccttttttttttttttttttttttttttttttttttttgagacagggtctccctctgtcacccaggctggagtacagtggcaagatcccggtttactgcaacctccgcctcccggtttcaagcaattctcctgcgtcagcctcctgagtagctgggattacaggtgcacagcccagctaatttttgtatttttaacagagacaggatttcatcatattgcccaggctggtcttgaactcatgagctcatgcaattcacccaccttggcttcccatagtgctgggattacaagtgtgagccatcgtggctgccctagtagaaagtcttaaagaagtattaaacatatactagcacctaactgagactttttccttatatcagttttagtttatatcttgtatacatatctcttataatcattttgtaaaccatgaatagtatatatcccctgctttgggaaacactgtggtgctatactattttattaatgttgttcagctacctggagtatctgaagacctagcacaggttttaccattcacctcctccaaaggggagaggatatacttaaaggggctaactttgaaaatatgggctatttccttcccttctctgttactccttccctctctctgctcttcctccaaccactttcctcccttcctccctccctggcactctcaagaaaaaaaggccattatgtagatgatagttggaaattgctagaaggggtcacataattgtggattcttgtatccggtgcacagttgtcacccagggatttccctccattggccttctggagatttccttcgcttctttcctatgctggatgtcccgtttcctatatcctaagtctttctcttgctatattcctgtaacaaatcccttgagaaaggaattacgggccaggcgcggtggctcaagcccgtaatcccagcattttgggaggccgaggcgggtggatcacctgagatcaggagtttgagaccagcctggccaacatggcgaaacgccatctctactaaaaaaaaaaaaaaaaattagccaggcgtggtagtgtgtgcttgtagtcccagctactcgggaggctgaggcaggagaatcgcttgaacctgggaggcggaggctgcagtgagcaaggtcatgccactgcactccagcatgggtgatagagcaagactcatctcaaaaaaaaaaaaagagagaaaggaatcatggaggttcaaatttttgtaatcatgaatgtcagaaaatatctctctagttctgtccctcactgatagttttgctgattattgtaaattggagatagttttccttcagaatctaggaggctttgctccattatgtcttctagtgttgttgaagagtttgaagtcattcggattcctgattttttttgtttttttttttttttttgagagagtttttactcttgttgccctggctggagtgcaatggcacaatcttggctcactgcaatctctgcctcctgggttcaagggattctcctgcctcagcctcccaagtagctgagattacaggtgcgcaccaccacacccagctaatttttgtattttttagtagagacagggtttcaccatgttggccaggctggtcttgaactcttgacctcatgatccgcccgcctcggcttcccaaagtgctgggattacaggcgtgagccactgcgctgggcctgtattttttttttttttttaactgtaaaagtttatagaatctggtcctccattattgtgatatttaacgtgttaggcattcgataggctattttaatctgatagttcaagttctttcattgtggatttttttcttttttcttttcctttcttttttttttttttaatttccagacagggtctccctctgttgcccaagctggagtgtggtggcacaacacaatcacagctcttggcagcctcgacctcctgagctcaagtgatcctcccacctcagcctatacctgggagtacaggcgttcgccactgtgttggaataatttttataattttttgtagagatgagggtcttactgtgttgtccaggctggtcttgaactcctgggttcaagtgatcctcctgcctcaccctcccaaagtgctggattacaggccattgtgggtttttttctctgtgtgttttggtctttatcatccatattcgagggtttcctaaaaagcctgatattcctttgcaacctctttatttttttaaaagataagattaaaaacaaattggaatctttgggtgcatggatgagatttgttgtctttgagctttattgtaaggtaagggaaactaaagattttagtttctttgagtttggttgccccactggggaaaaggggtttctgcagtcaaggattcagtaagtgtagtttgcagaacagtattcatactctcaactgggtctggaatcctccagtcaagagatcctctaatttaccttctccaggaatataagcctgggactacttttttttgttttttcctcttcacgtcagatgggtaatgtgtccatgtcattacaaggtttgaagaaggcacatctcacacatgagtgtgaaaactcaatcatgcttataaactacaaaaggatcagcctgggactgagttttagagagtttcaagaatttcagaagagtttcagagagctcttcgggaactaggttgttgaattctactttttgtcaaaggggtataaaaaatagaaaatagtctctttcttttaagttgctgatggaaagctgactaatgtggaattcttagaaagattatacccactgttgttggttgcctttatcaatctgtatctttaccttctctaaacttttagaaggctttgtcacttaagaaagatgaagtagtagcacaaccctccttttccaggttaaacctacttctccctgccccaaaagatcagaaaaaaacagacagtgatccattgcttcagaaaataagtttattttgacaattcacccaagcctactctttttttttttttttttgagacggagttttgcccttgttgcccaggctggagtgcaacggtgcaatctcggctcactgcaacctctgcctcccgggttcaaacaattcacctgcctcagcctcccgagtagctgggactacaggcatgcgccactgtgtccagctaatttctgtatttttagtagagacagggtttcaccatgggccaggctggtctcgaactactgacctcatgatccccctgccttggcctcccaaactgctgagattacaggcgtgagccactgtgccctgccaaaattaaataatttattatcaaacatttaaaattaaatttgaaggagaatattgtgatacagtatttggattgagagtgtaattgtgtaaaagtacatgggtatgtggaaaaggattagggccacagccccaaagtcaccattactaaatagaaaaaggtcaattttgaacagatgtacctctgcagagatgtagctcagctagcaggaaaacttctacatgtgaattagaaggatccccatccttcatgcttatgctgtctgtatactagacacatggcctagcaagtgaagcatgagctgaatttccaccctctctcatctcctgtggtgggtgttcttctgtgggatagaagctataacagtatcgtttactctgtgttaggtgcaatgctaagtgctttacaaacactactgaacaattgtgttttgttttgttttgtttttgagatggagtctcactgtgtcgcctaggctggagtgcagtggcgcgatctcggctcactgcaagctccgcctcccgggttcatgccattctcctgcttcagccttccgagaagctggggctacaggcgcccgccaccacgcccggctaattttttcgtatttttagtagagacagggtttcaccatgttagccaggatggtcttgatctcctgacctcttgatccgcctgccttggtctcccaaagtgctgggattacaggcgtgagccactgcgcctggccactattgaaccatttagtaacaactcaattagataaataatatctttattttacagttcttctgcccagacatcttctgaacttcataattctatatctaactgcctatgtcatttatttttaatatagtgagccaccacgcctggccagtttttaaatttttttgtagagactgagttttgccatgttgctcagactggtctcgaactcttgggctcatccgcccaccttgacctctcaaagtgctggggttagaggcatgagttactgagcctggaacaatccttttaagatttaagcctggccaacacagtgaaaccccatctctaccaaaaaaatacaaaaattagtcaggcgtggtggcacgtgcctgtagtcccagctactcaggaggctgaggtgggagaatcgcttgaacccaggaagcagaggttgcagtgagcagagatcgtgccactgcactccctctgggtgacaaagtgagaccctgtctccaaaagaaaaaatctaaggtagattgtgccttttgtgcctttcctctgctcaagacctttcagtggcttcccacttcactcagtaaaaggcaaaaagtccttttaataacctacaaggcattatgttacccacattgtccctgctcccctacattgtactcaagtctatgatctttttaccattccttgtacaaaggattttcactggctgttctttctgcctggaatgttgttctctcagttatctgcaagtcagactcactgatttccaggtctcagcagttacctcttcgttgagacctactgtgacctcactatgtaattgcagtctgcctccctttccccagcacttatcacccactatcatggaatttactgtgaatgcctccagcagaagataggcttctcttatgatcatggatccttgtgttttgttccctgaggtagcccaagcatcttgaacagtgcctggtacatagtaggcactcagtaatgtttattgcatgaataagtgacgaaaattggtatatgggaaaggtaagcaatttggtgaaaggccaggccatacagctaataaaaggtggaggtagattttgaactgatagttatttattgtgcctctaatattagaagatgatacccaaaaaaatgtgttaggattagtaaaattgtgagtaacttcccctttatcctccttcccaaatttagtttttgttttattgtaagtaaaaatataattaggccaggtgtagtggcttacgcctataatcctagcactttggggaggctgaggtgggagggtcacttgaggccaggagttcaacaccagcctgggcaagatagtgagacttcgtctctacagaaaataaaaaattagctggactcagtggtgtgcacctgtagtcccagctaatcaggaagctgaggcaggaggattgcttgaacgtggctcaaggctgcagtgagccatgatcatgccactgcactccaacctgggcaacagacccagaccggtcatgccttagaaaaataaacaaataaaagtataattagaaacagattatcagagtagaggaaagagccagataccaggaagccagagtaggctgccacaaggttgaaatctgtcacctcatcttaggaaccgcctctcccatgaatgcacggatcttaacatatgtgatggtgtgatgaaaccctggtgagatttgtgaatattctgaataccatgtaaccttggacatttttacttaacctttatggtccatagattcctcactctaaaatgataatttctcttatagggggttgttgggaggattaaaagggatattgtatgtaaagaactgatacataataagcattctgtattagctaatacattagctaatatcattattgttgctgctgcttagttggtacagagttttaagaaatttattttttggtggatatatcttgttgcctagtgagttttagcgagtaccaaaatagagagcaaacacttattgtttttgttcagatagccaaacaagctttgtcaagtgtttgtgttttttcatggacacttgcttgtggttctaattttatattacatcttaaacaatagccaactttttgtaattatttacataaattttaatatttaacatgtggattctacaactaccattgtttcgttggttttgcatttttggttgacttctatgggtcagttgatttaaaatgatccataggaattatgatacaactgtcatgatatttaaaaattagtgaactggctgggtgtggtagctcatgcctataatcccagctgaagacaagctggtgaatcacttgaggtcaggagtttgagaccagcctggccaacatggtaaaaccctatctctactaaatatacaaaaattagccagcatggtggctcacacctgcagtcctagctacctaggaggctgaagggggaggatcacttgaatgtgggaaacagaggttgcagtcagccaagattgcaccactgccctctagcctggccaacagagtgagaccatgtgccccgccaccccccccccccaaaaatagtctcaggttcatcatacttatatgaatagaagttactgccagtgtatccattaaagtatcttctactttaaagtagaaatttgaatgataaataaggtcacaaaataacttacagtgcctgagaaaagaatgatagtataatatactgagatttttttcttattaacacgataatgaaatacatgaaaactagtagagttgagttacatgaagtaggaaaaatgactttttaaaaacttttttttgtagagtaggtgtctaactgtgttgtccaggctggtattgaattcctgggatcaagtgatcttccagcttcagcctcccaagtagttggggctacaggtgcatgccaccacacccggctagtttttagattttgtagagatgaggtctcactattgccaaggctggtctcaaactcctgggcttaagtgatcttcctaccttggtctcccaaagtgcagggattagcccaggctggtctcaaactcctgggcctaagtgatcttcgtacctcggtctcccgaagtgcagggattacaggcatgaactaccgcacctggccaggctgtaagcccattttataacttgaatgtagaaatagttttacactctaacattttaatttttgagacggagtttcactcttgttgcccaggctgaatgaagtgcagtagctcactacaacctctgcctcccaggttcaagcgattatcctgcctcagcctcccgagtagctgggattacaggcacatgccatcacacccggctaatttttgtatttttagtagagacgggattttgccatgtgggccaggcgggtctcaacctcctgacctcaggttatccacctgcttcggcctcccatagtgctaggattacaggcgtgagccagtgtgcctggccacactctaactttctaaaagaaatattcacatagggaataaatgcagttgagagattatagaaagatacggctttgaagaatttacaccataacagtcatgaattgcttgattttaaagcaaatatatcctcaaagtccaggtggcagaatgatgcatgaagctaataaaaggcaatttttttttggtgaacctagggaacctaccaccctcagaaataatgtcgaccagaaaaaatagttgtagagaagtttatataaattcatgattgatagatatagagtaggtgactacagaaagctaagataactggcaattatgagtcatccctttttttctatcctaaaacgtcccctggtatctttcagagactgattttggggttaggcccatgtagtaattttttaacggaatagtagccaaagtagaggaaggcaaaacagagtagaatctaggccttttgatttttgaagcattctgtgatgattggtaggggtgaccaggggaagtcaggaatccagagagaagtagcttggaaccaggtaaacctaatttctgtactagactagaataatttgtattaagtaaattgtaggcttctgaaataatttgtatggtttagatatcatgataaattatgaatacactatgtcttctctggcatgtgaaaggtaaatgtttgcctatagaatacaagttcccagactgtcttaccaaataaatgtttaaagcctgggaactttcgtggtaataaaagtttttactactattttgtatatatgaagagttttttcttttcttttttttttttttttttgagacagagtctcgctgtcacccaggctggagtgcaatggcacagttttggctgactataacctctgcctcctgggttcaagcgattctcctgcctcagcctcctgagtagctgggactacaggcgtgcagcaccaaccctggctaatttttgcatttttagtagggatggggtttcaccatgttggtcaggctgatctcgaactcctgacctcaggtaattcacctgcctcagcctcccaaagtgctgggattacaggcgtgagccaccccgcctggcgaagttatctttaaaaaacaacaacaaaaaaaactttatcattgagcagaaatgtgattttacaattagtttccatataaactttttgttaccaaagtatcatcaaattacatacttaacaatattctttttttaaatgccttttttttttttagacaaggtctcggtctgtcgctttggctggagtgcagttgtgtgatcgtggcacactgcagcttcgacctcctttgctcaagtgatcctcccacctcagtctcccaagtagctgggtctacaggtgcatgccatgacactcagctaatttttgaaatttttttgtacagacggggtcttggtatgtttcccagagctggtgttaaactcctgggctcaagtagtcctcccatctcagccttccagagtcctgggatttgcaggtgagagccacggtgcccagcccatgaacaattaaaaaaaattttttttttaatgtttggtttactttttttttttttttttgagacagagttttgctcatgttgctcaagctggagtgcaatggcgctatcttggctcactgcaacctccacctcttgagtagctgggattgctgggattacaggcgcgcaccaccacgcttggctaattttttgtatttttagtagaaatagggtttcactatgttagccaggctggtctcaaactcctgacctcaggtgatctgcctgtctcagcctcccaaagtgctgggattacaggcgtgagccactgcgcccggcctacttttttttttaatgcttatctatttcctgcagtatggtttactttcgatattatactacgcatatagtacttggaagtattaaattgtattggtattggtgacaggtgacactgaccttattcttaaattatggaaaatgactcgtgtgtgtgtgaagtgatctcactgtgttgcccaggtggacttcagtggctcttcacaggtgcagtcatgcactacagcctcgaactcctggcctcaggaaatcctgagtagcctcttaagtagctgggggtaaatattctttcacttagaccttcagctaatgtactgggggcagtattctttcctgggaggtcttgtttttaaaccagtcctgccttaaattgttccaattttagttctgtggctttgagtctgaggtaattttcagtttattggtattagaaacattcctgtgtttgtgtagtgctgggtgtgaaatgtgaagttaaatctttaaacagttaatagatactattagattgctgtacttctgtggtttatactcttcactgtgagagtagaatacttcaaatgcttgtgctagatgttttgcctttttaattttacaaatctgtctgggcacagtagctcatggctgtaatcccagcactttgggaggctgaggtgggtggatcacctgaggttgggagttcaagaccagcctgggcaacatgattaaaccccatctccactaaaaacacaaaattagccagacatagtggcgcatgcctgtgatcccagctacttgggagactgagacaggagaatcacttgaacccagaaggtggaggctgcaatgagcagagattgcgccactgcactccagcctgggcaacagagtgagattccgcctcaaaaaaataaataaaaataaaataaattttacaaattgataaaaaatagtttttatatttgtgtttccctactttatatataaacatatatgtttgttggcctttgtattgcttttctgtgaatttaatttcctgttttttttgcaatggcattgttcatcttttactaatttttaggagctccttgtttttgtttttgtttttttttttttttttgagttggagtcttgctttgttgctcaggctggagtgcagtggcgcaatctcggctcactgcagcctccacctcctgggttcaagcaattctcctgacctcaggtgatccatccaccttggtctcccaaagtgctgggattacaggggtgatccactgtgcccggccaacatgtctctctttttaaatgattgatcttttccaacatgacaaatttctccattcataagagactgcatttgattttagaacttatctgtggaactttaaaagacctttcacatgcagaagctgattttcactttggcttatctagttttagtgtgtgtctaggatgtgtgtgtatgtgtgtctgtatatacattttttaacatggggcctttagtcagagaaattacagtattaaaagctagatctatgcttatatttgaaggtagtatcaacagggtttctgattatctccatttaagattgaagtatgttgctgctgtatgatttttttagaagatgctttttcctccttgttttcagatgtctgccctgatttttcagatgtttgcgttgataaaggaataccttagtagaattttctgtgattaacaggttagagttgtacctctcttccctgagacaacttgtagggcccttgaagcagcattgtctgcgtatttcagcatgttctgcaaatatgacctatcgtttgtatgagtatgtgccatgaaaatggttaggaaggccgggtgcagtggctcacacctgtaatcccaacacttgggaggctgaggcgggtggatcacctgaggtcaggagttcaataccagcctggcaaacatggagaaaccctgtctctactaaaaatacaaaaattagccaggtgtggtggtacatgcctgtaatcccagctacttggaaggctgcagcgggagaatttcttgaacctgggaggcagaggttgcagtgagccaagatcgcgccactgcattccagcctgggcaacagagcaagactgtctcaaaaaaaaaaaaagaaaaaagaaaagggttaggaaacattaacttagcctgcctcttttttttttttttttttttttgagacagagtctcgctctgtcgcccaggctggttggagtgcagtggcatgatctcggctcactgcaagctccgcctcccaggttcatgccattctcctgcctcagcctcctgagtagctgggactacaggtgcccaccaccacgcccggctaattttttgtatttttagtagaggggtttcaccctgttagccaggatggtctccatctcctgacctcgtgatccatctgcctcggcctccctaagtgctgggattacaggcgtgagcccccgcacccaacccttagcctgcctcttaagctgtaagtggtcttgatatggagatagaaaataaaatactatgaatgacaaataatctaaaacttgaattaaataaagtaggtgtatttttattttgtcactttttattaaaagttattgcagtatattctctactgagtaccagcactatattttgagtgcctgcaagacttagaattcattgtaaaattactgttcttggactgaggttacattttagtcttatcagtggattcttcaccaatcgattggaatcagtcaattccaatacagtcttcccccacagttgaatatagaataaaatctattgcaagctgggtgcaggggcacaagtgtggcaggagtgcttgagcctaggagttcaagaccagcctgggcaacatagtgagacctcatctcaattgaaaatatatatctatataaaaaataaaatttattacagttcatcttgctggaaaacaaaatactgtttttgtaattaaaattttttttttaaatttagaaatggggtcttgctgtgttgaccaggctggtcttgaactcttggcctcaagctgtcctcccatctgggcctcccaaagtgctgggattacaggtgtgaacaactgcgcccggctgacaaagtattttttaaagatgtaccactaaatggagatttgattcacatttgatagtttttgacaggtcttttctatttaaaaacattactgtttttgtagcattattctggcttttcccttaatttagtaaatatttgagtgcctttgtattccagatactgagcaagattggcagggttctgcccttatggagcagaaggaaggtagggggactgactaaaacttgaaaactgtctaacataagtaccatgcagaaaatgaaacagtattaattggcagaaggagagcaggctattttggctagtgtggttagggaaagcctctctaaagagatgtctcttgggtggagacaagatgtgaaaaaaccagcttgcctgtttttggggtttcagccttgcaggtgaagagaaacacgaagttcagaagtcttgaggcacaaagtctggcatgttacgaaagaaggcctttagacgccttgtcagggagtttagattttattctgagttttaaaacgggagtgacacaatgagttgcattttaagcctgttcaggctgttacatggattattaggagctgtatcatttcaggctagtgagatgctcagatgagtctgccttctgtctcttccgtcatctatttctctcttatctggtcttaagctcctccatcttttcctttttagttggaaaaaaactcaaagatctagaaaaaagaggagctgtatgtactcctaaaaagggacctcatagtaacctggggatagagttatgtaggagtgagtcagggctcaggttgaggctttagaggcaggaggcagcgagatcttgttctgtcatcccctcttacagaaataaaatatgccgataaaagtttatagtgtaatagtaaaatataaaaacaaaaagtaagtaatgtagaaaataaaaacccttcacagtcctgctgaaatgattactgttaacactttaattctagagttccccatccatttatttatttctagatttccctctttgtagattaatattaaagggttcagacttgttcattttttgttgtcttggatatcttttcccacctctgtatatatggatctactttatttatcacgtggatattaacatggtttatttaattccctattgttaggtatttggtctttaccacagtttttcaagggtatgaatagtgctgcaaggaatatgcttacacatgtttttatacacttgtcttaggcttctgtaggacaaatttctggagtagaatactaggtcattctttaagaacatttcaaacttttaatagatattaccgtattctttcccaaaaagaatgtacaaagactgtatgagaataactccatgttgtgatcttaagttgtctctaaacctctttggttttcttagctgtcatctaagaatactaagtatctaacctccctcttgatttgggcatgtgatgtgatttagcatatagtggatattcagttagaaacttttggttgaaaacaaggtttggattctgtggtctttaattctaggccatttcagctctgactaaaatgatttgagtgttagtgttatatatgggaaggtaagggctatggagtcagtgcagcccagttcagaatcccagtttgccacttacaagctgtgtgtgtgagaattttctcaactgtaaaatggggacataattcctacctagagtaatactgtaagtattaaggtggataatgattggaatgtatgctgtgtatcctgcctcataatagtaagcttttagtaaatggtagctactgttaataataaaacaagtttctgaaggaggaaggcttgaaaagatgggattccttatcaacctcaaagttttctaaaggaggaaaccctaccccccttacttctgcatggtttctgaccatgaactgaactctgaactctgaatgaactgaactctgaactctgaatgaactgaactctgaactctgaatgttatggtagaaaattcatggactttaaatttaaacagataaagaatctggttattttacccactgctggggtgttcttgggcaagtagcatgacttctgtgtccaaaaaagaaagggtttgcagtgactgaacctgtaatcccagtactttgggaggctaaggagagtggattgcctgagctcaggagttcaagaccagcctgggcaacatagtgagagcctttctcaacaaaaaaaactgttcttaaaaattagctgggcatggtgatgcacgtctgtggtcccagctatgtgggaagctgaggtaggagaatcatttgagcctggaaaattgaagctgcagtgagctgtgatcatgtcactgcaccccagcctgggcaacagagcaagaccctgtctcagaaaataaattaattaaaaagaaagtgtggatggaggaagggattaaaaatctggctgggcacggtggctcatgcctgtaatcccaggcgtgatttgggaggccgaggcggacagatcacgaggtcaagagattgagaccatcctggccaacatggccaaccccatctctactaaaaatacaaaaatcagtcgggcgtggtggtgcatgcctgtaatcccggctactcgggaggctgaggcaggagaatcgcttgaacctgggaggttcagtgagccaagatcgcgccactacactccagcctggcaatagagtgagactctgtctcaaaagaaaagaaaagaaaagaaaatctttggggttcttacacaaattaaatgagataatttattattattattttttttgagatggagtcttgctctgtcccccaggctggagtgcagtggtgcgatctcagctcaccgcaagctctgcctcccgggttcacgccattcccctgcctcagcctcctgagtagctgggactacaggcgcccgccaccatgcctggctaattttttgtatttttagtagagacagggtatccctgtgttagctaggatggtctcgatctcctgaccttgtgatccgcccatctcggcctcccaaagtgctgggattacaggtatgagccaccatgcccggcttgagataatttataaagtgcctaaaatacatcctagaaatattagtttttcttccttgaagtcataaattatggcttacactttttttcaggtatttctcatagtactaatgtgttgctcacactcaagggtagtagttgcttaggaagaagagaaatgtagttgaaaaagtaatagactagaagtcttgagacctgggctcatgttccaagttggcttttttttttttttttgggagatggagtctcgctcttgtcccccagcctggagtgcaatgacacgatatcgactcactgcaacctccacctcctgggttcaagtgatttctcctgcctcagcctccctagtagctgggatgacagacacccaccaccatgcctggctaatttttgtattttaagtagtgacagcattttaccatgttagccaggctggtcttgaactcctggcctcaagtgatgcgctggcctcggcctcccaaagtgctgggattacaggcatgagccactgtgcctggtcccttgctaaatgttttgttttgttttgttttgtttttgaggtggagtcttgctctgtcacccaggctggagtgcggtggcatgatctccgctcactgcaagctccgcctcccaggttcccgccattctcctgcctcagcctcccgagtagctgggactacaggcgcccgccaccacgcccggctaattttttgtatttttagtagagatggggtttcaccgtgttagccaggatggtctccatctcctgacctcgtgatgcacccacctcggcctcccaaagtgctgggattacaggcgtgagccaccgtgccccgcagttgcttgctaaatcttttaactgctggtcccattttcctcatctatgaaatatttaatggaagtgtactattaaagaaacttttctttgctgatgaatgcaggaggtatcattaaaaacccacatagtgctattttcataattactctttatgtattgtgttcttgggttaaatacttttgttctagagttacaattatttgtgtttcttaccaggtttaagaattgtttaagctgcatcaatggagcacatacagggagcttggaagacgatcagcaatggttttggattcaaagatgccgtgtttgatggctccagctgcatctctcctacaatagttcagcagtttggctatcagcgccgggcatcagatgatggcaaactcacagatccttctaagacaagcaacactatccgtgttttcttgccgaacaagcaaagaacagtggtatgtgaacattctacttaggaaatttagctatttatctgcctgtggagcacattaaggatcatgttcaacttaaagacaggcaaaatattcattgtcatttagggtctttatttttttttttctaactgcagatttatttttttatattgctgttccttccacaccccctattttttcctacctcttggccttccttctgttactcttgcctggaatgtcttcctttgtgccacttcatccaaacaaatagtacattcttatgggtatatttcaaagacttttctttgagaagtctctaggcctttccaactacttattttagaagacattttatttcttctattaaaatattcacctaaagctttttgactattacaatcaagtataaagaagaaagtaaagttacatagaaaagattatttttgtatatttcataggcccaggaccagtctggaggcagcttagaaatcatagaatcttctttttcagggcactgacaccagccacttagttctgtgtagtttattttttcagtgccagtgacaggttcatattggcatcatggcaggacactgccactaggttttctgatagaaaatttctttttctttttcttttcttttttttttttttgagacggattctcactctgtcacccaggctggagtgcagctcactgcaacctctgcctcctgggttgaagtgattctcctgcctcagcctcccaaatagctgggactacaggcacacaccgccacgcctggctgatttttgttttttgtatttttagtagagacggggtttcaccatgttaaccaggctggtctcaaactcctgacctcaggtaatccacctgcctcggcctcccaaactgctgggattaccaacatgagacaccacgcccagcctgataacaaaacttcaatttttctaagaatttagctctcaaaaagttttctggctgggtgtggtgatttatacctgtaatcccagcactttgggagaccgaggtgggcagattgcttgagctcaggagttcgagaccagtcgggcaacgtggcaaaccccatctctacaaaaaaaaattcaaaaaagtaggcctggtgcagtggcttacgcctgtaatcctagcactttgggaggctgaggccagctcattacttgaggtcaggagttcgagacaagcctggccaacatggtgaaaccccatctctactaaaattgcaaaaattacagccaggcatggtgttgcacgtttgtaatcccagctacttgggaggctgaggcaggagaatcactcgaacccgggaggcagaggttgcagtgggccaggattgcgccactgcactccagcctgggcgaaagggtgagactatattaaaaaaagaaataacaacaaaaatgtagccgggcgtggtggcacacgtctgtagtcccagctactcggtactcgggaggctgaggtgggaggatggcttgagcccaggaggtaaaggttgcagtgagctgagattgcaccacttcaccccagcctgggtgacagagagccagaccccttctcaaagaaaagaaaaacaaaaaaagttttctactattatggataaaacaaacaaaaccaaccacctggccaaaacagaaaagtgaaattgcattggttttgcttggtggaacttttgagaaaacttgggttcaaaacttccatgcctcttcctttcccatcctctgttctttgtgtaaaatcaatgcattgtgtttattccatatagtcaggtgaagcaaggttctgaggtggggaaccccagtccagagttttctgtttgcttctaacagttccactcttcccaatttgttaataaattgtttatactttttttgtgaacctaaggagcctcccaagtgtagtgttgaatacttaggtgcattttgaactgaaggcaaaactcaaaagtctaactttaattaaagtttgagtaagtttatctttgtctctcttcctaaaaatgaaaattttatggctggcaaaataagcagtaataatcccctatatctgaacaatggtcttccatttgcaaagtaattttgcctactgtttctcattaattttctttgtgaccttaaattgagaagtcagataggaagtgtgtgttatgagaagctgaagaccatttggtgcttcttcaaagtgttattgagactatcttctccatccccatctgctaccagtttgcccagaaggctgggaaacttaatttggcatagtgattaagtgtatgaacctttaaaacaagaaaatcccaatttaaatcctcattgccttttattagctgtatcatttagacaagttctgtacttttttgatcctctttcctgacctttatgaaatgaggcttgtacttagcacagtggctgattcataagtgaagtggtagctattattattattattatatgtattttttttagatggaggctctcactgtcacccaggctggagtgcagtggcccaatctcggctcactgcaacctctacctcccaggttcaagcgattctccttgcctcagcctcccaagtagctgggattgcaggcacccgccaccacgcctggctaatttgtttgtatttttagtagagacagggtttaccatgttggcaaggctggtctcaaactcctgaccttctgatccgcctgcctcgtcttcccaaagtgctgggattacagacatgagccactgcacccggctgctatgattatttcttagctttttatacatctatgtagtccttgatcccctccatttgagcacagctggtggttggaagccaagcttgacttctcctacagcttatgagaaggttgtagcctaggttagttttgcctgtttctttgggtaaagatgaactaactgtggaagaactagctgctttcaccaggcacgcagcttgaggaaagcggtagaagagggaagagttgcttagctaggccagcaccatcagtcagctctttttactcctccccaggttgctttacttcctgaacccagaatgactctcataatcactcagtgggttctagaaattatttaactgatttcagcatgtatccatggagggctgtaaagaggagaatgagacagaggacgcgtatctgatttaaataattttagatgtgataattaggtttttgaatgtttcttggaatttttattttctaaatgtgtgcctctttgacttcctcctgctgctgttgctgctattgctgctgctgctactgcttctaattattattagataagtgattgactggagccgaggaccactactattagagtcagctgaccagcaggttaaaatacagattcattctgtatgaatgggctttattccatactaactgaatcagaatccttggatgtgttggacaggtagatggaatctatattttctcaagcttctctgaggattctaatgccagctacatttgggaatctgactggattagatgatatttaaagaactgtccagcttgcagtatgatttagtgaagactgataatgtaacagatatcactttatagcttagaaaacattgctatacagtatttgatgcaggtcatgattccgttaggtatgtttattactctttgttttcctcattcttagtgtcttagtagttcacatcagtatagcttacttgttttgtttctgaaaagctggaagttggtgggtatcactgcgtcaagaaacttttaaaataaacttattttggaacattaaaaaatatatacaggctgggtgcagaggctcttccctgtaatcccagcactttgggaggctgaggtggaaggattgcttgagcccaggagtttgagaccagcctgggcaatatagtgagatcttgtctctacaaaaaaaaaaaacattagctagaagtggtgctgcccacctgtggtcccagccgaggctgaggcagggggatcacttaaactggggtggtaaagggtacatgtgtcatgatcatgccattgtattccagcctagatgacagagcaagattctgtctcagtatatataatatagattttacacacacacacacacgcacgcacgtagagaaaataacaaatctgatgtaccccttacccactttcaacacttagctaaccatggcaggcctgcttaatctgttttcatccactcctttcccagtgttttgacacaaatcccaggtatcatttgtctgaactattttggtatgtacaagaaacttttaaagaatgctaattttatttatttttaaataggtaaagcattcatatgagccaaaagtcttgggtgacccctgcccctgtatccccatttcttttcctcagaggtttcttatgatcaatctttatctattcgaagaatcagttggtttccccttaccctgttgttcacgacctttcctttcttccacatctctgaaggagaggaaaaaccatcggtagctaaggaggctatcacaaactccaaaggaacttttttcgtttggagaatcttttccttctcccagatgattgatcctcctggagaatattccttccccactcccatcaccttctcgactaatctgttacaagttcaaattcttctatactgtactctcaatgtggagtccatctttgggcttcaaagaatgattactgggcagataagtccccttcagtccctggtgatagcaaaataaagccttgtgaaaaacttcttacgttgcccctctctgatgttttcaaattccttatgcttacatgcattcccttctttcctagattgttttctctgctttgcatccacatactatgccctagtttggagcctggtaactagaagggcccagataactatgtcctctttcttaagacttttttctgttgtaaaccagctagagaaggttggctggattggcattgaggtggctggagtaagagccaagattaagaacactttgggccttttgcagccctgctttacttccttccccctccccgtgtacccacataggtagatatatgcatacactcaccaccttctgggggcggggtgtggggggggatggcggggtgggggagcggttggctggctgctgtcagctgttagcactttcaatcagaggaggaacctggtaggcagttcacaagcactgcaaatctctgttttgccctccttgctggccatactgactctagttaccttacttttgattaattcttggctttgaagttaaacatggagggcttttatcaaaactctgaaattttcattcaaatttttttacagctgccattaattgtgagtatcctgggcactcacacttcccagtagggttctgagtacctgcctagctttttgaggattgagtacaggggaatatagagaagtatgtgccactaaggctgcttggtatggtgtgcacatatatttaaactaagattggtgtttgtccctacagcagggctggagttctatatcttccacttcctgctttgccttcactagtgttaagtacttgtgagatggaatttttgttagaatcatcagtcatttttgttgaaagaggttgaagtacaaattttgatcataaaaactcgtttgtttatagatcagattggcttatttcctctctaatgaatctagtgaacatatatgtgtatacattctaatcacacaaaattagagacgtataaaggaaaagtttatcattttatctttcttaaccactttctaaccactttcttaactgtctcttgatgtgaacagctaggtgtaaatctttccacttgtataacatatacagatttcttcactttttttttttttttttttgagacggagtctcgttcttgtcacccaggctggagtgcaatggtgcgatctcagctcactgcaacctctccctcctgggttccagcaattctcctacctcagcctcccaagtagctgagattacaggcgtccaccaccatgcccggctaatttttgtatttttagtagagacggggtttcaccatgttggccaggctggtctcgtactcctgacctcaggtgatccacccgcctcggcttcccaaagtgctgagattacaggcgtgagccaccgtgcctggcctcttcacctttaaaataatcttactctattattctgaaggatattttcccccaattaatatatcatggactcctctccatccaggtcattataagtaatataatagctgcataatgtgacataatacagatgtctcacactccattcaagtactttcctattgctggacattcaggttgtttcgtatatgtgtgtgtgcgtgggccatcacaagcaatacagactggtgcatttatttctgtgcccacctttccaaggggtgctgcagcctgtgttggtcctaaaggtggtcctttgtttgtaggtcaatgtgcgaaatggaatgagcttgcatgactgccttatgaaagcactcaaggtgaggggcctgcaaccagagtgctgtgcagtgttcagacttctccacgaacacaaagggtaagagctcaaaagtcaattgacttcttcagactagtaaggatcttctagcttcaaatagctatgtttgtattaaattgtactagcttcctatagaatattgtatatttctatacctttctttataaagagataattcagaaaaataggtattaagaaattgaaattattgcttggacattctcttgaaaagttaaatacacgttaagctgggcctgatgaccaatacctgtaatttttttttctttttgaggtggagtcttgctctgtcgcccaggctggagtgcagtggcgcgatctcggctcaccgcaagctccgcctcccgggttcacgccattttcctgcctcagcctccggagtagctgggactacaggcgcccaccaccgcgcccggctaattttttgtatttttagtagagacggggtttcaccgtgttagccaggatggtaatacccgtaattttaacactgggaaactgaggcaagagggttgcttgaggccaagagttcaagaccagcctgggcacatagcgaaggcccatctctacaaaagatttttaaaaattagccaggcatggtggtgcggccctgtagtcctagctgttcgaaaggctgacgtgagaatattgcatgaccccaggggcttgaggctgcagtgagtcatgattgtgctactggactccagcctgggctggagcaagatcctgtctattaaaaaaagccaaaaaacaaaaaaacaaaaacaaacacatgttaggtattgataatgtttccatggatggaaacagtgatgttagatgctgtgtttttttgagacaaagatttttctttgtgtttactctaatgcattatatagactgggcactcagaaagtgcattattttatataaagaatgctatcctcgggagattgacttttctcattcactaatttttttttttattcagttaaatgtgtactaatccctgctgtttgatagattgtttaaagatgcagaagcatttctgcttcagggaagattcatggtttatcctattcctaatggtggtggcaagatagaggcatcccctcaaaggctaggagtaatacctcaaagcagcagagctgtccataattatccattatccattattccctccaccccgaaaatatagggaaacctttaaagggttcttttttaccctcttcttggaaagcgtcacttatgttattcatcgttagcttacattttttcatgtttcaaagagttctgcagtttgggagaatagcccagggaatgaatctactcgaaggggtgagtgtaattctcaatttaggaggcgtttgttgaagtgcaaatctttgaagcagacgttaacttttgctgaaggtagcccaggttgggtccctaagccaatccatagtgttccttaaggactagagagattctgagacagggagggcttggtctactctcatccaaggctgcactggtttggagctactctggagtctctaggacagacagcagattgtcactaggatcagtctgcagattgatgagaaaataaggcttgtcctccttctcttcataagggcaaaatagtcctttggagttataggaagttttccaggtgctgtataggtaattatattaaggaatgtattgtttactgttggatagtgagaaaaatggcttgactaggcttctggtagataatggagaggcttgaatggtgctatacatgttattttctctttacctgagaatattcttcctttggaaaatgggccagattaactggataaaacataagaaaggaattgggcattactttttacttatgtatctattttttgtcttatttatactgtaggcacagaaagtgtggtttcagagtagattttaagacagttaagtttctcattgacttatagaccctacaactacagatttgagtctgttattaattaatagaaaagtacatttttcatttgtggttcctttctatttatctagattgaaataggctactgaagactaaattttgtactgcagcaatatttataatccattttacaggatttggggatttttgtaagattttagtgttacaaattccaatttaacgtatattgactttattgtgagattttatatatcattgtttaaagaaaactttattctggccagacatggtggttcacacctgtaatcccagcactttgggaggctgaggcaggaggaccgcttgaggccagggattcaagaccagcctgggcaacacagcaagactctctctctaccaaaaaacatttttttaagtaaataaagagaaaactttattctgagaacatgggctttggagttcaacagacctagattccaacataggcccttaaacttgctgtgtggccttgagcaaattaccttcttagagtcccagttttcttatttttcagatagaaataatacctacttcataggtttgttgtatgaattaaataaattattgttgtatggattaaataaagttgtgtttatatggcatgtgataaatggtagctgttgttatttctattgaactttgatcttgtttaaacatttcatgttttttttaaatcctttctagtaaaaaagcacgcttagattggaatactgatgctgcgtctttgattggagaagaacttcaagtagatttcctggatcatgttcccctcacaacacacaactttgtaagttgcagatctcttctctttctggcatgttgagggctttgccaggcataacagagatttctcaggtaatatgcgtatgtatatatatatatagttggattgtttaaagttctttatgctgttgtttacagtaaggcaatttagatttcattagtcagagatatactctaatttgtgattatgaattctgtacatgctggaagtatgattcattttgtaaaaacttttttggaggccaagaaatgatgttgtcttttgtcatcttttatttattcagcataatttacacctgtgttcttgttgtaggctcggaagacgttcctgaagcttgccttctgtgacatctgtcagaaattcctgctcaatggatttcgatgtcagacttgtggctacaaatttcatgagcactgtagcaccaaagtacctactatgtgtgtggactggagtaacatcagacaactcttgtaaggcattgttcttttatccaaggaagatagggatgaggagtatacatactttaaagggtatttgttgtagattttgactgacaggtctggattctagactcatttaatgaattgtgatccagaaactactttagaaacagtgataattctgaaactagctaggtttggtggcattcatactccagaatgagcaggtaggagtaggacttgttatctgtcaaattgagattgacatactgtgactgtgattcagtaaggaaaggagcaaaaggatatgaaaacaagaagattttttgcttttcgctcttaatagtattatctactggggttgctagtagacactgctctgtattttgttgaatatgctgaatgagcctttgacattgagaaggagcagaaagcaccgttgatgctattttcttcacttcaaactggagaaaacttagttgtttggacttaaaattgtttgaatataaaatcttgaaagattcttgtttctttcaggagacaatatatttcatatagataaaatgttattaaagaatttaaagtttacattaaaagtacatggtccaaactgccttttaaaaactgtaactaggtatatgaaaagtttaaaagttttgtccttttttgacagtactagagaaaccaagggagtgttattattagaccatgatgaaaatgtttttgctttcatggtcacttacgtattgattttgtgatgagagcttgagtagcacaaatggcacaagcttttaaaatttatcttatttttgtcccccacccttttttttttttttttttttttttggagacaagtctctttctgtcattaggctggagtacagtggcatgatctcggctcactgcaacctctgcctcccaggttcaagtgattctcctgcctcagcctcccgagtagctcagactacaggcacacaccaccacgcccagctaatttttgtagttttagtagagatgaggtttcaccatcttggccaggatggtctcgatctcttgacctcatgatctgcccacctcggcctcccaaagtgctgggattacaggcatgagccaccacgcccagcctttttttttattattattttttaaagacagggtctcgctctgtctcccacagtggagtgcagtggcatgatcacagctcactgtagcctcgacctctcgggttcaagtaatcctcctacctcagcctcctgagtagctgggactacaagtgtatgccatcatgcctagctaatttttgtattttttctagagacggggtttcagcatgttgcccaggctggtctcgaactcctgagctcaagcaatctgtccgccttggccttccaaagtgttgtggttacaggtgtgagccaccgcatccggcggcacaagcttttgagtctaacagacatatgtcaaaatctcagtgttgtcattaaccataaccacatctgagttttcgttcatgcatctgaataaaggggatattaccttccttgcattgttcttatgaggcttgctgacataacctgtgaaattactaagcacaagtgcccacctcatggaaaaaaggtgcctaattactcacttttctgtgatttattccttctattttagtcttttatctatgcattttcaagatggaatgtttccagagaagctgtgtgtgacatagtttgtgaaatgttatactgtagtttgaaaaatattattttgatatagctagacacaggaccagtatttcctagaaatgcacactgggccgggcgcggtggctcacgcctgtaatcccagcactttgggaggccaaggcaggtgaatcacctgaggtcaggagttcgagaccagcctggccaacatagtgaaaccccgtctctgctaaaaatacaaaaattgggggaagggatagcattaggagagacacctaatgttaaatgacaagttactgggtgcagcacaccaacatggcacatgtatacctatgtaacaaacctgcatgttgtgcacatgtaccctaaaacttaaagtataattaaaaaaaaaatacgaaaattagctgggcatggtggtgtgtgcctgtaatcccagctacttgggaggctgaggcaggagaacccgggaggtggaggttgcagtgagccgccattacacctctgcactccagcctgggcaacagagtgagactccatcttaaaaaaaaagaaaaagaaaaagcacacaggagcctgtatgtttattggcaggtcagtattattcacattcaataatcattcaaatccagttatttggaatattgttccctttattctaggtaatgtaaaacagttgaggaaaatgtgactgggaaaagttcagttttagtagctctgagtttgcaaaagcaaggcatgctgattgtctctgtaagattactgcaagcctaaaaaccagtctttccctgcttttgtttagattgtttccaaattccactattggtgatagtggagtcccagcactaccttctttgactatgcgtcgtatgcgagagtctgtttccaggatgcctgttaggtaattttttacctatagcttttcttttagaaagttatttggggtggtggggttggaagcttgaagacaaaaaataagagtttcttcgcattccctcctctctacgtggaaaccccttgctgcttctgtggaacttgatactggtggtacagcaaaaggtagaaatttctgtttatggacctgtaggtcttacattctggaaagtgactttgactgtagcttcttctgttatcatagcatatttcttaatatgtcattacattttaaagagcttgagattctgctttcctcagtatgtactgagttcaacctcaatggaaagggtcctaaaacttaatacagtgatttgataaaaataaaacccttaactttgaaatgcatgttgtggccgatgcatttgctaaaaccatgtatttaaatagactagtgtctttaaaaacatttaattagattttcagcataaatattgtttctcatgtgtctctgagtttgcatataacttgtctttctttactctgttttccagctttataatcagttttgttgcgtttatctactgctcagtgttaacacacatgaatttgaaacctaaagtaaaatctacatccaaaatatcttactttaggccaggcacggtagctcacacctgtaatcccagcactttgggaggccgaggcagatggaccacttgaggtcaggagttccagactagcctggccaacatggtgaaaccccatctctactaaaaatacaaaaaactgggtgggtgtggtgatatgtgccttttggcccaggtacttgggaggctgaagcaggagaatcttgaacgtggtaggcagtgagctgagatggcaccactgcactccagccttggtgacagagcaagactctgtctccaaaaaaaaatatattatgtatacacacacacacacacacacacacacacacacataatgtgtaatcagataatgtttaatgtgaaaatactatggaaatattaaacgcagcatatcttagaataaggaatttgcatatatctggatatatatttctgtatggcttttatttttcttgataatttgaaaagcaaatctgaccaagaatttgtagttacctctgaagattagaagaaaccaggcctctgaagccataaaacagaggattatgtgggaaggcatttttttcaagacaatagaacaatttcccttagaaaagctggcctttttccctttaattcatacatgggtgttacctgaatctgaacaaacctcgaacgaatctttagagcaaataatgaaaatgttatacctcttaatgcatgttcccagtttggttggtgggggttggtggtgactggaagaggccagtggttaatttcacatttaggtatttccatctaaaaactgaattcccatttatttactttgtttgctggttgtagcaggtaaggacaaacagagggtaaaatcctggcctttttacagacatgctcagcacgtctacttatctgtttaaataaattctcaaatttagtctctaaactgggcgtgttccaactagcttaataggtggtagcgtggttgtcaaatgttaatctgttctttcctggagatgttgtaaaaatttggagtagagtggtgctttatttaaaaaaagaaaacttataatgcactctccttttcattgaattcccaatacatatattatttcctgttccaaattttgtatgcaaaagcacctagacttaagataatttttagatgtcacacatttgaaagaatcaaacattttgtcaaaggttgtacaggtagagtttgcccttaagcatcttacttagtcaaatatgtacttgaaagacttcaccagtatgaaagcctaagtgccaatcatggaattttctttctcctcctagttctcagcacagatattctacacctcacgccttcacctttaacacctccagtccctcatctgaaggttccctctcccagaggcagaggtcgacatccacacctaatgtccacatggtcagcaccaccctgcctgtggacagcaggatgattgaggtaatagggcaccttgggggtggtaatgtcagtcaattaatggggtgaggttgatacttatttcagagttttgggtttcaaatctgatcaaggaatgttgcaacactttctcaggtctctggacttttacagtttattttatatccataatatcttcagactggctgaatagtctggttagtatatcattcaactggagaactaaaacttcctgaaaaaatgttaacatttgaactcttcccattatcagatttgaataggctattaatgaacaagtgtctaagatatttaaagagcagtttagttttggtgtgggacagaaattaacagtgatggagaactacagattctctggaagacttttgtgattttatttagaaataaaagggtggagtcctaggactttaataagcaggtgtttggggagatgtcaaagtgcccaaagctagtgtttttgaactgctttttcttctcttggctttttggttatgtcctattggtttaatttgctttctgcttcatctttaataacaactgaatacacttaaatacttcctttgttctttattcttctttatttctcattgctttggactagaataacaacctgagtgcttctcccagggcgtggtccagacgattttgtttgaggggaagagtaggtatttttcttcatgcctttgctttcttgtaattaacaggattgctaaaactgtcagacagcagactaccaaaaatgaaatagttgctaagttaaatttatatttcttgtcacttgtttccatgttttctttttctttctttctttttaaaattttttttggcagtagagtatatagaagtaaaaaaaatgttgtatgtggtattgatgataggtgaaatgaatttctgaagttaggccaggcatgacggtgtatgtctgttgtcccagctactccagaggctaaggcaggaggatcactggagcccagaagttctaggctgtagggagctacaattgtgcctgtgaatagccattgcactccaactggggcaacataataagaatccaccttaaaaacaaacaaaaaatgttaagttagattttgaggccaagggcattaaaaagttttttttttaaatcaattccaaccaaaggctaatgttagacttacttagttggtgctcacagcattggtattctgtttatacattagtaaccaaatgtgtttttggttgataaaccctagaataaatattctttattgaaagcttatcagagacaactatgctctctctcatcatgtagacacctgctgccttaggcacagtttatctcattcagacctcaaatcactttcaacataattgtcctgccactattgtgaggagatcatgtataagctataaattttattattttgactttatcattatgattagtcctgataatacaataatataccagttactgctacttctattaaatggtttgttcctgtatgaacactgtaatacttacagggaacagtaaaggtcagaattggctgggtgggaagatcacttgcgaccaggagttcaagacctacctgggctatatgtagcaaaaccccacctctacaaaaaaaaatgtaaaaattagctgggcttggtggtgtgcacctgcagtcctagttactcaggaggcttgggcaggaggattacttgagcccaggagtttgaggttgtagtgagctgtgtatgattgtgtcaagtaagaatttttgagtttttattataaaagaattagcacaattgttgtgcctaatcattttttactttagaagcagggtaaattttgattcctgttaatttaatcacatataagtcagcatttttaaagtagactaattgttgctttattcaaattatttgtgggtctcaaattattcatagttctcttgagtatttagactccaggaacaataggaaaattctttctagaataaattgatccaactatagaaattagcacagaataaaatatgggatatttaattgatacagggaagaaaattaccataacattaaggaaaatattctgctacataggaatataattgtggttaataaaaataaattgtgctttgctttaaaaacaaagaacagcttagttggataatgaaattacagctgccgatttctattgaaatccacattattttttgccagtgttttgcccacctggcagttatcctgctgtacttaaaaacacacattcctggacttctcacattcccctccaaaacatgctcagtcaatcgtgggtcggggattaggggtggatcttcattcttctttccagagtcagaatcactctccaggtaattctgaagactagctagttttgggaaccagaactaggctttcttgttaaattccgaattatgttttgggagcaggggaacagcttggtttgattctttttatctaattatataattagatatataattttatctttttatataattgagtgggagcattctagtaatagttgtgtggaacaagtatcttgtctatactgtagttacacaaagagaatatagtaggacttccccccaaaaaatgtccttttttaggatatgggggccaagtggttttatattattctattatactgttctattccaagcgatgaattttagattggggtttaggtctcatagagccctctgcaatttaaactattttccaaacagtttctaataaattctaaagatagcctttgctttctcccatgaggagaatgtaaccgatttccaaatttacccataaggcagtgttttgtggtgaaagagctgagggctgagatccatatatgatggtttctggttctatttctgccacctactggttctgccaagtgaccctgccaagtctctctacctgttcagatgtgttttcttatatgtaaaatgtaggttttgaacttggatttgtggtctttccagctttctgtgattttaggcttggataaagtatataggctgcttacctttttcaaatccaacttctagtcaatttagcctaactccttgtggagtaagagtgagcttcccccagaatccacctccccaccctggctttttaaaaaaagttttgagcctcagtggaacaagaatcccaatctttggaagggtctcagctgagagtaactttgctagcttcccttgaaagagtatgtttgttgtgtacattgctttcttttgagaaaaagaatgtggttttcattatatatgaaaaactaataccaggcttggcacggtggctcacgcctgtaatcccagcactttgggaggccgaggcgagaggatcacctcaggtcaggagttcaagacgagcctggccaacatggcgaagccctgtctctactaaaaatgcaaaaattagccgggcgtgctggtgcacacctgtaatcccagctactcgggagactgaggcaggagaattgcttgaacctgggaggtggaatattaaatccttctaatatttaatgaaaaatcagccttggagatactggccactgatatttgctgaatttaatcaaggaacgttgattagagtatgtttaggatttctatggtttttagaggtttttataatctattttgttcttgcacatcctcctcctcttttttccctccccccagagaaaatcttttgtgtgtaggagttgaccagctttccttttctgtttcaggatgcaattcgaagtcacagcgaatcaggtacttttccatagtcatttagccaacaataatgggctttttttctttatgcggtgtatcttctgttggcttatccttgtgtggcttctgtttgtcttgtctattaagcctcaccttcagccctgtccagtagccccaacaatctgagcccaacaggctggtcacagccgaaaacccccgtgccagcacaaagagagcgggcaccagtatctgggacccaggagaaaaacaaaattgtgagtatagacaacagtacctcctgccaattagggttcagtaagaaaaacctcgttggaaattagaatacttaaacttattttgggagaagattctaataaaatacattcaatgaaggagattataaatgtcactgtcatttttggcacacttgcatcagacagtttgccagtgctataactaaaatggtatttctcaaaagacaaaaattggaagtatggttaatatgtttatctttaaaagatatggaaacagatgacatgggttgatcctttgatgccctcattatcaaaagattattaccattgcatggagtataataatgatctctacttgtttcagaggcctcgtggacagagagattcaagctattattgggaaatagaagccagtgaagtgatgctgtccactcggattgggtcaggctcttttggaactgtttataagggtaaatggcacggtaagcttggggccctccctttactaactgcagggctttggtgtgaagtcaagtttcagcccagggggccaggaggaggagaggactgagtgctcctgggcttatagcagtactctcccttacatacttgattatacctgaagattgaacttaattctttttagactaagttcttataaagctcccaggataattagaaattagtgaataagacttgagccctataatcaaatgtcaggagtacttctcctttaaactgattaaatacagtctgcacatgggtcatgcttggaagctccttaagtgagcaagagtctgctgctatggagggagcatgggttctagaaactttaagctggaaaggaccttagagattgaaatggggactgatttgcccatggtcatgcagttaggcataggaaagctggaaatctcctgaagtaacttctctttgtcctgccctaggattagctgtgggtgtccctatcaaacagggaaggcattgacttaattcttgaatctatgtggaatattaatgttctgattttaatggaaacactttgtcacttggaagaaaggtactatttaacttatgtagttacagcttgtgtattttggcaacactgaacattttggcaacatacttagcatttctctgttaggtttttaatgcctctggctttaggactttgggaaataataggtatttccttgaaaatgctgcatgttcccaaaaagtcatctcttctaaattcagattacaataaagcaaaaatcacagagtcccttggtgcctatactactttggatgacactggaattatctttagagataaatgtgcaaagattgagagaagttaaaagcatcaaatgaatggagtattaaaattcaaggtactgaaaatatcaaacacctccagttttgagtacttggtggttttttttttttttttttttttttttttgagatagattcttgctctgttgcccaggctggagtacagtggcacaatcacagctcactgcagcctccaactcttgggctcaaacagtcctcctgcctaagcctcccaagtagctgggaccacaggtgaatgcccagctaatttgttttaccttttgtagagacaaggtctcactatgttgcccaggctggtctccaactcctggactcaagcagtcctcttgggtctctcaaaatgctgggattacaggcatgagccactgtgcccagccttaccatgtgctcgttaatgcatggtttttaccacttgtaattaatcatctgaccaatttctagttccttaagaggattggcacccgactgaacatttgtaaagtacatgtggaatgattccttttcctttgaaaattgcatctggctgggcagggtggctcacgcctgtcatcccagcactttgggaggctgaggcaggcagaacacttgagcctaggagttcaagaacagcttgggcaacatcgtgaaaccccatctctaccaaaaattaggtagatgtgatggcactcgcctgtagtcccagctacttggaaggctgaggcaggaagattgcttgagctcaggaggcgaatgttgtagtgagctcaatacagtgagtacacactactgtactccagcctgggtgaaagggcaagaccctgtctcagaaaaaaaaaaaaaaaggaaaagaaaattgcatctagtatgtactactgggctgtctcctgggtcccagagaaatgatactgttgtagaatatttatttatatgtatttagagacaagatctggctctgttgcccaggctggagtagtggcacaatcttggcttactgcagtctctgcctcctgggctcaagctagccatcctcctgcctcagcctcccaagtagctaggactacaggcacatgccaccacacccggctaatttttgtattttttgtagagatggggtttcgccatgtttcctagactggtctcgaaatcatgagctcaagcgatccgcctgcctcggcctcccaaagtactgggattgcaggtgtgagccactgtgctcagccagttgcagaatattttagatggcataaatatctccaggattccttaggaaagaacacaagcactttgtgggatagagcacttgtgtctgagataacaaggctgctagtagttgtaggaggcagagcaatggatattgcatttattgcttctgttagcattagaacatttttatatcacattttaaaagccccagctaaaagccagcggatgaagttttaagttgtacccaagtttaattttcctctggttgcgcactttcatttggggattcataatttttcaaggcattggtacgtggtactgcttctgagctttgtcttctctcaatagagtgagctttcaaactgtgataaagattatttgttacagtgttacttccataaagactgctattagaatggagataacttgtttttaagattctaggttttttaggccaggtgcggtggctcacgcctgtaatcccagcactttgggaggccgaggtgggtggatcacgaggtcagtagattgagaccatcctggctaacacggtgaaaccccgtctctactaaaaatacaacaaattagccgggcgtgggggtgggcgcctgtagtcccagctactttggaggctgaggcaggagaatggcgtgaacccgggaggcagagcttacagtgagccgagatcgtgccactccacttcagcctgggtgacagagcgagactccgtctcaaaaaaaaaaaaagattctaggttttttaagtcagaaagtctcaaaagtcagaggagtgaggagcagtggacttttatgccatgctttcagaaagcaagctctggtctatgaatgaagaagaaaaatgagtggtccaggaaacataacttctagattgttttgtgcaatacttttttccgccatattctggttcctgtatacagtatatctgttcagtatcttaaaaattacaactgttttcatgattttgattgaagatttttttaactcagcccacccacttatggaagtaaagcagaaagggtctcaaagcaactcagaagcctcaggtgcatgatttaaaactcaacatatttatttaaagcagcatctgtcaggcccaaagctcacaacctccttttgggcattaaatttggcatcaaggctgggtgcggtggctcatgcctgtaatcccagcactttgggaggccaaggcagggagatcatttgaggtcaggagttcaagaccagcctgaccgacatggtgaaaccctgtctccactaaaaataaaaaaattagccgggtgtgatggcatgcgcctgtaatcccagctacttaggaggctaaggcaggagaattgcttgaacccaggaggcgaggttgcagtgagccaagatcataccacagcactccagcctgggcgacagaacgagactctatctcaaaaaaaaaaaaaaaaaagaaagaaaaattctttctataggccaggtgtggtggttcacacctgtaatccctagcactttgggaggctgagttgggaggatcactttagcccaggagatcgagaccagcctggacaacatagtgagaccctgtctctacttaaaacacaattagctgaccatggtgctgtgtgtctgttgtccccgctactcgagaaactgaggcaggaggatcacttgagcctgggagatagaggctgcagtgagccgtgataacaccactgcactccagcctgggcaacagaacaagaccctgtgtccaaaaaaaaaaaaagaaacttaaggagtttatattctagtggagacagtaaacaggaaaagtagaatatatagtatgctgtaattgctaaggagaaaaatggaggaaaggagatatggagtggcagtcccagttcaatgtttttaataggttggtcagggaggaatctgccaagaaagtggcatttgcatggagggcgagggtgggtggtgcagatatctagggaagcagtaacatcaagtgcaaagtggaccactcacctggcctgctccgagaactcaaggagatcttatggcttcatttagagtgagtgagaggtatactaataggagtgaggtccagtggtagggtgttttagggtcctgtaaagactatcatttgggttaaatgggatctggggttgtacgagacctttaggaggtttggcaagcctttgtttgaaaatgagtgtgatgagagagctcattatctgtctgagagcccattctaactccaggtagttcctactagtagaaaatagtttgattgggtgcagtggcccacatctataaccccaacactttaggaggctgaggtgggagaatcacttgaagtcaggaatttgagaccagcctgggcaacatgagacccttgtctctacaaaaaattttaaaaattaggtgggcgtggtgatgcacacctgtattgtagtcccagttacttgggaggctgaggtgggaggatcccttgagcccaggagtttgaggctgcagtgagccgtgatggtgctgctgcactccagcctcggtgacagagcaagagccagagtggggcgaggggagggcatggaatagttctttattagagttgaaatccgttttcctataatgtttgctcattgatcctagcagactgaatgaatccctttcatggcagtccttgggttatttatatgtaaatgaggggaatgctgcagtatagaacattccttctggatttcataagaaattgcaaataatctgttaccataactgtgttaacgagagctggctggcagatggatccctgcaagtaccatgggcactgtctttggttgaccctgttcagtcttcccatcagtgacttaatcagaggtgtgatatgtatttgcatagtagtgaggatttagaaaagcgagaagagttcaactggctaggatgatggaaaaaagaaaagatcaccttttaacagagataagtcatattcattgttccaaaaagtagaactggagggggaagatgtggcttaatgataacgtgtgtggaaactgccaaggaagttcagccgactgcaaggtcagagtaagtcactgcgtgggcttggctctgaattctgaggttatattactgattagggccagaacaggtgacaccaaagggtgggttcagtgacaactagagcatgcccagaggagagctataagaaagggaatggactacaaaacgaggtccatgaaataggaaggtccttagaagcagttccccctgagcgatcatccagcatctcccaagccacatgcctgaacccctagccctgtcctgtcccctcccgttaaaggctctgcccttttctgggtcctggagcctgggtcatagcgttggccattttcccagcacttccactcagttgactgcctcattgggtcagtttaccttcacaggatttcttaccttcatcccttctttctgagtccccacagtcaaccattcttcttgtacctttcctgagctattgcagcagattcctctctggtctccctctttctctcctacaggtgtccaaatcctaccctagagtttactaaacacagctcaggtttctctcatccccctcacctcacctttatttctgatgtgcccagtctgaaacattctctgtcctatttactaaaatccttcccttggtttatagcccatttccttcagaaaacctttctgtattctctttgaaaagagatttacttaggcacctgtagtcccagctgcttggaaggctgaggttggaagattgcttgagcccaggagtttgaggccagcctgggcaacatagtgaggccccatctctaaaaaagaaaaaaaaaaaaaaaaaaaggatttactcccccatcttggggaactccccttctgttccagcactcctgtcttggctccaactgtaccagaatggacacttatgcaaatgattgttgtcctcctactcagggctggttatacacgtttcccatatggtgtcccatatggatccatttttctagatagaaggtagctccaaacatagtgtggatctctcccatccagtcaacagcaccttcaccggcagcccatggcaaacacatgtgcaggttaactggatgagagccactttggaggctgctgttaaaacatggggactcgttgaaactttagatgataaaaccagagatcacagggagacagtttgggcctatcgtgaggaccatctctctaccaattttcttcccaaaaatgaaatggggagggctgggtggggtggcttacgcttgtaatcccagcactccaggaggccgaggcaggcagatcatttgaggtcaggagtttgagaccagcctgggcaacatggtgaaaccccatctccacccaaaaatacaaaaattagttgggcatggtggagcatgcctgtaatcccagctactcgggaggctgaggcaggagaatcgcttgcggaggttgcagtgagccaagattgtgccactgcattccagcctaggtaacagagcgagtctccatctcaaaaaaaaaaaaaggaaggaggaaggctccaacagagaggctccagaaacacttttgaaagtggcttttggccaggcacggtggctcatacctgtaatcccagcactttgggaggccgaggtgggaggcctcacaaggtcaggagatcgagaccatcctggctaacatggtgaaaccccgtctctactaaaaacacacacaaaaaattagccagacgtggtggcgggtgcctgtagtcccagctactcgggaggctgaggcaggagaatggcgtgaacctgggaggtggagcttgcagtgagcccagatcacaccactgcactccagcctgggtgactgagcgagactctgtctcaaaaaaaaaaaaaaaaaaaaaagtggcttttaaatttatagcactctaaagtggaatggatccctggatgtgtctaaagttatatcaagaggctggttttacagtgcttgacaatcagttgtcagtgttataggtagaatagcaattggagtcagactggggttttgatcctggctgcagcgttctttgttttttggctgtatgaccttgggcaagtgactaaacttctcagcttgttgtctgtgaagataaattatttacgtcagagggcagctgtgaggattaacagagataaaagtatacacagtgccaggattcagtattattagaattactttttaatggtattgaaggcagagaagcttaatttcaatatatatctctgaatttttactagggaccatcttaggtctcactgaaatgtggattcagagttcagcctcaatagttgctaaatggcctgcttccttacaccagcaaccagccccagtcattctgtatttgccaggccattcatatgtatgcactgatttcatccccacaggacaaggttttgacctgtcacacatgacctcacctctgtggcttgccagggttggtgtgaatagtttaaccaaggctatcgaaggcctaactgtagcgatagcagttaacctatgtaacttttttgagtcatttgaattatgtagagattggacctgtaatcccagcactttgggaggccaaggtgggaggattgcttaagccctggaggtcaaggctgcaatgtgccactgcactctagcctagacaacagagtgagaccctgtctcaaaaaaaaaaaaaaaattggaaatttgccgtatctgtgtaggtatgtgattctttggataaatgattcactgtatcttcctcaaaactaggttatttgaaagactgagatcattcaactgattgcactgactgccaactaattttgcaggagatgttgcagtaaagatcctaaaggttgtcgacccaaccccagagcaattccaggccttcaggaatgaggtggctgttctgcggtgagtagaaagctggcggtccagtccctctggagtgctggagtggggagtacaaggactgtagagttagtggactgtgccgcaggttgggacgggcaggcagttaggactcactgtggagtttctgtggttggatgctcctcccttgagagcaaagggatgtttcctttagtttatgtggttgtcaagcctttcgaagagcccctttttaggagaataccctcctctgggcacagtaaactcaatagcccaatttctgtctctgggttttggtttgaggtgggcagaaataggccctatttttacctttatttcccagaacccttttttttatagctgagttgccttattttagacttcagaacagtcagctttccaatctttcagtcactatttagacttgtaggaataagtcatataatggagacttctacaaggagtccttgtgacctccacaggagggtcatggagtgtacattgatgaaagagaatgtcctctctgtaagcaaggctggcactgaactgatggcccagtgaactaatggtgggcttctctttgctcagaatgccacccgggttatcagccgtgccatgtgtttgtttttgggactgggggtggtgttgggactgggggtggtgtcgacagcacagaacccactgtccacgggaaagcacagtagacctccctgagcactttcctcctccctctcctctcttcccctcccctccccagcaaaacacggcatgtgaacattctgcttttcatggggtacatgacaaaggacaacctggcaattgtgacccagtggtgcgagggcagcagcctctacaaacacctgcatgtccaggagaccaagtttcagatgttccagctaattgacattgcccggcagacggctcagggaatggagtgagtagatggtctgatgcctctctgggacccaggcatcaaatttgtccctaaattggaaccaggatcaggaaaagccttctagtccattaagcgattctgtgatatctttgcacaagcctctggcctgggctggaggggccaattatcaggaatgagttgttcaggttccagctgggtggggtggctcacacctgtaatcccagcactttgggaggccaaggccagtggatcacttgaggccagtagttttgagaccagccttgccaatatggcaaaaccctgtttctactgaaaatacaagaatgaaccaagtctggtggcacatgcctataatcccagctactcaagaactgggacagggagaatcgcttgaacattggaaagcagaggttgcggggagcttagatcacgttactgcactccaaccttggctgcagaagcgagactctgtctcaaaaaaaaaaaaagagaagttcaggttcctccttgggactgaacttcccccttggggctcagctttgggctctgcctgctaccctggctttatcagaaacctgagaatatagtggggtgcatgtaccttctgcttggacagctgtggcaatgccttctgctcagctgtctgaggcatggctgtcccacatgagggtttaagcagatgttgtttttgggataattttttttttttaattaaaaactttttcctggccaggcacggtggctcatgcccataatcccagcactttgggaggctgaggcgggtggatgacgaggccaggagttcgaaaccagcctggccaatgtggtgaaatctcatctctactaaaaatacaaaaattagctggttgtggtggcaggcgcttgtaatcccagctactcgggaggctgaggcagaagaatcacttcaacccgggaggcggaggttgcagtgagtggagattgtgccattgcactctagcctgggtgacagagccagactccatctgaaaaaaaaaaaaaaacccaaaaaaaccacacttttttccttagagacacaggttctcactctgtcacctatgctagagtgcagcggcgcaatcatagctcactgcatccttgaactcctgggctccagctatcctcttggctcagtctcataggttgctgggactgcaggcacatgctaccgtgcccagctaattttcgtgtattttgtagagtcggaggtctcactatgttgcccaggctggtctcaaactggactcaagtgatcctcccacctttcctggctagcctagggtagtgcttctcaaacttctcctctgaagtagaggagctcctcgtacccctagacatctgggagttactaagctatagctgtgcttgcaagtcctacataaattctcacactgtctttaaaattcatatggaagttgccttctgtgtattttaagaaatggaatgacttttcagaaaaattgagatataattcatacatcataaaattcccccttttaaaatgtacacctacctcagtgtttttctggtattgagttgtgcagccaccaccactatctaattttagaacattttcattatcccggaaagaaacacatgcccattgtattagtctgtttgggttgctctaaaggaagacctaagggtgggtaatttataaagaaaagaggtttatttgactcggggttctgcagactgtacaaaaagcatgacaccagcatctgtgtctggtgaggccctcaggaagctttcactcatggcagaaggcaaggggagccacgtgtgatgtggtgagagaaaggagcaagagagagagcatggagggaggtcccagactctttaataaccaggtttcatgtgagctaatagtgtgtgaactcactcgttactgcagggaggccaccgagccgtttgtgaggaatccatccccatgacccaaacacctgccacttaggtcccacctccaacactggggatcacatttcaacttgagatttggagtggacagatatccaaacaatatacccattagaggttacccaatacctcccacccacttgcagtctactttctgtttctatggattttgcctactttatagttcaatataaatggaatcatgtaagatataatatagtcaggtaacatataatgatgtttcggtcaatgaccacatataggaaggtggtcccacaagattataatactgtatttttactgtgccttttctatgtttggctatgtttagagacacaaatactcaccatgttacaaccagctacagtattcagtacactgagggccatacagttttgtagcctaagtgcaacacgttataccatttagccagggtgtgtagaaggctgtaccttcttggtttgtgtgaatacactttatgatgtgtgcatgatgacaagttggctaacaacacatttctcagaaggtatccctgccgttaagtgatgcttggctgtatataatacataagatatggtattgtgtgcctgggctcttagacctagcatagtattttcaaggttaatgtgtagcatgagtcactacttcattcctttctgtgtctgagtaacattccattgtatggatatgccacattattcattcatcatttatggacattgggttatcagaattactttagagtaaaactgatgcttgaagaagtgtcagcaatggtcaggcgccaggggcccatgcctgtaatccaagcattttggaggccaacatgggaggatcacttgagcccaggagtcaagaccagcttgggcaacagtgcaagaccctgtatctacccaaaaaaaaaaaaaaaaaaaaaaaggcggcatggtggcacatgcctgtggtcccggctactgggaggtgggaggatcacttgagcccaggaggttaaggctgcagtaagctattgactgcactccagtctccaaaaaaaaaaaaaaaaaggtgtaagcatgtttgtgctgtggcctcaccttcaggtaagcagtgatgtgaaccaggctgaacagcacagggtctatccctgtgtgtaacactccttggagccaggccttcagtggctttacttcttagctgtagtttaaaactgctttctactcatgcccctcaaacttatttttaataatttcttttcccttcacagctatttgcatgcaaagaacatcatccatagagacatgaaatccaacagtatcctttggttgttgagttcatttgactgctcggttctaaatttagggaaacagaagggaggctttctatcacaagtggctctcggtgccaggggatatctttttaaggaaagaggcagaggacaggaaaacagaaaagtcagaaaattagtaggcttggcctgtccctcagcagcttatgcctcacctggactgatgagagcgatgtttaggttaggttcctttctgagtttatctcagcaaaagtgatttggagagatttccgtaagcttgaaataggcataattttatcacactattagtaaatgtaacctgacggggattgggcttttgtcttaagtttatttctagtttgtggccagcgtgtgtatgtctatctgcttgttatgtggatagcaagtagctacaagccaaatgttgaaaggtttccaaaatcactaattaaaatagtctttcttgactgggcgtgatggctcacacctataatcccagcactttgggaggctgaggcaggtggatcacttgaggctaggagtttgagacttgcctggccaatgtggtgaaaccccatctctaaatttaaaaattagctgagtgtggtggcacgtacctataatcccagctactcaggaggctgaggcacgagaattgcttgaacctgggaggcagaggttgcagtgagctgagatcacgccactgcactccagccttggggacagagcaaggctgtgtctcaaaaaaataaataaataaaatggtctttctcaaaggtacataagtgggttcttcagaagtcactattagaagaggagaggggttgtttttatagaagagtaaatgaagaaaggtatttttaatgctgtgaggcgtgaaatttaacaattttgaatctgccaccctccacgagcctttccttgtgaaagaaagatggcattacaacccacgttttgcctcttgagcagtgagaggcatgatagttgtgttggattatgggacatggcctattttaggtacatgtctgaggtgtggaacacctttcagtggtggggtttttagcagccaaacattataccatgaaagcagacaccacagatttaaggaggtgtgaattcctgggcaccaacatcacaagttactttgtgtgtgttttgttttttaattttttgttcttttttaatttttttttcctcacaagtttgacttaaactgtatgacttctttacccagaagcgagccgacttcagttctcattttgaagtcactgagtggtaccgattctagtgaggaatttcttactacaacattgaacactcagtaagggatttgctattttgttaaccactcaagtttcagatggtgatttgagggcagaatacaggcagaaacgactgtaagctgtcaggccatccttggccctctggggagcactggagtgtggcctctgctcatcctgttagggtttcaagtacctgtattatgtggaaaggtcacaaggccagagacccagcacctagatgtgcaaatggggagaagaagcagggaagaaacgctggcttgcttttggctagggccaaataatctggcacattgaccaatccctgcctgtcttctggaagaaggtgcatttcaaaagcactttaaagaacttcagaaaccttaggaagttcagtgcagagaggctgtgacagaggtaaggtggagagattaccgtgttataaagaactttgggatatttttcaaaattaacctgaccattcttttgaaaccagagtccttaacaagcattgagatatatttctccatgaaggcttaacagtgaaaattggagattttggtttggcaacagtaaagtcacgctggagtggttctcagcaggttgaacaacctactggctctgtcctctggatggtgagaatctgggctcccaccagcagtctctggtatagggcaaaaggaatgccttggagatttatgtgcaaacttaaaagcgtttctgtacatttccccgaaatccacatgacccctagtgacagccagcctcagggcaattgtagattttcttgaggaagctgttgatcagaaccactgtgaagcttagtgtggagaggagttaataagctgggtgacagaaatgctgggtcttggtcctttaaagacaaggattcctgagctgttttaaccagtgcctgagttggagtcctttgggggaaaagctatgtggggactgaagaatggactcattcataactaatgaaagggacagcctggcccctagatgtctgtgaggcctgtcatatggtgataaatgcacttttgtcatatggtgatacatgtaggccccagaggtgatccgaatgcaggataacaacccattcagtttccagtcggatgtctactcctatggcatcgtattgtatgaactgatgacgggggagcttccttattctcacatcaacaaccgagatcaggtaagtctgtgctggtgcgaaaggacccaactcgtgggagcccctgggcctccgccagcctaagcagctagagggttaggacttgttattatctgttgttcattcaccccccattagctcagctgttttctttcccttagatcatcttcatggtgggccgaggatatgcctccccagatcttagtaagctatataagaactgccccaaagcaatgaagaggctggtagctgactgtgtgaagaaagtaaaggaagagaggcctctttttccccaggtaaggctcagggctgctagaatgtgattaaagcatgggttggttcgtaaagatggcaatataaggtgggagtgttttgttttgttttatagggaggggacccaggtcctctacaagatggtggggggcagggtacatcctgtgtctttgagacacagctaatgagagcattcttgggctttgtttcagatcctgtcttccattgagctgctccaacactctctaccgaagatcaaccggagcgcttccgagccatccttgcatcgggcagcccacactgaggatatcaatgcttgcacgctgaccacgtccccgaggctgcctgtcttctagttgactttgcacctgtcttcaggctgccaggggaggaggagaagccagcaggcaccacttttctgctccctttctccagaggcagaacacatgttttcagagaagctgctgctaaggaccttctagactgctcacagggccttaacttcatgttgccttcttttctatccctttgggccctgggagaaggaagccatttgcagtgctggtgtgtcctgctccctccccacattccccatgctcaaggcccagccttctgtagatgcgcaagtggatgttgatggtagtacaaaaagcaggggcccagccccagctgttggctacatgagtatttagaggaagtaaggtagcaggcagtccagccctgatgtggagacacatgggattttggaaatcagcttctggaggaatgcatgtcacaggcgggactttcttcagagagtggtgcagcgccagacattttgcacataaggcaccaaacagcccaggactgccgagactctggccgcccgaaggagcctgctttggtactatggaacttttcttaggggacacgtcctcctttcacagcttctaaggtgtccagtgcattgggatggttttccaggcaaggcactcggccaatccgcatctcagccctctcagggagcagtcttccatcatgctgaattttgtcttccaggagctgcccctatggggcggggccgcagggccagccttgtttctctaacaaacaaacaaacaaacagccttgtttctctagtcacatcatgtgtatacaaggaagccaggaatacaggttttcttgatgatttgggttttaattttgtttttattgcacctgacaaaatacagttatctgatggtccctcaattatgttattttaataaaataaattaaatttaggtgtaatggctggctgttacctccttttaaagtaattctgagctcacaacttgaatgccccatttgttcaccctcttcaggagcagaattcaagaacaggaaatgtgcccagagcctaggctgggaatgaatttgtaatttaacctttgtactctttgtaaacctctactgaagagttaagtataaaaattaattaagcagaaagtactctaaactcagctaataccttaagtaatacattttataaactatttatttatttggtaggtacagcttttttaaacacaaaaatagattagataaattccagcttggaacaagctagtgctggttcacaaggttatgctcacccttcaattaaaatcaaaatgactacaagacttgccatcagctctcttcaggaccactgctgggtcagaatcagaaaccttgggtgccatgaaatttttacaaaatttcaaatcaaagccaggctttgcagctagataatagatcacttgagtacgaaccacacatgtaagtgcacgtatatttgagttctcaatacaattaccctgatgggcaagaacccacaggtgagagcagaggcttggttcccctagagggccctggctggaggccccaacaccaaccagacgacaggagggccagactgctacccagtactgtacctcctgctccttcaagagcctccctaagggagaagaagatctatacttccactttgtttgctgcacatgtggcaacaagattgctaccctgatttgggacacttgagagaacttgaaaaaaatgaccacccttaaagccctagaaaaaagttgtatgtttgttaacagctatgctgcgctcactttgcattgtgtgttcttgaaagctctgtataaatcaaaattttgacgacacactaaatacactagagaaatacactatagaggaatccttttatagggctgaagactcctttggtaagaaaaatatgctgcattaggggcagctgcaagtttactatttctggggaagaaaagatcaaaggtaagagccaggtttgttttttaaagcaatcaatccaaacagtttgggtgtttgttagttgttacccctgaggggcttgaggtgtaactatatcagctataaaaatagcaattccatacatttaattaggttactttatatctttcactcttccccatggctgtaataatggagattgaatgagactaaggctaagcccaactccactcaaatccaagtcacacgtcaccttggctgcagtacagggaagctccgcacaccctggcttgggaaagtttcggccgatggagcccaagatgcagggcaaccatctactctttagggttctgatgattccactccagaaaggtgcatgaagaggtccccgagctctgtcatgtcgacatcttcattgttggggacatgccggctttctcggttctcgatgaaatcccagagccgcactgaattaaagaactgcaaaaacagccagtggacatgcctggttactgctaagagcaacaggaaggctgcgttccttgatcgttcttttgcctaccccatttctctgccaggaacggtacctggaaatgcccacagctgctaagtgtccccaactagagatggctaaagtccttaccctcacagtgccttgagaactgagctgtttccgaggtttctcaggctctgctagccgcccatcggggtaagcatggcgataaagacattt

SEQ ID NO: 24978 - DNA, 2515 bp, Homo Sapiens
ctacaggcactgggaacttgcaagcagccagggaacgctgaaaatagcacgtctttttctttctttgtgttcaaaactattttctttcttcaccagattttgttttcctccccccgctgcagttgtttcccattagtaactcgatctctcagagcagtaagattcgccttctacgcctctttttccctccgcccgaattgtttgttttctgcacatctccttcagggagccgctgaggcttccccccaactcttcccagttctttttgcttcccctcggccccccaagcagaccgatttccactccatctgtttcttctcctcctttctctccctctttccctccatcctcgagcgtctctgcgctcctacagggcagccctctctggtcccttgcctccttcactcggatgagctgaaagccccgggcgtgtgtatatggaaatagtggggtgccgagcagaagacaactcgtgtcctttccgccccccagccatgctctttcacgggatctccggaggccacatccaaggcatcatggaggagatggagcgcagatccaagactgaggcccgtctggccaaaggcgcccagctcaacggccgcgacgcgggcatgcccccgctcagcccggagaagcccgccctgtgcgccggctgcgggggcaagatctcggacaggtactatctgctggctgtggacaaacagtggcatctgagatgcctgaagtgctgtgaatgtaagctggccctcgagtccgagctcacctgctttgccaaggacggtagcatttactgcaaggaggattactacagaaggttctctgtgcagagatgtgcccgctgccaccttggcatttccgcctcggagatggtcatgcgcgcccgagactctgtctaccacctgagctgcttcacctgctccacttgcaacaagactctgaccacgggcgaccatttcggcatgaaggacagcctggtgtactgccgcgcccacttcgagaccctcttgcaaggagagtatccaccgcagctgagctacacggagctggcggccaagagcggcggcctggccctgccttacttcaacggtacgggcaccgtgcagaaagggcggccccggaagcggaagagcccagcgctgggagtggacatcgtcaattacaactcaggttgtaatgagaatgaggcagaccacttggaccgggaccagcagccttatccaccctcgcagaagaccaagcgcatgcgaacctctttcaagcatcaccagctccggaccatgaaatcctactttgccatcaaccacaacccggatgccaaggacctcaagcagcttgcccagaaaacaggtctgaccaaaagagttttgcaggtttggttccaaaacgcacgagccaaattcagaaggaaccttttgcggcaggagaatgggggtgttgataaagctgacggcacgtcgcttccggccccgccctcagcagacagcggagctctcactccacccggcactgcgaccactttaacagacctgaccaatcccactatcactgtagtgacatccgtgacctctaacatggacagccacgaatccggaagcccctcacaaactaccttaacaaaccttttctaacattggttttttttttttagtttttaaattcttcctcttctttttattattattctaattattattattttattatttacaagactttttttttcttctaacccacaagatatttggggaataaaaataacagcttggtgtgtagcatctgcagccacttggcaaatgagtttacagtattgtctcctttaagtgaatatattttgtctacaaagtgtatttggatttaaaaaaattaattaggtctttcagttggtaaggagagtttttgaataattctaataagtgcctcttaaaattgtatgttacttatttccagaatctcgaagaaaaaagaaaaaagagtggtattattatgggcaaataatcatattcccacttaaatgattaggttaataaagaaccagataattaattagttactttttaaatcttgcaattgtatgtgtgattatggagttttgaaaacgttacattttttaaatcttaaaactgaaaacttgtttttagtatttctatttcttacctgaactgttaattcaagtgaggaatatgatgaaataaaagcattaactacagacattttaaatagtaatgattaattaggtgagaaatctattacaggaatgtgacttttccttctcttaggggtgtacaactctaaaaactttttacttggttatttgtttttcaacatttgaaaaatacttaagctccctatgtatccatgaaaattccgcattgattttgacattccatacttttaacctcctaaagctaaaaacaatagctcggaaaccattctttctagttactttttttcccagggaaaatggaaataagcaaaatataatgttttaagaagtaaaaaaatcaatataatt

SEQ ID NO: 24979 - DNA, 3129 bp, Homo Sapiens
atgcccgggatcgtggtgttccggcggcgctggtctgtgggcagtgatgacctcgtcctaccagccatcttcctctttctcctgcataccacctggtttgtgatcctgtccgtggtgctcttcggcctggtctataacccgcacgaggcctgctccctgaacctggtggaccacggccgcggctacctgggcatcctgctgagctgcatgatcgctgagatggccatcatctggctgagcatgcgcgggggcatcctctacacggagccccgtgactccatgcagtacgtgctctacgtgcgcctggccatcctggtgatcgagttcatctacgccatcgtgggcatcgtctggctcactcagtactacacctcctgcaacgacctcactgccaagaatgtcaccctcggaatggttgtctgcaactgggtagtcatcctcagtgtgtgcatcactgtcctctgcgtcttcgaccccacgggccgcacctttgtcaagctgagagccaccaagaggaggcagcgtaacctgcggacctacaacctgcggcaccgcttagaggagggtcaagccaccagctggtcgcgccggctcaaagtgttcctctgctgcacgcggacgaaggactcccagtcagatgcctactcagaaatcgcctacctctttgcggagttcttccgggaccttgacattgtgccatccgacatcattgctggcctggtgctgctccggcagcggcagcgggccaagcgcaacgccgtgctggacgaggcaaacaatgacatcttggccttcctgtctgggatgccggtgaccagaaacaccaagtacctcgacctcaagaattcacaagagatgctccgctacaaagaggtctgctactacatgctctttgccctggctgcctacgggtggcccatgtacctgatgcggaagcccgcctgcggcctctgccaactggctcggtcctgctcgtgttgcctgtgtcctgcgaggccgcggttcgcccctggagtcaccatcgaggaagacaactgctgtggctgtaatgccattgccatccggcgccacttcctggacgagaacatgactgcggtggacatcgtctatacctcctgccatgatgcggtctatgaaacgcccttctacgtggcggtggaccatgacaagaagaaagtggtgatcagtatccgggggaccctgtcccccaaggatgccctgactgacctgacgggtgatgctgagcgcctccccgtggaggggcaccacggcacctggctgggccacaagggtatggtcctctcagctgagtacatcaagaagaaactggagcaggagatggtcctgtcccaggcctttgggcgagacctgggccgcggaaccaaacactacggcctgattgtggtgggccactccctgggcgcgggcactgctgccatcctctccttccttctgcgcccacagtatccgaccctcaagtgctttgcctactccccgccagggggcctgctgagtgaggatgcaatggagtattccaaggagttcgtgactgctgtggttctgggcaaagacctcgtccccaggattggcctctctcagctggaaggcttccgcagacagctcctggatgtcctgcagcgaagcaccaagcccaaatggcggatcatcgtgggggccaccaaatgcatccccaagtcggagctgcctgaggaggtagaggtgaccaccctggccagcacgcggctctggacccaccccagcgacctaactatagccctctcagccagcactccactctacccgcccggccgcatcatccacgtggtccacaaccaccctgcagagcagtgctgctgctgtgagcaggaggagcccacatactttgccatctggggcgacaacaaggccttcaatgaggtgatcatctcgccagccatgctgcatgagcacctgccctatgtggtcatggaggggctcaacaaggtgctggagaactacaacaaggggaagaccgctctgctctctgcagccaaggtcatggtgagccctaccgaggtggacctgactcctgagctcatcttccagcagcagccactccccacggggccgcccatgcccactggccttgccctggagctgccgactgcagaccaccgcaacagcagcgtcaggagcaagtcccagtctgagatgagcctggagggcttctcggaggggcggctgctgtcgccagtggttgcggcggcggcccgccaggacccggtggagctgctgctgctgtctacccaggagcggctggcggcggagctgcaggcccggcgggcaccactggccaccatggagagcctctcggacactgagtccctgtacagcttcgactcgcgccgctcctcaggcttccgcagcatccggggctcccccagcctccacgctgtgctggagcgtgatgaaggccacctcttctacattgaccctgccatccccgaggaaaacccatccctgagctcgcgcactgagctgctggcggccgacagcctgtccaagcactcacaggacacgcagcccctggaggcggccctgggcagtggcggcgtcactcctgagcggccccccagtgctgcggccaatgacgaggaggaagaggttggcggtgggggtggcgggccggcctcccgcggggagctggcgctgcacaatgggcgcctgggggactcgcccagtcctcaggtgctggaattcgccgagttcatcgacagcctcttcaacctggacagcaagagcagctccttccaagacctctactgcatggtggtgcccgagagccccaccagtgactacgctgagggccccaagtcccccagccagcaagagatcctgctccgtgcccagttcgagcccaacctggtgcccaagcccccacggctctttgccggctcagccgacccctcctcgggcatctcactctcgccctccttcccgctcagctcctcgggtgagctcatggacctgacgcccacgggcctcagtagccaggaatgcctggcggctgacaagatccggacttctacccccactggccacggagccagccccgccaagcaagatgagctggtcatctcagcacgctag

SEQ ID NO: 24980 - DNA, 1176 bp, Homo Sapiens
atgttctctccctggaagatatcaatgtttctgtctgttcgtgaggactccgtgcccaccacggcctctttcagcgccgacatgctcaatgtcaccttgcaagggcccactcttaacgggacctttgcccagagcaaatgcccccaagtggagtggctgggctggctcaacaccatccagccccccttcctctgggtgctgttcgtgctggccaccctagagaacatctttgtcctcagcgtcttctgcctgcacaagagcagctgcacggtggcagagatctacctggggaacctggccgcagcagacctgatcctggcctgcgggctgcccttctgggccatcaccatctccaacaacttcgactggctctttggggagacgctctgccgcgtggtgaatgccattatctccatgaacctgtacagcagcatctgtttcctgatgctggtgagcatcgaccgctacctggccctggtgaaaaccatgtccatgggccggatgcgcggcgtgcgctgggccaagctctacagcttggtgatctgggggtgtacgctgctcctgagctcacccatgctggtgttccggaccatgaaggagtacagcgatgagggccacaacgtcaccgcttgtgtcatcagctacccatccctcatctgggaagtgttcaccaacatgctcctgaatgtcgtgggcttcctgctgcccctgagtgtcatcaccttctgcacgatgcagatcatgcaggtgctgcggaacaacgagatgcagaagttcaaggagatccagacggagaggagggccacggtgctagtcctggttgtgctgctgctattcatcatctgctggctgcccttccagatcagcaccttcctggatacgctgcatcgcctcggcatcctctccagctgccaggacgagcgcatcatcgatgtaatcacacagatcgcctccttcatggcctacagcaacagctgcctcaacccactggtgtacgtgatcgtgggcaagcgcttccgaaagaagtcttgggaggtgtaccagggagtgtgccagaaagggggctgcaggtcagaacccattcagatggagaactccatgggcacactgcggacctccatctccgtggaacgccagattcacaaactgcaggactgggcagggagcagacagtga

SEQ ID NO: 24981 - DNA, 2579 bp, Homo Sapiens
cggcggcggccgttgcagcggcggcggcgagagcggcgggagcccgaggcggcggcgctcgcggcccatcgtggggcccgagctgtgcgcctcggctcggagcccggaccgggcgggggcgccgacgtgcctcagcctgccttcgcgagggaggcgggagtgagcagaaaggcttagggcccagggggcggggaaggggggccgggcctggatccggcggggaggccgagccggaggccggaccgtggctcgcgctgtccccgggacgcggatcgaacgttggcggcgcggatcgcacgtcggcggccggtggaacgcgggagctgggcggcgcgcggactggggccatggcgtctgtgcaggcgtcccgccgccagtggtgctacctgtgcgacctgcccaagatgccgtgggccatggtgtgggacttcagcgaggccgtgtgtcgcggctgcgtgaacttcgagggcgcggaccgcatcgaactgctcatcgatgccgcccgccagctcaagcgcagccacgtgctccccgagggccgctcgcccgggcccccggcccttaagcacccggccaccaaggacctggcggcggcagccgcacaggggccccagctgccgcccccgcaggcccagccccagccgtcagggaccggcggcggcgtgtcgggccaggaccgctatgacagggccacatcatcaggccgcctccccctgccctcgcccgccctggagtacactctggggtcccgcctggccaatgggctgggccgtgaggaggccgtggctgagggggcgcgaagggccttgcttggctccatgcctggcttgatgccccctgggctgctggcagctgcagtgtctggcctgggaagccgaggcctgacgctggcacccggcttgagtcctgcccgtcccctcttcggctccgatttcgagaaagagaagcagcagaggaatgcggactgtctggcagaactgaacgaggccatgcgaggccgggcagaggaatggcacgggcgccccaaagcagtgcgggaacagctactggcgctgtccgcctgcgccccgttcaatgtgcgcttcaagaaggatcacgggctggtggggcgagtgttcgccttcgatgctactgcccgtcctccaggatacgagttcgagctgaagctcttcaccgaatacccctgtggttccggcaatgtgtacgccggcgtcctggcagtggctcgccagatgttccacgatgctctgcgggagccgggcaaggcactggcttcttcgggcttcaagtacctcgaatatgaacgccggcatggatcaggagaatggcggcagctgggcgagctgcttaccgacggcgtccgcagcttccgcgagccagctcccgcggaggccctgccccagcagtacccagagccggcccctgcggctctctgtggcccacccccgcgagccccatcccggaacctggcgcccacgccgcgccgtcgcaaggcatcccccgagccggagggcgaggcggctgggaagatgaccaccgaggagcagcagcaacggcactgggtggcacccggcggcccgtactccgctgagacccctggtgtgccctcgcccattgccgccctgaagaatgtggccgaagccctgggccactcacccaaggaccctggcggaggcggggggcctgtgcgtgcagggggcgccagccctgcagcctcctccacggcccagccgccaacccagcatcgccttgtggcccgcaacggcgaagcagaagtcagtcccacagcgggggccgaagctgtcagcgggggtggcagcggcactggggcgacccctggggcccccctgtgctgtaccctgtgcagggagcggctagaagacacccacttcgtccagtgcccctcggtgcccggacacaagttctgctttccctgctcccgggagttcatcaaggcgcagggcccggccggggaggtgtactgcccgagcggagacaagtgcccgctggtcggctcctccgtgccctgggccttcatgcagggcgagatcgccaccatccttgctggagacatcaaagttaagaaagaacgggacccctaggctaccactgcctccaggctactgccctctgcccctttgccacccaccgctgccgcggataaattattccctccccgacccagcccagtgccacctctatctgtgtacatactcccttcttccacccagatgggtcccctggggtagatgcattgtgggtggggggagaaagcttgtggctcctgtccgagggggtgtttggggtcccttggcccctccagtttccctctgtcctccttggcttggctttgctgctgcttgtagttgggggagaggtgcccccctcctccttgagaagggacctcctgaaaactcgctctttataaacgaggcaaaagcatttaattcccacccccccaccccccgctcccttctgctccttcaataaaccgaaagatgggttttttttttccaaaaaaaaaaaaaaaaaaaaaaaaaaaaaaaaaaaaaaaaaagaaaaaaaaaaaaaaaaaaaaa

SEQ ID NO: 24982 - DNA, 3973 bp, Homo Sapiens
cggacggggccgccccgatgggacgccgcgctccggcccctgcgcgccgctgagccgagcgccccccgctgccgagacccccgccgccaccgccagccgctgccccctcgcccccgcccgggccgggagcctcgtccccgtcccccggaaagctggatttccgaggctggaggcgcctggccggctgggtggggaccaccatgggcaacgcggccggcagcgccgagcagcccgcgggccccgccgcgccgccccccaagcagcccgcgcctcccaagcagccgatgcccgcggccggagagctggaggagaggttcaaccgcgccctgaactgcatgaacttgcccccagacaaggtccagctgctgagccagtatgacaacgagaagaagtgggagctcatctgtgatcaggagcggtttcaagtcaagaatccccccgcagcctacatccagaagctgaagagctatgtggatactggtggggtcagccgaaaggtagcagctgattggatgtccaacctggggtttaagaggcgagttcaggagtccacgcaggtgctacgggagctggagacctccctgaggaccaaccacattgggtgggtgcaggagttcctcaatgaagagaaccgtggcctggatgtgctgctcgagtacctggcctttgcccagtgctctgtcacgtatgacatggagagcacagacaacggggcttccaactcagagaaaaacaagcccctggagcagtctgtggaagacctcagcaagggtccaccctcctccgtgcccaaaagccgccacctgaccatcaagctgaccccagcccacagcaggaaggccctgcggaattcccgcatcgtcagccagaaggacgacgtccacgtctgtattatgtgcctacgcgccatcatgaactaccagtctggcttcagccttgtcatgaaccacccagcctgtgtcaatgagattgctctgagcctcaacaacaagaaccccagaaccaaggctctggtgctggagctgctggcggccgtgtgcttggtgcggggaggacatgacatcatccttgcagcctttgacaacttcaaggaggtgtgtggggagcagcaccgctttgaaaagctgatggaatatttccggaatgaggacagcaacatcgacttcatggtggcctgcatgcagttcatcaacattgtggtacattcggtggagaacatgaacttccgtgtcttcctgcaatatgagttcacccacttgggcctggacctgtacttggagaggcttcggctcaccgagagtgacaagctgcaggtgcagatccaggcgtacctggacaatatttttgatgtgggggcgctgctggaggacacagagaccaagaacgctgtgctggagcacatggaggaactgcaggagcaagtggcgctgctgacagagcggcttcgggacgcggagaacgaatccatggccaagattgcagaactggaaaaacagctaagccaggcgcgcaaggagttggagaccctgcgggagcgcttcagcgaatcgaccgccatgggcgcctccaggcgtcccccagagcctgagaaagcgcctcccgctgccccgacgcggccctcggccctggagctgaaggtggaggagctggaggagaaggggttaatccgtattctgcgggggccgggggatgctgtctccatcgagatcctccccgtcgctgtggcaactccgagcggcggtgatgctccgactccgggggtgccgaccggctcccccagcccagatctcgcacctgcagcagagccggctcccggagcagcgccaccgccgccgcccccactgcccggcctcccctccccgcaggaagccccgccctctgcgcccccacaggccccgcctctccctggcagcccggagcccccgcctgcgccgccgctgcccggagacctgccgcccccacccccgccaccgccaccacctccgggcactgacgggccggtgcctccgccgccgccgccgccgccgccgcctcccggaggtcctcctgatgccctaggaagacgcgactcagaattgggcccaggagtgaaggccaagaagcccatccagactaagttccgaatgccactcttgaactgggtggcactgaaacccagccagatcaccggcactgtcttcacagagctcaatgatgagaaggtgctgcaggagctagacatgagtgattttgaggaacagttcaagaccaagtcccaaggccccagcctggacctcagcgctctcaagagtaaggcagcccagaaggcccccagcaaggcgacactcattgaggccaaccgggccaagaacttggccatcaccctgcggaagggcaacctgggggccgagcgcatctgccaagccattgaggcgtacgacctgcaggctctgggcctggacttcctggagctgctgatgcgcttcctgcccacagagtatgagcgcagcctcatcacccgctttgagcgggagcagcggccaatggaggagctgtcagaggaggaccgcttcatgctatgcttcagccgcatcccgcgcctgccggagcgcatgaccacactcaccttcctgggcaacttcccggacacagcccagctgctcatgccgcaactgaatgccatcattgcagcctcaatgtccatcaagtcctctgacaaactccgccagatcctggagattgtcctggcctttggcaactacatgaacagtagcaagcgtggggcagcctatggcttccggctccagagcctggatgcgctgttggagatgaagtcgactgatcgcaagcagacgctgctgcactacctggtgaaggtcattgctgagaagtacccgcaactcacaggcttccacagcgacctgcacttcctggacaaggcgggctcagtgtccctggacagtgtcctggcggacgtgcgctccctgcagcgaggcctagagttgacacagagagagtttgtgcggcaggatgactgcatggtgctcaaggagttcctgagggccaactcgcccaccatggacaagctgctggcagacagcaagacggctcaggaggcctttgagtctgtggtggagtacttcggagagaaccccaagaccacatccccaggcctgttcttctccctctttagccgcttcattaaggcctacaagaaagctgagcaggaggtggaacagtggaaaaaagaagccgctgcccaggaggcaggcgctgataccccgggcaaaggggagcccccagcacccaagtcaccgccaaaggcccggcggccacagatggacctcatctctgagctgaaacggaggcagcagaaggagccactcatttatgagagcgaccgtgatggggccattgaagacatcatcacagtgatcaagacggtgcccttcacggcccgcaccggcaagcggacatcccggctcctctgtgaggccagcctgggagaagagatgcccctctagcccctcagatctgcggaaccagccctacatccgcgcagacacaggccgccgcagtgcccgtcggcgtcccccgggccccccactgcaggtcacctccgacctctcgctgtagccgctatttctgcaggtggattctgcaggggtgtggggccgtggacaggctgaggctcaaggaaggtggtcctcagctcggctggccgggcagcccctcctccgctgtggcccgcctcaaacgggctggtgcatcctcctcttggccacagagggcagcatcgcccgccccttcccccaaatgctgcttgcagcacccaccctaaagccccctccaaatagccatacttagcctcagcaggagcctggcctgtaacttataaagtgcacctcgcccccgcaagccccagccccgaggaccgtccatggaccttatttttatatgagattaataaagatgtttgcaaaaaaaaaaaaaa

SEQ ID NO: 24983 - DNA, 2298 bp, Homo Sapiens
aagaagagagaagagagacaaagatcactacagaccaaaacagaagaagaagaaaaaaaagaaaaagaaatctaagcaacatgactattcagactatgaagacagttcccttgaatttttggaaaggtgctcttctccactaactcgatcttctgggagttctctggcttcacgaagcatgtttacggagaaaactacaacctatcagtacccaagggcaattctatccgttgatcttagtggtgaaaacttatcagatgtagacttcctagatgattcttcaacggagagtttgcttctgagtggggatgaatacaatcaggactttgattcaaccaattttgaggaatctcaggatgaggatgatgctcttaatgaaattgtgcgatgtatttgtgagatggatgaggagaatggcttcatgatccagtgtgaagagtgcttgtgttggcaacacagcgtgtgcatggggctgctggaggagagcattccagagcagtacatctgctatatctgccgggacccaccaggtcagaggtggagtgcaaaatatcgttatgataaggagtggttgaataatgggagaatgtgcgggttatcatttttcaaagaaaattattctcatctcaatgccaaaaagatagtttctacacatcacctgcttgctgatgtctatggtgttacagaagtgctacacgggctacagctgaagattggaatactaaagaataaacatcatcctgaccttcatctctgggcttgttccgggaagcgaaaagaccaagatcaaataatagctggggtggagaaaaaaatagctcaagacacagttaatcgagaagaaaagaaatatgtacagaaccataaagaaccacctcgtttgcccctaaaaatggaaggaacttatataacaagtgagcatagctatcaaaagccacaaagttttggtcaggactgtaaatctctcgcagaccctgggagctcagatgatgatgatgttagtagtttggaagaagaacaagaattccacatgagaagtaaaaacagtttacagtactcagcaaaagaacatggaatgcctgaaaagaatccagctgaagggaatacagtatttgtttataatgataaaaagggcaccgaagacccaggagactcacatcttcagtggcagctcaatctccttacacacatagaaaatgtgcagaacgaagttaccagcaggatggacctaatagaaaaagaagtcgatgttctggaaagctggcttgatttcacaggggagttggagccaccagatcctcttgcaagattgccccaacttaaacgccacataaaacagctcctaattgacatgggcaaagtacagcagatagcaactctttgctctgtatgacaacagtgaacacttaatgaaagaatgtggctttcttcagtcaaagcatttttattatccacgtgatggctaagtggataatttaaaagcttagtaatgtctggtcattcactgatttgtgatgtcaataggatggcaccttggaaagaaaaatgaagaacaactttatcaaggaagctagtatttaaaaacaaattcatgagcaagctgcaaatgagaatgtgttatatgccaaggaacaatgaagtagaatataatgtatactaagggatttcaagttctcagaatttttgagtagttgcttacgtgaagctcaagatacctgtagaaagaaatatggtatatttgtatagtttttaatagaaagatctatgtttataaaccagcacttggccaaaaacaaaattgtaaaggaaatttaaattctggagaattctacagggttgctctaagaactgtcttctcagcagttgatccagctgtacggaaatttagggtatttaaacttttaaaggatcatgagctgtttcttgggcgatgaatgttctcaatcagaaaactgacagtagaaatctcacttctggggaaaacagttgtggaattcttacttcattatgaatgtatttaaaaaacaaacaccaaataattggaatatattgcaggcattaagctcattaaaaacaaactggcttgcagaagggtccgatgtgccaagtgatcatgattctgctggaaagaggattttaaatattgtgggagttctcccaccctaagtcttacataatgccaccagtccatccaaaacctatatatcacctatactatatatatcatatatatagttgaatggcagtattcaggctcaacgtacagtttgatcctgagtatgcttggtgtttgccttc

SEQ ID NO: 24984 - DNA, 3483 bp, Homo Sapiens
taacgggcagtagagtgtccggcttcggtgccgagtgccaccgcgagtgggccgagacgcggagggaggcgcggccggagctcgggtcgccgacgctggccaggaccgcgcttcttcccggcggcaggcggcgcggtccccgtgactctcagaagccgcccgatgtagagccgcttctttgtctcatacccctgaccattcgtgcgtggcacggagccgggtatctgcgggtacagcgatgaacagggcagacgtggccaggtgagcggcgctgctgaagcctggtttaacacgaaaggccacactaccatcacccctttctccaaccctgaaaaacagttcctgagacctgaactattgaccatcattttaatcggaccaactgcagctgtaacaagcttctctttggggtcacaatgaccactgcaggcaggggaaatttaggcctcatccccaggagcactgctttccagaagcaagaggggcgcctgactgtgaagcaggagccagcaaaccagacctgggggcagggcagcagtctccagaagaactatcctcctgtctgcgaaatcttccggctacacttcaggcaattgtgttaccacgagatgtctgggccgcaggaagcattgagccggcttcgggagctctgccgctggtggctcatgccagaggtgcacaccaaggagcagatcctggagctgctggtgcttgagcagttcctgagcatcctccctggggagctccggacctgggtgcagctgcatcaccctgagagtggtgaggaggctgtggctgtggtggaggatttccagagacacctcagtggatcagaggaggtttcagccccagcacagaaacaggaaatgcattttgaggagacaacagctctgggtacaacaaaggaatctcctcctacctcacccctcagtgggggctcagcccctggagcccacctggagcctccttatgacccagggacacaccacctccccagtggggacttcgctcaatgtacttctccagttcctacccttcctcaagtggggaactcaggagaccaagcaggggcaactgtacttcggatggtcaggccccaggatactgtggcatatgaggacctatctgtagactacactcagaagaaatggaaaagtctcacactcagtcagagagccctgcagtggaacatgatgccagaaaatcaccatagcatggcctccttggcaggtgagaacatgatgaagggttcagagttgactccaaagcaggaattttttaaaggatcagagtcatctaacaggacatcagggggactctttggggtggttcctggggcagcagagactggagatgtttgtgaagatactttcaaggagttagaaggacaaacctcagatgaagaagggagcagactagaaaatgatttcttggaaataacagatgaagataagaaaaaatccacaaaagacagatatgacaaatataaggaagttggggaacatccacctctgtcttccagtcctgttgaacatgaaggagttttaaagggacagaaatcctatcgatgtgatgaatgtggcaaagctttcaatcggagttctcaccttattggccatcagagaatccacactggagagaaaccctatgagtgtaatgagtgtgggaagaccttcaggcaaacctcccagctcattgttcatctcagaacccacacaggggaaaaaccctatgaatgcagtgagtgtggaaaggcctataggcacagctcccatctcattcaacaccagagactccataatggggagaaaccctataaatgtaatgaatgtgcaaaagcctttactcagagttcccgactcactgaccaccagagaacccatactggggagaaaccttatgaatgcaatgagtgtggagaggcattcattcgaagcaaaagtcttgctcgacatcaggtcctgcacactggtaagaaaccttacaaatgcaatgagtgtgggagagcattctgttccaatagaaatctcattgaccatcagagaatccacactggggagaagccttatgagtgtagtgaatgtggcaaagccttcagtcggagtaaatgtcttattcgacatcagagcctccatactggggaaaagccatacaaatgtagtgaatgtgggaaagccttcaatcagaactctcaactcattgagcatgagcgaattcatactggagaaaaaccttttgaatgtagcgagtgtggtaaggcatttggtctgagtaaatgtcttattcggcaccagagacttcacacgggtgaaaagccctataaatgcaatgagtgtggaaaatccttcaatcaaaactcacaccttattatacaccagagaattcacactggtgagaaaccctatgaatgtaatgagtgtgggaaggtattcagttatagctccagccttatggtacatcagagaacccatactggggaaaaaccctataaatgcaatgattgtgggaaagcttttagtgacagctcacagcttattgtacaccagagagtccacaccggagagaaaccttatgaatgtagtgaatgtgggaaagcctttagtcagcgttccacttttaatcaccaccagcgaactcacactggagagaagtcctcaggtctggcttggtcagtttcttaaggtatggttctctgagacagagagcaacgacctttgagttaagctgtctttataagcaggatgctcatagtggtttcccggagccagtagtcacggtggaccattccctacttgcttttccttggatcactaaggtgggagagtaggagtaacttattccagttcttacccattattaggaaggtaaggactacacatgtcattgaattgtaggtttcctttttttttctttacttttaaattttaacttttaaaatctatttcatttcttagttatgcatctcataatcagactccatgctttttaaagacagagataatatcttctctattctattctacttcctccatttcaccatttatacaaagtcattcaaaaaggctgattcatgccttcctgcctcttggctatggccctccccatctactctttaaactttaatctataacttttcatcagttttgttccctatctagaaaacattttcttctgtttgctaatctttgtccctcacaatttttgaaatccatctcatcactgaaatactttcttcttcaagtacttttttatttttcttcaacttctcttgatttgacctcagtgctttgaattcactggtgctacaatatgtaactgtggttaattgccttgtaaattttgcgtgtctgtatacttttataccaacttattgtaggctctttgaggtcaggtatgtatttctttcccatatagatagtattttgtacataccagttgttaaataaataatttttaaaatctcaaaaaaaaaaaaaaaaaaaa

SEQ ID NO: 24985 - DNA, 2892 bp, Homo Sapiens
gacgttctcccctggtgaatgacttgtttttgtgtattttctttgtctctcgtgatgcatctgcactgacctgcagattttattttgtcctttttgcagactggaagtgtctccagaggcgcaacccacagccaggcttccttcccctactgactccccttcctctcttcctcctcttccttctagctctggccaggcatctgtcccctctgaattgggacatggtgcagacacacagtcctctgagagtccttctgtcttctcctctctctcatctcccatagcagctcccatttccacatccactccaattgaaagctggcctctcgtagacaggggcaaggccaagtctgaaggaccacccttgctccctaaggcagagttgcaaactgagagtttaacaccggttccaaattctggttcttctgtcctgggatcacttttcaaacagccatcctttccagcaaataaagggacagaagattctctgatgggcaggacccgtgagacaggcacagagaagaacaccagcagccttgagttggaggagtctctcccagagcagcctgaaacagggcgacaagaggaagaacttccgagattcccctgcaaaaaacatgactacagcccatcatctggagaagcccaggaagtaccgtttgccctttcactcagcagtgatggagctgtgagccctgttggggagcttgcagcaggaggagacagagacttggagagtcaggctgggtctcttgtggagagcaaagccagggatgcagctgaagaagtggcgccccctcttcccatgggagcatcagtcccttccattgattccatgatgcggaagctggaagagatgggtctgaacctccgcaaggaccagaagaaaaccaagaagcgtgtgtcattttctgagcagctcttcacggaagaggcagtggcgggggctgccttgctggtggaaggacacagcagttgtccccaggagctgaaccctgcatggtctgttgctggaaacgcgtctgacggagagcctcctgagtctccccacgcagaggactcagaaagggaatcggtgaccacacctgggccagcgacgtgtggtgcgccagcctccccagcggatcacctcctcctcccctcccaggaggagagtttctccgaagtccccatgagtgaagcaagctcagcgaaagacactccactctttaggatggagggagaggatgcccttgtgactcagtatcagagcaaagccagtgaccacgaaggtttattgtctgaccccttgagtgaccttcagttggtctcagattttaaatctccaatcatggccgatctgaacttaagccttccttccattcctgaagtcgcatcggatgatgaaagaatagatcaggttgaagatgacggagatcaggttgaagatgatggagagacagcaaagtcgtcaactctggacataggagttttgtccttgggcttggtagtcccctgtcctgagaggggaaaggggcccagtggcgaggcagataggttggtactgggggagggcctgtgtgatttcaggctgcaagcaccccaggcatctgtgacagctccttcagagcagaccacagagttcggaattcacaaaccacatcttggcaagagctcaagcttggataaacagctgccaggccccagtggtggtgaggaagaaaaaccgatgggaaatgggagtccaagcccgcctcctggcacatccctggacaatcctgtacccagcccctccccttctgagatctttcctgtcacacactctttccccagctctgcacattctgacactcaccacaccagcacagcagaatctcaaaaaaaagccacagcagagggctccgctggtagagttgaaaattttggcaagaggaagccactcctccaggcctgggtctcaccctcggagacacatccagtctcagctcagccaggcgctggaactgggtcagccaagcacaggtgagagatgggggtgattgtctatgtaaatgtgagcaatgtccccctttgcttcctacctgcagaggttacggctttctaaccacacagacgtctgatgtgacaacccacccgtcactgtcctgctggtagggctgccccttgtggtggtaatacctcaagacactgctgcgtttatagcaagaacataatagtagtctgtaaatatagcttaggaattgttctgcacggtcagatttggagctcgcacattgcagaaacgcaatgccaccagtatcttaactgtctcagaactaactggcattgagtggtagtagtatctagcagtgtcaaaaacttcttcaagcactccccaacgtgaagcttgtatgtttgttttgagctgtctttactgtggagggacagaagcctctgcagagttttacagtgaatgcctaggctctagttgacttaaaaaaataagagactgcctttaatgttctgatgtttgtaacaagaccaagggtcccgtgaagatatcaggacatctggacaaggacatgctttcctggcttgcatgtggcagccctgtcctgactgcttttgtttccacaggaactgagacattggagtgctttggcccagagatgagggcagcatgtgacccacctgccccttgtctggcttactgactgccgtctttgcagtgggcagttgctcagttttgccatgaccggagggtctaaagatccttttccccttctctttagacttcatcctgtgaagccaatgaatgccacggccaccaaggttgctaactgcagcttgggaactgccaccatcatcagtgagaacttgaacaatgaggtcatgatgaaggtatgtcctctgagaagctggtgtgttcgttag

SEQ ID NO: 24986 - DNA, 3866 bp, Homo Sapiens
tgttatcgtcaccatgtccctaatggtctcggctggccggggcctgggggccgtgtggtccccaacccacgtgcaggtgacggtgctgcaggcgcggggcctgcgggccaagggccccgggggcacgagcgacgcgtacgcggtgatccaggtgggcaaggagaagtacgccacctccgtgtcggagcgcagcctgggcgcgcccgtgtggcgcgaggaggccaccttcgagctgccatcgctgctgtcctccggacccgcggccgccgccaccctgcagctcaccgtgctgcaccgcgcgctgctcggcctcgacaagttcctgggccgcgccgaggtggacctgcgggatctgcaccgcgaccagggccgcaggaagacgcagtggtataagttgaaatccaaaccaggaaagaaggacaaggagcgaggagaaattgaggttgacatccagtttatgagaaacaacatgactgccagcatgtttgacctttctatgaaagacaagtctcggaatccatttggaaagctgaaggacaagatcaaggggaagaataaggacagtgggtcagacaccgcctccgccatcatccctagcacgacaccttcggtcgacagtgatgatgagtctgtggttaaagacaagaaaaagaaatcaaagatcaagaccttactttccaagtcaaatttgcagaagacgcctctttcccagtccatgtctgtcctgccgacttcaaagccagaaaaagtgctgcttcgtcccggagactttcagtcccagtgggatgaagatgacaatgaggatgagtcctcctcggcctcggatgtcatgtctcacaagagaacagcgagtacggatcttaagcaactgaaccaggtcaactttacccttcccaagaaggaaggactttcctttcttggtggccttcggtctaagaatgatgtcctttcccgctctaatgtctgcatcaatgggaaccatgtttacctggagcagccagaagccaagggtgagatcaaggatagcagcccgtcctcctccccatcccccaagggcttcagaaagaagcatttgttctcttctacagagaacctggcggctgggtcttggaaggagcctgctgaaggaggtgggctgtcttctgacaggcagctctccgaatcttccaccaaggactccttgaagtctatgaccctgccgtcctaccgacctgccccactggtcagtggggacctcagggaaaacatggcccccgcaaactcagaggccacaaaagaagctaaggagagcaagaagccagagagcaggaggtcctctttgctgtctctgatgacggggaagaaggatgtggctaagggcagtgaaggtgaaaaccctctcacggtcccagggagggagaaggaaggcatgctgatgggggttaagccgggggaggacgcatcggggcctgctgaagaccttgtgagaagatctgagaaagatactgcagctgttgtctccagacagggcagctccctgaacctctttgaagatgtgcagatcacagaaccagaagctgagccagagtccaagtctgaaccgagacctccaatttcctctccgagggctccccagaccagagctgtcaagccccgactggaagtgtctccagaggcgcaacccacagccaggcttccttcccctactgactccccttcctctcttcctcctcttccttctagctctggccaggcatctgtcccctctgaattgggacatggtgcagacacacagtcctctgagagtccttctgtcttctcctctctctcatctcccatagcagctcccatttccacatccactccaattgaaagctggcctctcgtagacaggggcaaggccaagtctgaaggaccacccttgctccctaaggcagagttgcaaactgagagtttaacaccggttccaaattctggttcttctgtcctgggatcacttttcaaacagccatcctttccagcaaataaagggacagaagattctctgatgggcaggacccgtgagacaggcacagagaagaacaccagcagccttgagttggaggagtctctcccagagcagcctgaaacagggcgacaagaggaagaacttccgagattcccctgcaaaaaacaagactacagcccatcatctggagaagcccaggaagtaccgtttgccctttcactcagcagtgatggagctgtgagccctgttggggagcttgcagcaggaggagacagagacttggagagtcaggctgggtctcttgtggagagcaaagccagggatgcagctgaagaagtggcgccccctcttcccatgggagcatcagtcccttccattgattccatgatgcggaagctggaagagatgggtctgaacctccgcaaggaccagaagaaaaccaagaagcgtgtgtcattttctgagcagctcttcacggaagaggcagtggcgggggctgccttgctggtggaaggacacagcagttgtccccaggagctgaaccctgcatggtctgttgctggaaacgcgtctgacggagagcctcctgagtctccccacgcagaggactcagaaagggaatcggtgaccacacctgggccagcgacgtgtggtgcgccagcctccccagcggatcacctcctcctcccctcccaggaggagagtttctccgaagtccccatgagtgaagcaagctcagcgaaagacactccactctttaggatggagggagaggatgcccttgtgactcagtatcagagcaaagccagtgaccacgaaggtttattgtctgaccccttgagtgaccttcagttggtctcagattttaaatctccaatcatggccgatctgaacttaagccttccttccattcctgaagtcgcatcggatgatgaaagaatagatcaggttgaagatgacggagatcaggttgaagatgatggagagacagcaaagtcgtcaactctggacataggagctttgtccttgggcttggtagtcccctgtcctgagaggggaaaggggcccagtggcgaggcagataggttggtactgggggagggcctgtgtgatttcaggctgcaagcaccccaggcatctgtgacagctccttcagagcagaccacagagttcggaattcacaaaccacatcttggcaagagctcaagcttggataaacagctgccaggccccagtggtggtgaggaagaaaaaccgatgggaaatgggagtccaagcccgcctcctggcacatccctggacaatcctgtacccagcccctccccttctgagatctttcctgtcacacactctttccccagctctgcacattctgacactcaccacaccagcacagcagaatctcaaaaaaaagccacagcagagggctccgctggtagagttgaaaattttggcaagaggaagccactcctccaggcctgggtctcaccctcggagacacatccagtctcagctcagccaggcgctggaactgggtcagccaagcacagacttcatcctgtgaagccaatgaatgccacggccaccaaggttgctaactgcagcttgggaactgccaccatcatcagtgagaacttgaacaatgaggtcatgatgaagaaatacagcccctcggaccctgcatttgcatatgcgcagctgacccacgatgagctgattcagctggtcctcaaacagaaggaaacgataagcaagaaggagttccaggtccgcgagctggaagactacattgacaacctgcttgtcagggtcatggaagaaacccccaatatcctccgcatcccgactcaggttggcaaaaaagcaggaaagatgtaaa

SEQ ID NO: 24987 - DNA, 139947 bp, Homo Sapiens
ttgggcaatatattaatagcacggtggttatgtcacaggcctgtgactggcttgggctcaaacccgggctttttcacttactagctgcaagactaactagttatttaatttctccattcctcactttccttatctgcaaaacggatgcaataaaggcaccccctcttacaggactgttaggattaaatgagctaaatcacagtgtccgaacacttcagtacttcgtacataattacttgctcaagaaatgttagctattattgggtcatgattatttatatgtgtttgaattccagctttgccacatcccagagtgtctttgagtaagtcactgagtatccttgtgcctcaattcctcatctataagtaggttcccatctcataggtttttaaagattcatgcttacatgcttagcagtgtctggtatggaataagcactaaaaaagatgagcttttatgatgatgatgattactattttcagtcatgattattttgtatatttactctaaaagaaagtgaatttttttagttcaagacttttagattcatcgttctactttcattgtggctagctcatggccatccacgtagtgaattaataaagctttgttgagtggcacttgcttgacagcgacacttttgtccactctttcaccttgctggatttgtgctgccttccttgctgtaggaagcccacgcttgggaaataacattcccacagaaggtctgagaggctctgacgggccaaggttgtaaacccccatgatttgactccacgggcagttaaagtgtgttcccaccccccacggatccgctgccactaggctgtgcgaaggcatttacctccctggcactttgatccaagttccctattttcccctactggtcgatcgaggttgggaacagttgctctaacctgggaagcacccgccacgatccagcagggcgcggtgggaggggaaactgaggcccggctaggcacccccgccgcgcccagcccgccgagaggctcaggccccgggaggcacctggagcctgcgccccgcccgcgccgcttcctgtcccgcgcgctgcgctcacgtgacccgggcctgggaggagccggggcgggcgggggtcacctgaacaagggagtcacgtgagcggggggcgggggtgggggggcggtgccgggcggctgtcacgtgacgcggttccggggccgccgctgccgctgtcgctgtcgccgagcccagtcgagccgcgctcacctcgggctcccgctccgtctccacctccgcctttgccctggcggcgcgaccccgtcccgggcgcggcccccagcagtcgcgcgccgttagcctcgcgcccgccgcgcagtccgggcccggcgcgatgggggccgccgccggccggagcccccacctggggcccgcgcccgcccgccgcccgcagcgctctctgctcctgctgcagctgctgctgctcgtcgctgccccggggtccacgcaggcccaggccgccccgttccccgagctgtgcaggtgggtggcccgcccggacgcaggctccgctcgcggtgcccggggtgagcggccggcgtggggggcggggagcgctcgaggagctcctggggtctccaagtcgcctccgttccgcgccggggtccgccccgttcccgagggaaagttgcctgcgtggtgtccgcgagtcccgccgggtcccgtgcgcaggcggggggcgcgggggcacacgcggtcgtggcggtcctggagccccgcgtccggccacttgtggctgtcgctgagtcgggggtggctttgtgcggagcggtcgccccggcccttggggtcggcgcctgccctcgcgcggccgggcgtccgggaaagttggaggcaggaactccagtttgctttgttcccgctgcgcgtttgcatcagagtttcgccagcggggcaccggtgaggcccctcggtgtggagaggctcaccggggcgttggagcccgcaggaatggtcctggagttgagtgtttgtggtttcatttgctgattgatttccccccgtgggctcattttctctttaaagaatatatatatatatatatttttagcaggcggtgacttttgtcttctttagattgggggcagggggtgtcgtccagtgtgagctttcaagacttgacccttcacttctctgagcccaacttcctgcctggttgctcacatgatgtcattgtctccggggcggattattctagtggatcttgctctgggaaccatgattgtataacccatcagtcccatcgagggctgttcacctcgcgcaactgctagcagtccagggcctggggaacttcgaatttcaggaattttctgaccatccttttctggactgtttaggatgatggaaaattcagcttttgtttatttttttaaactttggtaaaaaggaagcaggatgaaaagttttgaacagacaacagtttctccctgttactgttacttttacaagttacttttacaagttacttttcagagtgaaacaaagttgagcctactttgggctgaacttggagtttgtggtagggtttatgggggggggttcttatttttcccatgcatcagagatagttttattagcacccctgtgttcagaacatgcagaaattagtctaaggagggtgaggctgatctcacgatagaaactctttggaaaggcccatattttttatgctcccttttttggaaggggaagggtggatggagggagagtttgtgacactagtttaaagaccagttagctaccctaagatacatagttactccagtaactagtatgatacagagaaatggtggcagcttaaacgaggtcaggctgagaacaacatttagaggaaggcattttggaataatggcttctgtgaccaaaaataagaaattaactcgcctgggcgcggtggctcatgcccggaatccagcactttggaaggccgaggtgggcgggtcacttgagtccaggagttggaggccagcttcagcaacatggcgaaaccccgtctctacaaaaaatatgaaaattagagccgggcgcggtggcacactcctgtcctcccagttaagggaggctgaggtggtaggataacgttagccccgcaggtcgaggttgcagtgagttgtgatcgagtcgagttgcactctagtctgggcgacagagcaaggccctgtctcaaaaataaataaataaatacaataagaaattaacccagctggcctagtgtggttgaagtcttggtcttgttaacaaattgaagtttgttttcttcacagttaagattaaggtggcttcaagggcagactgatactttggctgattgatgggacccttacttttgcattaggttagtcatggcagtgtcttgaacctgtgttcacgaacttcatctccaggtggaacacggcctcttggtctagtaggaatggcctttgtatctttacgtttttctggccactgtcacacgtgggcatacttagcaaatgctgaagaggtttctgaggttgatatgcattgtgaatataataagatctgccctttgtagtcttagaatatcttaaaagttgtgtttaatttttctgccagattttcttaggatgacaaatctgccaatcatttcagagacggattttcacccacctctttccctgttacttccctgtagttgcacatgcagacttctccagaaccacttgcaatctctactttaaacccaacatgtgccaagtgaacttcctgtctgttcctgttttataattttttgaggcagggtctcaccgcgttgcccaggcagaagtgcagtggtgcagtcatagctcactacagtcgtgaactcctgggctcaggcagtccttccacctcacccttctgtgtagctgggattacaggtgtgtgccaccccacttggcttattatatattttttaaaatttttaatagagatgacgtcttgctatgttgcccaggctggcctcaagctcctatcctcaagtaatcttcctgcgtcagcctcccaaagtgttgggattacaggcatgaggcaccatgctgggtttatgttcctgttttaaactgatacctctccttaaatactttttgaaaacttttcttggggcgggggaggttatcagtcatctgtacttttatgagataaaactggctaaaatttccgtaaatgtagcatgtagttgaggaataggaatgtaagttgattttttttttaatttgatacaaaaaattttatcgtgtcaccaaggtgtgacgtgttaagctccattttaattttgttcctgggcatcagtttgctgaaatgtaaataactcggccaggtctccactgtgagcatgaaaagtcgagtcctacaaatgtccccgtttgtttttgctgcttggtcacatggaggcagtcccaaatgtacagaaggatcacattccaaatgtttgtaaattggtaatttcatacgtggaatgtgtttttccattgatagtattcttgttcattgtatggcccccagaaagtcattatccttgcaaaggttttggagcacccagacaccatatggctttaacagaatcctagccgtaaattctcattgtctctaaaagatggagttggatttccaggaaaactacctctcctcccaagcccagctctctagaacctagagagaatatttttcatctgcagtcgcttagacccacaagagggacatgagggcctgcttcaggggtgcctgcgaggcaccttgtgggggcaaagcttcaaggtgacctttggctctgagcactcctgggatggggtgcggttcctggtgcagttagttattgggaggaacgaaggagacagcaccatttcagcagcagctttaactgtgtccgtgcacgtggaggggcctgccctctgagttgtgcattgaacagcaggcacgacaaaggctcatttcccaaagtgtatctggcttgaagcagcgctttaaataagtgcatggttttttttggagagactcagcaaagcatttttcaagtgtcaagtggattacttgccaggtggtcccagtgctgagttagaagttaatgattcttatgcaggtatttcttgggaggtgatattgctagtacaaagttagtagaaaacttgtttctgaggctagtgtgataggctgtgggactggcctgtagaaaagacctggggcaggaaggagtgttgaaggtcagtggagggcgggaatagtagagcaagaagagagggcattcaggaggagaggagcagaggccaggccatgcaaaaccaacaacagtgtctaaagtgatctcagcttgtcagtggctttacttattaccatatgctttaaactttgtaaaatgtcatattatatatgtaatatgcaagtttccaccctttagttaggtgttaacaagatgcttaatgggtgaggtcttagcagtgtgcattaatgataaaataatgctttgggatggttagatttaaggtagttaagagcttcaaaatttgtacaggacaagttttccccaaattgtttaggtataaatgctagaaagtttttattatattgaggacaagagaataatgaagccagctgggagttgaggttggtttagttactgtctctaaggagatttttttttccctgtaatttttccaaaggaacagtgcttatatgcctaatttgggccacatgttaaacctggatcacatccatttgtgtgtgtgcatttcaacagtaagtgtatgtggaagcctaaggttgttaattatggttacattagatctcatggattaattctcagaacagcatcctgacagattcccaggaaatgaatgcctgcgttgggcctcacgtcttttgtcagcatttcatagagagagggatttttaaaagatggggctgagagaaataattgagatgttcccttccctattttgatcttggtatataaactattgtattggggaaagaactgagcaggctctagaactgagcctagtggcagagagtagcttatcactttgcaggtgctgttctttttcttcctccttttcttctttggattgtcctagccacagagagctcttgctaatgttgtaactggtcatgaatggtgtatgaggaggtgggcgtagcagctgtttgacttcatgggacccaccagactgtaatgccgaattacaattttgcatttccaccagtgatgtatgagagttccagttctatatccttgtcaacacctgtcagtgttaggtttagccattcaagtggagttgtaatggtatctcagtgtggtttcagctttcatctctctgctgactcatgatgttgagcaagaaaggaacatcttttcttgtatttattggaatcctggatgatgttcaccattatcatgtgcttactgactgggtattttttgtagtgtcctttaaaaatcatattttgtcccttttaccccttaaaaattgtttttgggttcttctccttattgagctttaggagctcctcatgtcttctgggtacaagttctttcttagatatgtgtgaggtatgagtgttttctttcagtctttgccttgcctttaaattttctcagtgatatcctttgaagaacagatttaaaaaaatttgatggactataactttttatggtttgtgcttttggtagcttgagaaatcaaccttaaaactagtgacatttgacctgggtaattttttgtttggagggctatcctgggcattgtaggatgtcagccagcattcctggcctctactcactagatgctaagactatactctaccactccccctcccccagtggtaacaaataaaaatgtctccaggcatatcaaaggccctggaggggagggggcaaaatcacatccaattgagaaccactggcctaccccaaggtctcaaagattttctcctgtctctgcctctagaagttttttggttttaactttgattccttaactctaggatcaatttttgtggtttaatttttatatatgatgtttgaagaaaactcaaaccatatttttcctttgctctcattccatgaacagtcatcaacacagaagacctccgtaatcaaatgtgtggtcgtttttccccaggcaccaagcagtgacccctggccaattcaattcctgaccctgtctacctggagatagtgtcagatgccacaggtttggggctcagttcccgagaccgctccccaccccacaccagtcacaagtccgggcctctggaacttctgaccaactggcttcaatttggggttcccagagtgcctctttgggtctgattaatttgctagagtgacttacagaactcaggaaaacactgatgattagcagtttatgaggatattacaagggatacggatgaagagatgtttagggcgaggtattggggaaggggtgcggagcctctgtgacctccctggctcactaccctccaggaattgccgtgcattcaactatttggaagctcccccaacccagtttttatggaagcttcaggaggtcagcatttcttctcccgggtatagggtgggaccctcactggggaggatcttaagacccacagtccaaaagcagggaagatgagagtcctaccttggggcaggtggaaggaggggcaggtggagagattgtttcctgaggcctgacacacccaacattataacaaaagaccaatactaggactgtggaagttggcagccagaaaccagatgggaaaaaaaaacccatacatgtattatatatatttatatatatatatatataaagtatatgtattgtgtatatattatataagcatatttattatatatatattatagtgtatattatatatgtattatatataatatataatatatagttatatataatatatacacacgcacatatataaataacaccacaaaaagggtaaaagtttatttatttccatgaatatatctagttctgtttactaatactttatgaaatatgcttacagctctgtttttaagtgagattgggctacagtttttttgctctgctgttcttgatggattttgttattaataatatgtttgctttgtggaaggagctagttagcttttagtatttttgtatgtggtgaaacagtttgtatataagatggacattttctgtttcttaaagtttggtagaattcaccagtaaaactatctggccctggcaggctcttaggtggaatatcatcggggaggacttttgattatggttttttctagttttattttcagttttatctagtttatttttctattcagattttctactttttcttgggccaattttggtaatctctattttcctagaaaattgtcattttaattgtgtattcatatttaataagtagcatgctactctcatatttttgatactctatagctctaggtaaatttttaaaattcctgatgtttacttgtgtacttttttcttaattatatttactaaagacttatttacctttttaaagtctttccaaaagaactagtgttttgttttttcatcttttcaccttttatttgcaattttattaatttatccactcagtaacttctacatcatttttctgtttctcgtttgacttgaatgcttagctcttttattttaaatcattttgcataattaagaaatatatttaaagcttcatgtttctttcttcggagtaccataccactcatagattctgatacttttttttttctccatatttcaattttgtgtattccctttttggattcaaaagttctatctgtttcaacttcctggacccactaaatttttagatttttatttttttcaggtccatggactttgggggttttaaatttattttttccattgtgcgggtaaatgtggtggaacttactgacatttcccttgtggcctaacacctagtcaagttgggagggtattatgtgtttggaaaaaaagttctctgtttgggtcaaagttactcatggtgctgttcagcttttctttgccctaactcttcttcggtttgtctgttgcttttattatttgtatctggctgccgctgtggacaggcatgtagctggatgtcgtttgctgctgtcgcccagcttaccagttctcccatggttcagatgttcttctgcttccctgttgtcttttgttgcagaatctcagctgatgtgtagtcacagctgcctgttctttctgcgtggacgctgtagcttctgtcaaccctctgaagatctctcttaaagttctgctctgattgctctattaattatttttccttgggcccagtttctttggtttgagtttgtcaccatgattgcatggtgctggtgcccttgcagtgacaggtgactcctgaccgtgcactctgcagtgggtctccacccgaccttggctgcctccttgtgcagctgcgtggggtagggctgggagcagttgttggaatttggctgtaaattgttttcagggagactaggggatgggcaggatgtgcctctgtggctgttcttggcgctttaggtcctttccaccctcccaatgtcacccccaagcgctgttctgccaagacacagctgctaaacccctgttgattgctgctggcagcgtgtggcctgagacgggggatctggattgttgagttggctgtgtccaatcacttcttttctctggacctcattttcctcctcaagaggggtgggacttagttttctttctctctttcctatttgaaaacctctcattagggagttagttttggaagtcactttcctgggcttgaatccagactcctcccctcacaggccttgggcaagtcacagaacctctgaagtcttcctttccgtgtgtgtccagtcaggatgctaaccatgtttgtaggctaggcgtgggatgctaaccgtgttgtaggctaggcgtgggatgctaaccgtgttgtaggctaggcgtgggatgctaaccgtgttgtaggctaggcgtgggatgctaaccgtgttgtaggctaggtgtgggaattggaagacatttgaatgcctggcacgtcctcggtgttcattggtgctgtagtggtagcagttgctttatctgtaagttacagatgctgccttacatcagggatttatttttataacctgtttctcgccctcccagagctctccattagtgtcttggggtttctgcctcaaccagagagcatttcttcttcatctgtttcatgattggcactccacgtaagcttcctcatgagaaagaaaggtttccactgtttaaaaaagtttcaaagccactggactccgtgatttccgggtccattttgcatcccaaattctgcagttctgaggtttgcagccttgaggagtccttcctcactcagattcccccaaacaatgaggagcttgataattcgaggtgtggagtttggatgggggccgggggtcaccctcctgcatgtggtggcttggtcccaggctaggctgggagaaagggggctgtcgtggttccagggcaagaagagccgtcctccctgtttccctgtggtaggatcaggaagtctcagctaacttctgcacatggtcaagggggtcctgtcctcacttaggcctctccaggcctccctggagggtggaggaatgggtgctgttgtaggtgggaacagaagtgtccaggccagtggcttggatgtgaaagtgcttcataaattccaccttgctgtgcaacttaaaaaaaaaaagtacggtcgtttaggttttcgaggtgcccaaagcaatgcgtcataagcctatttttgtctccgtgttagccagggcagaggggcactttcctgtgactcctccagggtggggaaaatcccaggtgctctgtgaacctggccgttcagccagctgcagacctttggtaggagttttctttttccttttgtgtgcttttcgatcccctgggggcaaccattattcagtacatctggagggcaagttgtccaggaagaggaagcagatcctaggagtgtcgtccttcactgggagaggtgtaggaagtgagggggatggtggaagtactggcccgagctctgttttcaggagtgtgtgacagcaaaaactggcctttgcagttgagttgcctgtgggctatggcctagagggaaggccaggagggtcttgctgttagggctgccaccttcttcatgcctgctgtgtgctgggaggagagagctccttcagagcggacccaccattggattttgagtgtgtgcaaaattaacttgttgctatctgcatggttatctgtactccagaatcagttatacattttaaaacagctgtttagtactgaaaaaactcccccaacactccctgcgccccaccctggcctgcaaatagagtgccaagccaccagaatagaagtgctaaagtagtgagtttcctagaagtggcaagcctgagactccagtgagtcaccctcattgttcccctgaggcaccctgcctccacctgctctctgctctcgaagcgtcagttataccagcacttctctcttctcttttgtctctttttacagtcacccctttagagtgacaggcagcgtgagctcatggccttgactttgctggacatgcggagggagaggagagctggtggcagagtcgggggttgggccctgaggatggggctgttttattggagagtccgctgtcaccaggcctttctgtaaaaggctggaagtgagcgagtgaaccaggcaccctggtggggggcctgcatgtcagacccagcgggaagcatgtctgacttggttgagaggcagctaagggcccagtgtgtctgggtgggctgagccattgggagaatggagggaggggccagagagcacggaggattagctgtggccagatcacagaggctgtgggactttgggctccctctgggtaaaagccagagcccttgaggacttcagtagattggtggattgaaaggcacatgggccggtgctgtggctcatgcctgtaatcccagcactttgggaggccgaggcgggtggatcacgaggtcaggagatcgagaccacggtgaaaccctgtctctactaaaaatacaaaaaatcttagatgggcgcggtggcgggcgcctgtagtcccagctactcgggaggctgtggcaggagaatggtgtgaacccgggaggcggagcttgcagtgagctgagatcgcaccgctgcactccagcctgggcaacacagtgagactccgtctcaaaaaagaaagaaagaaagaaagaaagaaagaaagaaagaaagaaagaaagaaagaaaggtacatggaagattcgattgcttggattgccttagggaactatgagatccctaggtgagggttgcagttgagcatggtagctgcttttcctcttcaggttgcctttaggctgcgatggagatagcatgagctctggagcaggacaggcttctttctaacatgggcttggccactttgtgaatttgtgatcagagacaaggtcacggacctcactgggacctccctaggctgtccattctgagtctgtaagaaggtggagaggggcagccccagctgggtgttaggctttgcggagcctctgctgtctgatgtttggctccagcatcttcaaagcaggggcttttctcctctgtccacctgattggcctttgtgaggaaccaccacctggcggtggcctcattagcatcatgggccagccagctgagctgacagcccgcaggttttctagaaaggcccaccttcccttgtagtttgcacactccaggaagggccctgggtctgggagggttttctgggaccttggtgacagggagagtagggggctgaacattaaggtctgaattctgcgctgggggctggattgtccttaaaggcggttggcctcagacatccacatggcaaagcagggagtttagcccatctacaactcttctttatacatgaggagcaaagtatgagaccgcccaggtaattgctctgattggaagaaaatcatcacggagcagggtttagggttgaaatactggcctgcatcctgtactgttgagttgatctgagccaaggatagcagagaggaccagccatttttgtggtagctttctgttgtggagggcacttgcccacctcctgggaacgccacaccctggtgtgtttgcccttgttctgtttcccctgctgctcttctgctggaagctctggactcacctgtctctgttgtggatggtgcagggcgggcaggccagagtggcatccttgtcctgagaggtcccaggaggcagttgagtgtgtatgtgtgcgtgagtgcgtgtgtgagtgcacgagtgtgtgagtgcaagtgtgtgtgtctgagtgtctgtgagtgcaagtgtgtgtgtctgagtgtgtgtgtgtgagtgtgtttgtctgagtgcgtgtgtctctgtcttcatcagctcctaggagatgcctccggacaggggcctgcccgtctctccctccagttccttgccagtgtcatgtgacactcctttcagagggcaccccccgcccccagccaactcacctttttttgtaaacttagtttttaagcagtccaactctctctctggattcaaatgaaagctttagatcatagtctgtttcgatagctctgtgttcctggtggtggttttctcctcacaatgaccttgtaggctagctgagttttgtcgaggaagttgagctgggagagactggctcacacagcttgttagtcagcgctggggcaggaatctggcccaggcccttcatggcacctttcttagggtagcgtgccccctctctattccaggtgacctctgttacgcagtccccattgcctgccctggttccctgggctctgacatcaacttagatgtcgtgtttgacttagggcttccagccggatccctctccatacaccgggcttccttccagaccctgcatacctctcagggaaaaccaaaggctgacgtttggcatttccctgcttctatttatttgtatttgtcggccctgtatctttgtccacagctttgtgggtttgttagaataggaagtgaagtacttcctatataagctctggccatgctgtgtcaaactcacgtgcttccccagccttcagctcggggtaggagtcttcatgcaaatcagattgtttctcttttagtgtaggcaacagcaagttgttgacgacagtggttaccttaggctcttgacattctgctcccaaggtccagtgtgggaaccctgcctccttgctcctcttccttgctgttttttccctttctccttagttaaggagactggtctggatttctgaaggtgactgtgctggatatgtatgagctgaaacactgtctgatactgttgagggacagtagtgagccaggtgatttcttgaatactctgttagaggacttgcgtgcatgtcgaaagtaggagaatcttttttggatgttcaggttggaaacacttcacattctctttgtctccaacatgttagatttgttgcttgctgtagactcagagaaacatttctctagctagtgaccatgtatcttgttatgtgaatttcacttatgtgtcaccaactgggtttctgtcttttaaggaaaccaaattacagattcacacgtgcctacttttattattactgatcccatcctgcctttatcttgctttattaattgcaggccagtagtaaaatgtttaatagttacatgaccattagcataaccccaagattcacagggactgaggaaactaagatatattttaaaagagtttggatatatggcaataaatgaggaagggacagagtgatacttcatggagatgttttgtgttgaagggaaggaacccagttttctaagatttattttctttaagagattgagcataccatatattttgatcatagaattttacatactttagatgctagctgtttttaaaaggaaagaactccaaattacatcttgcaagctattgtggttttgcaagcattgagtgatggcatatatgaaaactctgagaggtgtcatattaagataccaatgtcagtttaaagatattctatatctgtatccctatgacattgtattttgaattttttatttttcatttttggacagacatttagaactcactcagtggagatggctctgcatctctgttttaagctttttgaactctaggcagctgtgtcggcctggggctacattgacttcttcattgcagcccctcgattggtttcgtctggaccagggtgggtttcgattgcggcccttgctggaacagtagcaggaaagtagaaacaccttcctgtctctgggttaaccagctgacagtctgttacttgtgtgcttccttctaattggtaatctgccaacacctttcaggatattatgaaatttcaagcaaatgaggttaaaatggaacctctgtacttctgaacaggcgtggactgactgcagttctccaggatagtttcagcagaagcagtgagattacagtcaggagcaaaacagtatctgagctttctttatgggaaagattccgactgtgtgcttggtttatatggttaaattaattgcccttgttaaattaaaaaaatagggtatgtttctgccacagactttgctttaaaagcagagatcttctaaagtcatttgccttgtatttgacttctgctgctccccgtttcctgctgggcctgatggtttgattgtagaatgtttctgagttgtgtcactgttggactctgctgagctgagtagtctcattaaaggagagtgtgcatctgagttgaggaagacaatatagatgtggaccttgtttgtagagttcacaagctgcttacatagaaatagcaaggacagtgcagccagtgggaaggagccggctgagggacttgatattatttccatggaaaccagttgggtatgggaagagaggttgtggaaggcaatgctctggtgtttggcaattcacactgtgcagaagagaaagcagaactggactgggagtatagagtagcagaagtttaagcttggggaagaagttgagcaaggaaaagcatatgatctgttgatcagcatgatgtgatgtggtctgaatcttcagacagttcacagctttttcatagaggctgtcctcagatgggttcaaccattctgagaattctgcctttacgatataagtagtatccatgacattaaaaacgagaagagaagcgttttggccaatgacggactgcataaactacagtctgcataaatgaccttggtcctagaagattaggatgaagctgaacaattcttatcacctagtgatgctgtagccattgtaatgtcgtagcacaatgcattagtcacatgtttgtggtaatactgctgtaaacgaacccactgcgctaccagtcttatgaaagcgtccagtcaggtcctaggcctttaggtccactcactcactgactcacccagagccgcttccagtcctgcaggctccattcattataagtgccctaggcaagtgtgccattttaatcctttataccatatctttgctgcaccttttctacgtttagatatgtgtcacatgttacagttgcctggggtattcagtgcagcgtcatgctgtgtgggtttgtagcctgggaacaataggacataccatatagcctaggtttgtagtaggcgacaccatctatgtgtgtgcagatacactcgatgatgtttgagcagtgacagaattgcctcatgacacatttctgatgacgtatcgccattaagtgagtgactataaaccagtccccccatcagcagttacacttcctgaggtttcagttacccatggtcacttgcagtctgaaaatatgaagatattttgagagagagatgccacattcacataccttttattacagttataattgtgctattttattattagttgttaatcttttacaactaatttataaattaaacttaatcatgggtatgtatgtaaaggaaaaaccatatccgaaaccgtattcctggttccaggcctctactgggggtcttgtatctgtgattacaaggtgctgcgaagggataactgtaatttttctatatgactagcattttattgaatcaagttgtgtagatggttggcaatataataggaactcagagatctttatgccatacagagtctgtccttttaatggcatttattgtgacaagatttaaactaaagttttgtggaatgttttgccagtttttgtgttgtaactgaaactaaatgttttctgaaaagttaaaaccatttctttaaatggaaaataaatgaagccgtttacctaattggttaaggactcacccgtgggcctcacaccgcctaggttaattcttcactttataattccgtgatgttgggcaagttcctcattctgagccttgggatatttggcttcaaagctgaggaacttgggagggttggataatggcatcacgttctgtggggagatttggctcacatgttagctgtgtgggtgagagccgtgctgtcatgcgttcttagccactggccagtttccttctcaagccatcagtagagatgctgatcctgcatctgccagtcattgctccaggagggaagacattactgtcccagagtgacggtgtcattggggataacagacacttcagaaaatgccaccactgagctgtatgaagtgccatggcagctagtgctggagctgtggattcagccggggagcactgtctggaggagctgctgcagcacatgtgtgtctctccagctgtcaggctggcctttggagtgcatttggattttttgagaatgagagagggaccattggctaactgttttacgctctgaaaaatgacatagaatagcaaagattttacttatttttgctgattttctagaacattttctgtcccagagtgatggttttgaagaaccagcgttcttggaaagatggttttgcatccagaagagtgattttaactaaaatcaggctgcctcccttgaggatggtcactgaattttgtacaactgggacaacggacagggatcctgggttgtttccagtggacaagccgcttctgtgggggcctttgcagttctccccgctcctctcctgtgtcccgctggtttccttcagttgagatggaatacagcatagagtcagtgacttttagaagacttgacagagtttcaggaaaatgctcactgggctttcttacctatcctgctgcagaactttttttttttttttttgagatggagtctcactctgtcacccagtctggagtgcagtggtgcgatctcggctcactgcaacctccacctcctggattcaagctattctcgtgcctcagcctcccgagtagttgggactataagcgtgcgcgaccatgcctggctaatttttgtgtgtgtgtgtgtgtgtgtgtgtgtgttttttttttttttttaagtagattcagggtttcaccatgttggccaggctggtctcgaactcctgacctcaagtgatcctcccaccttggcctcccaaagtgctgtgattacaggcatgtgccactgcgcatggcctgaagttctttctttcagaaaatgtattcaacacattcttttgtgtgtgtttgagtgaagacggtgtttccacacagcttgcagatactttcttccagaagcttgtttgttgctaacatttaacatcttactgttacagcttagttttctctttgattgaatatattgatctctttttttttttttctgttggcttttttcttaagtctttacttgtgtaagctcagataacttagtctagaatgtaggctttttctgggaatctcagctgaatggtttcatttgcttggctgttaaatgaaccatactgtttggaatagtttcctaattctggctgtacatgttcacttcaggtagagaattttctaacagacaaactttcagacaaaaaatttattattcctcaaagatatcattacattttatttagtctgtaataattttattgcttctgaaaccattttctagttctataatgtgatcatggtgcttttaaactttaatatcaagttaattttaagaatgattttagcttaggccattctaggggcttggcctttaatctgaaaagaaatttagaatcctttagtttcaaacatgtgatttcttaaaacttgttgtcagttatttatacgattttcaagtttattatgaaatagtctttaaaaaatatttactttagtggaaacatatctagtgatagtttaaccagggtgcataccagagtacataatagtttttggaatattcttcataaattttcagagagattatttaaaccacatgactgtttctgagctcctgttgatactaggggctaggcatattcgttttttctttttgagacagagtctcgctgtgttgcccaggctggagtgcagtggcacaatctcagctcactgcaacctctacctcccaggttcaagcgatactcctgcctcagcctccctagtagctgggactataggcgtgcaccaccacgcccggctaatttttgtatttttagtagagacggagtttcaccatactggtcaggctgatcttgatctcctgacctcgtgatctgcatgcctcagcctcccaaagtgctgggattacaggcatgaggcaccacgccctgccattagtttgttttaaaggagacataatgtccgttgaaacatcagaatgttttaagtactgacagcttgcaggtgtctttggagtgaagtttagaaacctgctgtgaccattcttcattttaaagctgtgactaagaactctgagatattggtgccttcgcctcaagtgctgctgatgggtttgaatggcattgaggttgccaggcctggaggagggctgccttgtgctgagtggttaaatcacccccctgaaaaaagtcagtgtttcaagtattttaataggctcctcctttcctactcccataaccacttacatttgataaatcttgacaaaacaagtatgaaatccaagtagagaaaataatataattgaatagagcaacacttttctttctagcaaccctgatttccagattatcaggacaatatccctcattttattcttttttaaatcttgattctgctccccaagcaaacacactctttaccttatttagatatcccctttgcaagaatggtggatttcttttaagaaaagcatagcaggccgggcgcggtggctcacgcctgtaatcccagcactttgggaagctgaggcaggcggatcacgagatcaggagattaagaccatcctggctaacatggtgaaaccctatctctactaaaaatacaaaacattagctgggtgtggtggtgggtgcctgtagtgccagctacgggaggctgaggcaggagaatggcgtgaacccgggaggtggagcttgcaatgagcggagattgcgccactgcactccagcctgggcgacagagtgagactccgtctcaaaaaaaaaaaaaaaaaaaaaaaagaaaagcatagcattttaggtacgtgtggatctctttagcgttgattcctaccagttaactcattttaaatgacaccctcatgcaccaatatcatatacttaggattgtgaaatagtttaatgatgccactgccgctacttgaagtttgtctctgttatcctggagaaactagtcatggctcctgaataagagattagcatttttcctgagtagtagccaagtctttgtttacttgtttatcttgtatcctgcaacctggaatatacactccgagagggcagggcgtctttgttttgttcattgctgtactctcctgtgcctcccgcagtaagtacttaagaaatacttgtgaaacacatgaataaaggttaacgaagggcaaaggaaacaagcctttattgatgatttttctctgtgcccagtaatacttgggttattttctcatgtccttgagtcatcttgactctaggagacacctcttaacatgttcctgctgaaaaagctgagctgaggagtcataccccgagggtatcaccctaagattgggcacctgagtaccccagcctgctcttcaggtctgtagctgcttagtggctatcagaccttccaagtctccatgcttttgaaggcctatgtgtgcggtttggtttcttggcaggggggtttgatgggttcccagacctaggagttcttggcgcctcgtcttccagtgaccccaccagggctgctctttctcctccattgctgaaactagttcagggttggggaggagggcacgtgggggggcctggtggttggttttgtgctgagtcattgccttggtgcactgtggaaggaagctctgggaggtggacggctccttctgtgagggagtgcttctgtcgtcaagggagtactgcatagggtgaataacacagttatgtagatatatatggtggtcttacccccagggcctccacaactcctggatgggcctagcctaagcaattctgatttaacttattgcccctccttttagcaatactgttgagttaaataacagtttttgcattgaaaataaaaaaattttatttttgtagagatgggatcttggtatgttgcccaggctggcctgaaactgctggcttcaagtgatcctctggccttcgcctcccaaagtgctgggatacaggcacgagccactggccaggtctttattttttgcattttgcaaggacattttaagtcactttcttccttttctgtttttactcctgctgaggagatgatccccattttacaaaatggacaaaacattctccccagggaagggaagagtagacatttgagaataattgttttcacagaaccgggaaaccacctattttgtcccaagtatactgattgatgcattagcaataactcactatctgctttgccagaggtttgaacaatgagtgttaatgcttggtgtagtgaattttgtgtgatttcgaatctgatagctgactcattgcacagctctgtcttgcgagttcagatctgaactgtagctctaagaggtaaaagcagaagtggagctgcctttcatgccatagctagttttttaataaaatagagttaaaaaatcctttggcttttcagcattttggtgtgattggaaaggctattactatcttatattcagcatgagtcttgagcaattactgattaatatgatttggctgtgtctccacccaaatctcagcttgtagttcccataatccccatgtgttgtgggagggacctggtgggaggcaattgaatcatgggggcggttacccttatgctgttctcgtggtcatgagtgagttctcacgagatctgatggttttataaggggctttttccccttttgctccgcacttctccttgctgaaaaagaatgtgtttgcttccccttctgtcacgattgtaagtttcttgaggcctccctagccatgcttaactatgagtcaattaaacctctttcctttataaattacccagtcttgagtatgtctttattagcagtgtgagaacagactaatacactgatctgagttgatattcttaaattaatggtaagatatttcttttttttttttctttggagacagagtctcgcactgttgaccgagctggagtgcagtggcacgatctcggctcactgcaacctccgtctcccaggttgaagcagttctcctgcctcaccctcctaggtagctgtaattataggcgtgtgccaccacgcccagctaatttttgtatttttagtagagatggggtttcattatgttggccaggctggtcttgaacgcctgacctcgtgatccacccacctcggcctcccaaagtgctgggattacagacgtgagccaccatgcccagccagatacttctattttgataatctttgagtcctgaggtagcttcagatggattgaaccacagacagatggtgttagtagtttctgccctggcttctttgcaacttaacatacttgactttttagtgtttttggctaaggaaagtgtattttctagtttgtggcagttttaagcaaatgtggcttgaataaaactagagagaagtttaatttttgataaatcagtgacattgacaagttgtttttcttcctttccagttatacatgggaagctgttgataccaaaaataatgtactttataaaatcaacatctgtggaagtgtggatattgtccagtgcgggccatcaagtgctgtttgtatgcacgacttgaagacacgcacttatcattcagtgggtaagtagaactacctgaaattactggattggcaatatgattccccaattttgcaaaaatgactgtgtatagctatacgtatatagcgatacaaaaattttgaatgtttagaaatcataagtgtttataatacataatacacatttgttagtagttaaaaatgctaacggtttgaatgtctagtatgagctaaaactaggttggttctgtctagtggatactatacagacagctgttatgaagaattatgtagatgtgtatttgatattgaaagctgtctcctagatggctctcccttctcacccacacttttcttaaaccctgtttttacattctcccccagcccacatttccttttagtgctcccccgactcccattcctttgtaccttccagctttggctgtagttcccagacagtgtttctgctgtcaaagatggtcactggagttaggcttacattaaaggttaaataaatagtcctgaggattggcagtctcagagaaagaggtgcagccccttctttcctagggttcgtttcattccccaaatgtatgccttttgggtcaggatcgctatccttctgtgaagaatatgaatccaagtggattaatatatcagcaccaggttacatagagtggagtcagggcagatgcctgaaggaagggaggcagggcagacagaaaagcagaatgcattgcccttggatttggcaacatggatgtccgtggtgacctttcactaaggcagttagaataatgaggtttgaccacaatggatgctcgtgacatagagatggtatatgactagggactgtctgataactagaagaagatgctaggtgggcttttggatttgggagagaagcttactgtggtagctctgtcattttcttttgtgttttaaacattttaatatttttatagatttggcagttcaagtgcagtttgttacatggatatattgcatagttgtaaatctgggtttttaatacccgtcacccgaatagtgtacattatacccagtagataatttctaattcctcaccccccaacctttctgagtctccagtgtctgttattccactgtccgtgtccatgtgtacctattatttagtttctacttataagtgagaacatgtggtatttggtgttctctttctgagttattttacttaggataatgtgctattgttcaattcatgttgctgcaaaacatgtgatttcattcttttttatggccaacatgtggaatttgtccatagaaaagaatgaaatcacacacacacacacacacacacacacacacaaacacacaccacattttttgttatccagtcatccattgatggacacttaggtttattccatatctttgcaattatggatagtgctgtgataaacatatgagtgcaggtgtctttctgatgatttttttccttcaagtatatattcagtagtgggattgctggatggaatggtagttctatttttagttccttgatagatctctatactgttttccatagaggacatcctaatttacattcccaccagtgtatgtaagcattcccgtttttctacgttcttgccaacatcttttgctttttgactttttaataattgccattccagtgggtataagatggtgtctcatggttttaatttgcctttctctgatgattagggatgtggaacatttttacatatgcttgttggccatttgtatgtctttagagaaatgtctgttcatgtcctttgccctctttttaaaggggttctttttttctttttgaattgtttgagttccttgtagattctggatgttagtcctttgtcagatgcacagtttgcaaatattttcacccattctgtaggttttctgtttactctgctgtgcagaagctttttagtttaattaaatcttacttggctatttttgttttgttgcatttgcttttgaggttttagttatgaaatctttgtctaggccaatgtccaggagagtgtttcctgggttttgttctagaatattcatagtttcagatcttacatttaagtctccaacttttgtatatggtgagagatagggttctagtttcattcttctgcatgtggctgtccagttttcccagcaccgtttattgaatagggtgtcccttcgccagtgttatgtttttgtcaactttgtcaaagatcagttggttttaagtatgtggccctgactctgggttctctattctgttccattgatctgtgtgcctatttttatatcagtaccatgctgtttgattactatagccttcaggtataatttgaagtcaggtaacatgatgcctccagctttgttctttttgtttaggattgcttttgctattcaggctttggctactcatatggttccatatgaattttaggattgtttttctaattctgtgaaaaatgacattggtactttgataagaattgcactgaatctgcagattgctttgggcattatggtcatgttaacaatactaattcttctaggccatgatttttgcatctgtgttcattagggatattggcctatagttttccttttttgttgtgtccttgccttgctttggtgttagggtgttactggcttcatagaacaagttagggaggattccctccaacttgatttttttttttttttttttttttttcagggagtagtctcagtgggattggtaccagttctttgtacctttggtagaatttggctctcaatctgtctggtcctgtgctttttcttgggagatttttaaagtactgattcaatctcactcctttttactggtcttttcaggatttctgtttcttccgattcaatcttgggaggttgtatgtttccaggaatgtatccatttcctctaggttttctagtttttgagtgtagagatgtttatagtagcctctgatgatcttttgtctttccatagtatcaatgtctactttttcatttctgattgtgcttatttgaattgtgtctcttctttttttggttaatttgagtagtagtccattgattatgttcatcttttcaaagaaccaactttgttttgttgatcctttgcattttttggggggggtctcaatttcgtttagttctgctctgatttttgttatttcttctgttaggtttcaatttggtttgttcttttttttttctagtgccatgagggttacattaggtcattaatttgtgatctttatttttgatgtaggcatttagtgctataaacttccctcttaccgctgctttgctgtatcccagaggttttggtccattgtgtctctatttatattcatttcaaaaaatttttacatttcatcctaactttgtcattgacccaaaggttattcaggagcaggttgtttaatgttcatgtatttgtgtagttttgagagttctcctcttggaattgatttctagttttattccgctgtgatctggaaagatagttgatatgatttcagtttttaaaaatgtactgagactgttctgtggcctaacatatggtctaccctggagactgttccatgtgctaagaggaatgtatgtcctgtggttgttgggtagaatgatctttaaatgtcttttaggtccatttaatcctgagtccaatttaagttcagtgttttattgttgattttctgtgttgatgatctttctagtgcttgtagtgaggtgttgaagtctctcattattattacattgctgtctatctcctcttaggtctagtggtaatgattttatgaatctgagtgctttggtgtggggtgcatttgtatttaggatggttatatcttgttgaattgatcccgttatcattatttaatggtcttttttttttcttttttaactattattgacttaaaagtctcttttatctaaatgttgcttctcccgctcacttttggtttctatttgcatggaatatcttttcctacctatttaccttgagtctttgtttttaccagttaggtggttttctgtaagcaacatatggttggatcatttttttttttaaatctagttcaccaatctatatcttttatgtaaaggatttaattcatttatgttcagagttaatattgatatgtgaggttttgttcctgtcatagtgttaattgttaactagttgctttttagtgtcaattgtataattattttataagatgtgagttttataccttttgtctgactgggttaattcaaacctgtctttaagctattagattctcttttctgctggtctagtctgctgttcaagctttcaactgtattttgtaattcctacaatgaatttttcatttctggaatttctgtctggttttctaaaaaatagctttctctagtaaaattttaatttagatcctatatttttccgatttctttgtgttggttttttgactttctcttggatcttattgcgcttctttaaaatcaatattttgaattccttagctggtatttcaaggatttcattttctttagggtccactgctggagagttagtgtgagtctttggggatgttgcagcgctcttttttttttttttttttttaatacttctagagttgttactctgtttcattctcatctggataaactatctcttctttatttttgaatttactttggcaggatttttttttttcccttgagaatgtgaatataacgtatgttgtatatagttgtttgacttcagttctgggtactttcagtgacagagactctgagtttcttggttatagttggcctttttgtggtagctttctcaaatgctagtgatagtaatgatgtgcttgggtgtgtgagcaggatcctcaccgtctcccgcggggcctggaaggcagagttctcaggaagttattttgttctcccttgctttgcactttggcagcagaatttatattgggttgtgcaggccagcaggtggtatttatgggtaaaaaccagctgcagtggaatccgatgggtgggtctatgagtctctgtgcttgacctttgtttaatgggggaagctctgttgcttcaggcagtggagtggtctgtggaatgcacagtggcctgagctacctgctcagcccctgagtgggggacaaagctggacagaactgaactgccagttcttctcttggatactccagtggctcaagcaccagccctaacaggggtagcaggggtagctgtgtagaaggtgccaaggtgtctgcggggaggtgtgggggttgctccagctccatggcctgggcaggtgggagcacaatctgcctccctgtcacaccccgtcctggcgctgggaatattcagaacatgagaatatcgctgtctgtctcaggctgcagtgtagtgagtgctacgagagacacctgtccatggcttaccaccaatgtgtcttctgtagtgagcctcctccctcaacccaaagcacacacatttgtagctctcctgctctttgccgcaggaatgctgtgggtccgtgtagagagggtgaggccccacctttcgtgcaagtcctggctcagtggaagtcgtgcaagtccactgccagtggaaatgcagcttcccctaacagccacagaatggccactgtcctgtgtgcctgtgccaacctgtgggagcagccatgactgtgcccacagcagtgggtagagggtgggggaggagaagtcctactacccacatccgtgcccaagcactgagaccacctggctcctgggctggaagcatactcctcccttgcagggctgagtacagcacccctgtctccactgcatgtggcacaggccacaagccatgctcctgggcacaggaaagtgcatgctcctttgtcccaaggagtgcccccttggcatgctgtactctttcttcccttaggagcagcactccctgagggtagatctctgggaaccctgcagctcccctgggtccagccagccctgtgtggctgctgcagtctcagcaggtgccaagaaaggtctgcagggcctctggtgatacggagacatcagtgctgagcttccccaggcagtcctcccactgctgccgccactgccacccaggtccagtggagggtgagcaacctggcataagtggtagtctgatgtaatgccctcaggaagtccccaaattgctgcccgcaccagtgtttgggtttgtgagggcagaaaagctctcccacagttcgggtaccagcagtcgaccacagaggtgaggggcagcaacagcattcccgccacccctttcaaaggaataccaagtccctcagggctcctagccgctctctgcccctctcgtttcctgctttttattttttgccctcgtttcatcccaggggttctccaccaggctccagtgctctccacttgatactccattctggcgacggttgctcacctgtaacttgggttcttctgagaaccggcctctggcaactctgttcagctgtcttgaaacaaaagaaacccccacttgtcattttgcatggaaattgctaaacacagttaaaagagctttgtagaaagcagtgtttagagtacgaagataagggagtgcgaggtctgctgattgaggcccagctcctgtttgatttccctctctctctacaaagagaccatccagactgaaaaacctggtgagagggatttgaggcctgggattgagatctgagaaagcactagattgttgtgaattcttgggtctgacattatccttggtgatatacttaggaaacttacaggtgagatggccagtttactcattgtgctcttttgagaactcacagagaaaggccacaagtaattctgttggccagtgttatgtaggtgttcagaaagaaggaaaagtagctttcttcttgattttattataatacttcaatatttttggctaatgaaagtatgtcttgagtttatggtagtatagtatggtatggtatagtgtaataccacatagactgatgccagatggaggcaacttacttgaaggataatttgtgagcttggcctcactggacaaagtttgagtttgaccaagttctgtggaccttgaaagccagggaggagaagagttgttatttttttgtagggagtggatccattacagatcttttgtgatggtaacggggaggtgatgtgatggaaggtgtttttaggaagctggccccgtggaataggaaacgatgcctacaggggagataccaaagataactagatgactaaaaagtaacttacaggttaagatgatgatgatactattataaaccagcagtttccaatctcattttttcccccagatatgtgtgacagatccctttcccagagcttgaaacttccagagggagtcatcatatatactttcaggactctcagtaacggctccctttcttcaactggagagagcagtttgtatgagtcaatgagagtgacattcacagtagcatagggataatcccgaatcaaatctaatttgcatatacaataaaaatacctaaattttgttgcacattcatgtgctaggcctaatgtttaaaagtaaaatatctcatttaattcattcaacaaccctttaaagtaggtgatttcatttccctcatgttataaatgaagaaatggaagcgcaaaatggatctgtgttctacagtgggcaggtctgtgcaaatctgcccccgaagtccaaggaagttgagaggctgaagaaggaggctgacacccagtttctcagaaagaaacatttaatacggacttatgaatagaagccacatctcaagaagtcacgagatgggatggatccctctgccatcacccactccagacccagggatcatacaccatagggaaggggtggttcagaaggaatgtgtaggacaattgaagtaggttttttgacctaaggggaggattcgtgataattacctgctcttacacaaggaacagtagataaactggaaatcttggaggccttcctggaactggggttaatcggaagtcagcagggctgtttggcctccagaatggcgttactttagcctccacaatgagcaccttgctggaggtggtgtggttatggatttgaatgtggacagccggctccagagcctgtgtactcactcagggctgtgcttttgtgtgagtcatggggtcacatcagacagattggagctgaaatggagaccaggatgggagatctgaatgtgtggctctgagaggacatctgagaacgaacttcttttgatcttgttagaaaggaaaaaatgtgaaccttcaaaacaaccacaagaactggagctccccgcagatcagaggaacagaagagctagcatagaaatagatccaaatatgtatgggaacttaagataacttacaaccaaaaaattgggtgtaagtagctattgtctcttacgaaacaaagttcaatccctcctttagatcacatactgaaattacagctcagttaagatttgaaagtaaaaagacaatagaacattggaaaaaaaattagtaacatatagatataatctagaagagccttccttaaggaatcctggaagccatacaggagaagaggaacatttcttattacataccttttaatgactaaaaggtgttctaaagacaaaagacatacactagactgggaaaaacatttccagcatgtttgccaatgtactattaggatgagagcttttcttaaaaattggtaagaaagacagacacccaggagaaaaatggcaaagtcaaagaacaggtaattcacaaaagaagaaatccagatgctcaatacaacttcactaataagccaggtggattagtcctttctcacattgctgtaaagaactacctgatacttggtaatttatgaaggagagaggttggattcacagttctgaaggctgtgtaggaagcatggctggggaggcctcaggaaacttaaaatcatggcagcaggtgaaggggaagcaggcagcttcttcacatggtgacaggagaggagtggggcggtgctacacactttcaaacaagcacatctagtgagaactcttatcacgagacagcacttggggatggtgctacaccattggaaaccagccccgtgatccagttacctcccaccaggccccacctccaacactcgggatcacaattcatcatgagatttgggtggcgagacagagctaagccgcatcaccaggtataaatgcaaatcagagcaattatgagatctcatttttctttgagaagttggcagaaatttaaatggttgaatcatagagtgctggcaaggagcctggaaatgggcacatttatttatacgttgctgtaggaagacggttgtctctaaatccttttgggaagataatagttggtgtgaggttgtttttttttttttttttttttttttgagacagaatcttgctctgttgcccaggccggagtgcagtggcgccatcttggctcactgcatcctccgccccctgggtttaagcgattctcctgcttcagcctcctgagtagcttggattacgggcaccaccatgtccggctaattttttttttgtatttttagtagagatggggtttcaccatgttggccaggctggtcttgaactcctgacctcaagtgatccacccgccttggccccccaaagtgctgggattacaggtgtgagccaccacgcctggcctggtatgagttttaaagtgccctgaagcaggggtcctcaacccccgggccacagactggtagcggtttgtagcctgttaggagctgggctgcacagcaggaggtgagtggtgggtgacagagtgaagcttcgtctgtatttacagccgctccccattgcttgcactactgcctgagctctgcatcctgttagataagtggcagcagtagatgcttataggagcgcgaaccctattgtgaactgcacatgcaagggatctaggttgtgaccccttatgagaatctagtgcctgatgatttgtcagtgtctcccatcacccccagatgggaccatctagttgcatgaaaacaagctcggggcttccactgattctgcactgtggtgtgttgtataattatttcaattacatattacaatgtaataataatagaaataaagggtacaataaatgtaatatgcttgaatcatcccgaaaccatcccacccccagtccaagtccatggaaaaactgtctttcatgaaaccagtctctggtgccaacaaggttgggggctgctgccctaaaattttttatagtgagaaacaaatattaagacctcaatgctggtttaaacaatattacattattttaaattgaggaatcatacattatccacacatccaaggagctcagaagaaattaaaaaaatcatacattagtttttccttaggcaaacaatattacatatgtgaatcttagcaaatgttagccatcattttcatagggcctgtgaacaatatttggtcccatttgcaacctaattattttcacattttaaagtggtttatacattttatatgcatttgacccttgaacaacgctagagttaggggcaccaaccccctgcacagttgaaaatccacatttaacatttcactccctctaaccttagctgctaatagcctgctgttgatgggaagctttaccagaaacataaatagtcgatcaacacatattttgcatgttatatgtattaagtactatattcttacaataaagtaagctaaaggaaagaaaatattaagaaaatcaggccgggtgtggtggctcacacctgtaatcacagcactttgggaggctgaggtgggaggatcacttgagcccagaagtttgagaccagcttggacaacatagtggaaccccatctctgcaaaaaataaaaaaattagccaggcatggtggtgcatgcctgtagtcccaactacttgggaggctgaggcaggaggattgcttgagcccaggaggtggaggcctcaatgagctgtaatcaggccactgtactcctgcctaggtaagagagtagtgagagcttgtctcaggaaaaaacaaatgataaggaagagaaaattatgtttattattcattgagcggcagtggatcatcatataaagatcttcgtccttattgtcttcatgttgcgtaggctgagtaggaggaggaagaggagggactggtcttgttgttctggggttaccgaggtgaaagaaaatctgtgtataagtggacctgggaagttcagacctttgcagttcaactgcatttgatttccttttcaagtacctcagatgtctggcttaacagttaaaatttcagtgtaacaataattataaatttatgagtattattatttaataattcttatatatttactagttatgctaaaattctaaaatttctaattctaaaattctcttaaatgttctaatactgtgtcgtaagtctgaattaattgctgagttataaactttggattggagttatattaaacattgcagtaaaaataccaaatacattcacatttttttctaacacatcaaatattaatattatgattttaattaatcttctgaggattacagctctatatccatttcaggaagcctgttaccagcccatttaacttgaggtaatgtactcactaaggaacagtgttaattgaggttacctctggagcctggaattctgtttggcttcttgttggtgacctggtaggacacagtgagtccgactgtagttgccgtcccaggtgattcatttactttaaagagcctggcccctgacttccagtgatttgatagtgtctgattcttgtatgcactcacagaaatctacagcaggcactggattgatcattggattgtatctttcatctctttgactcataagatgtgaaaatgccttttcctcttaagtcttttattttcttaaaacctagaattctgttggatatttaagatgatacctggttgagttttggatacaactcatgtttttatctgatttatggtctctcctgatagtctggcaatacctgttaacattttaaaacgtatattcacataatcttttgtgactcaaacggatagaagaagtagtactatatgtagatatttgtacaaaaggtttttggtagcattgtttattgtggcaaatatgctggaacaatctactgtgtgggtatggttcaataatttatagtgtattttcttcttatttacttggttaaatcatctaaaattatatgtgtacattatattaaaacatagccaacagttaatgtttatttataataactatttgactatcagtcatatgtaggcaccggtttaggtactggaattgaatcagtcactacaacaggcaagaatctctttttttcatggagcttacattttagtagggtgggagacagatgaaaaaagcaatggctaagtagtatgttaaactgtgatgactgctacagaaaaggaaaggaagggtaatcaggagtactgggggctcgggtgtgtgtgtgaggatattaaatagggtaagtgtcactgagaatgtgacacgtaagtaaagaccttgagttgagggagtgagctgtgtgtctctctgggggaacagccagttcaggggacaagaagggtagccaaggagtgtgttggtggtagcaagaaaataaaaatcttttaaaaagagtatccatataaatagagaagctggaggttaaaaaattggatgagtatttttttttttaatttggcaaaatagcgtgaatagtatatgttgaaggaaacgctaagtgggtggtgcaggggagagaggaagacttgcttgagcacatcgggaagtaggacaggaagggttctctgtttgccttgtaggttctaattgccatggcaataatataattgctgtggccgctgcggtaggcaggagggctgcctgtgaagtcaggatcaccaggctttgtggcttcaaggaggccaaatcaccatgggcttgcttgggcttggaggtgcgacctggtgggcctgcagaatgcgacttggtggcctgactgagcagcacgtgagggcctggtgcagcctggcatggtggtacccttgagagcgtggcctagagggctccgaggtgcagcctggccagtgtggtctggaggggtctggcaagcgctatctggagcactcagaggtgtggcctgtttttccgggtgggtctagtgagtgtagcttggagtgctgggtggtgtggcctggctggcaccgaggtccctgcggattctggagaacctcaaggtgcggccccgggggtgtggccaagtgtggtgtgtggagggcccttgtgtgcagcctggtggttcctgtgagcatggtttggagggcctggtgaatgtgtcctggtaggcctggtgagtgtgtgagcatggcctagagtgtcaccaaaccaaagtggacccgcctgcctgtgcaccagggaaagccaaacaccaaagcgcagggtttttgctggagagagtggactgcactgcgacgagacaggaggaaaggtcaaacctgtctccccaagctggcggctgggtcgggttttataagcataagcttattaccataaggtaatgaggtgtgttctgattggatcttgcaattagatgacaccagggctctatctgattggatcctggatcttgccatgtggtgtgcgcttcttatttcagtcccgctcctcagtccagcgcttaggttcctcccgtgttgcaagcttggttcatctgtgcaggctccggtgacatgatgtcgaactgggagccatggcagctgaaaaacaacgaacagctttgtacataaaagatgatacagcttggtctaatgtggttctaaggaggctctgccggcgagtcttaggggttccggcgggcagccgcgtgaacctggagcttggggtctgcagtgctgggaggccgaggcctggcatgttggggacaggtcttgggagctgactgggggcctggcgtggtggcggcagcccgcagtccctgcctggcccttgtctgggaggccgcggttctctgcggcctctcgccggtgtcgcccttggccactgggctgcgaggaagccggcgaggagtgggtgtgcgccccgcccggctctaccggcgagggatgcagtggccgccagcgtggccgtgcggctgggtcactcccttcccgcttccagggcctttttctgcctccttttcaggacgtgacccgcacattatgagggacccgtaggggctcttgacacagaggggtcaccctatgtgtgaacaggttacgaggttgggggcttggcttctgaacttgccaggaaacaccgcatcccttttcctgcagcggccgccccccatcccccacccgccccattctctcccctccccaactgcagccttccgcgcctccttggcccctcgagcctccctgggtcccctgcacctccccatgtcccccacgactcctaggcctctcgcgcttccccaggaccccgcgcatcctgggcctcttgcgcctccccggtcctcagcgcctcctcggccgccgtgcctccccgcaccttttgcgcctcatggggctcccggtgccttctgcccgccgcctcgccgcgcccctcgcctcctcatgcccctccgcgccccatacctccccacccctgtgcctctctgcctatcccctgtaccacccggcatcctccgtgccccatgcgcctcacccctcacgcctccctgtaccctgcatgccccgtgtgcctgctgtgccccacgcgcctcccccctcgcgcctccctgtaccctgcatgccctgtgcgcctgctgcgccccacgcgcctcccccctcgcgcctccccccttcgcgcctccctgtaccctgcataccccgtgagcctgctgcgccccatgcgccttccgcgtctccagccctcatgcgcctccagctgcgcatctccctaggcgggtacctcagcaccgctgagcccacccccgcccctgctcagtgcctcccagacacgcccactgcgggcgggacagtgggagctgtccaggcgcggagctgtccaggcgcgggagctgtccaggcgcgggagctgtccacgaggcactgaccttggtttcagagcctctgcagggcttctgtgtccttttggctgagccgactgggcaaaagttttagaaaagaccctgggtgttgcagatggagaaggatgatcgtggctgacttttgcttgcaggcagaagaaccacggggccatcagcctggtgctgtgggggcgcgctgactcgtggtccgcccctgccccaagacttcaggtgtatatgggattggatcagctatcatcccgagctcatggcacgtacagtgagccatgtgttaatccatagactaacctttttccttttaaaaaattagttgttttgtataatgtagcgagcactgtttccaacaaaaatctaggatcttggcagtaaccactatctgttttactctttcctctttcacttttcgctaggagtaatcattagctcccatcttgtattaatttttttttttttttactgtatctaatttccaaaaaaaaaaaatctgtgtgtttgcaactaagttatcttcctatgtgtaactttttgggacttaagtgataacagtaatattactaaaaatcaaccgtattgttgtttttcactgtggtttattccttctgactgctgtgatattttgtgtggatctgctgaagttaatttatccactcttctgttgatgggcctttggtcatttccaggtttttgctcttctgaagagcatgagatattctttcacattttctgctgtgcatgttccatatgtgcatggttttctcttttatatagacctgagtggagtaactaggtcatagggcacacgaatgttcaattttaggacataatgtcctgctgacttacatagttgttgaaccagttaacatttcactagcaatacaggagagctctgagccacctcatggctgacacttggtatttaatttttgccagagggatggttgtaaatggtataccattttggtcttgatttgaaattccttgatcaccagtaacattgaacatgtcttaacatatttattgatgtacatttttctttgatttgcttgatcatgtcttgttcattttatattgggttattgtgtgtgacctagattagaattttttcttttcattggatattaagatccaccattgtgtggctaggagtgggtttttccttctctctcctttccagcatggtgtgtgctttctcagtcagaggtaattcatcgtcctttatttcctggaattatacagacattcttttcttgtttgtttgcatgtgaatgtgtatgtagagattcttgatgctggttctttgccagttctgtgtttttcctagtttataacttacttccgttttctttaagctgttttttgatgagtataaactcttaaattgaataggtcaacctcattaatctttttgagtcttaagaaatctttctctatcttaagatttctgccaagttttgaagtttggattttgatgtttacatctttaatccatttagacaggggtgtccaatcttttggcttccctaggccacattggaagaataattatctttggccacctaaaatacactaatactcatgatacttaatgatctaaaaaaaatcacaaaaaagatctcataatgttttaagaaagtttacaagtttgtgttgggctgcattcaaagccattctgggctgtatgtggcccatgggccacgggttggacaagcttgtgtttagagttgatttttgtacccagtactgggtagggatccaattttgtctttttccatatggaaaactattttgtttccagttccgtttttatttccagttctgtttattgaacagcctcctcttttccctgacctattacttctgtcataatcaaagtttaattcacatttgtgtctctgtgctctctcttctagtcgattggtctctattctagtcttttgatcagtttattcctatgccaacccccatcatgttgatttttacatagactttttattctggactgttacagtaatgtcctggacaagcagagatgtggtcattctacttgtgggcctttctagagaatgttgattttgtagcatatgtgatgggaagtattgaaacatttcagtggctgagttatatatcctgatttgtatttttgaagatcacactggtgcaagatggatgaggaagtggggctggcgagggatgagactagtgtggaggcagggggagcagttaggtggccattgctggagcgcaggtagtggttttagcgggagtagaggtggagaaatgtggacagatttgagatgggcgtatagctgtggacctttctgatgtatagaatgcagcagacaaggtaaagatggcacttaatgtaatgtaatggggatgccactctgagatggaaaattctgggaaaggacagttttataaatttataagctatcagatacattataatgctacttttaatttgcttttccttggaaatagctgtttggttatgtatgttttatagcctgttcactctcttttctctccaaataggtgactctgttttgagaagtgcaaccagatctctcctggaattcaacacaacagtgagctgtgaccagcaaggcacaaatcacagagtccagagcagcattgccttcctgtgtgggaaaaccctggtgagtccacacaggcacttgatgtatttctttaaaaaaaaaaaggtctgccccttggtgttctggctgtagaggtattccaggaagaatcagtgagcaaacttagaaacacaaataagaaaaaccctaccaaatgaccatcatcatcaagaaccaataagtaaacaaattctaaacttgttacaacttttaagtaaaacatagaccatgtcttttgtaaaactacaattcaaagtgattactgtgttaaaaatcagtgcactgtttaatgtttaagttataggcatactttttttttctctaaaacctcttcttctagcatttcattttgataggttttagggcagcatatttagttttttaaaaaatatttttctttcctcatttatattaaattagagatacccacatctatttaggagaagccttggcccgtgggtatggggttctcaagttttttggatattacctggtgtttaaaggggacatcattgtgtaaattattatgattgttcttattatgggcatattgtatgtaatttgttgattttaatctttagtttttggaaaggaacttgcagtaaataattgttttagctcttgggagaaggaattggtatacaaattctatgaatgttcttgaatcccagtaagaacccaatctttaggaaagtcaggttgagtgaaactctgtggctactaaattgctttaaaatatcattttagaatttgggactgtgactattgcatcttcaggtccacagtgtcttatctgaagaactttgaaaataaaactaatattgttaattttggatccgcatataaattgcatcgttgtgcatattgagaccctaaaaaaaaagaatctgttcgcagcagcattaaatgagatttatattacagaataaaatatatagctcctgttttaacttcagctaatttcctttatgaattctgtgttcaccataccagaaatagaactgtgaaggataactccctagacttgcacgtgggagtgaagaggccagttcctgctgtgcttgtgtcatcctgcgatgctggggttgacctgtttgtagtccactctggttgcggttaacaggaggggctgccttggagggttggcgtctggtgggtgtactaacttggtcagatgcagatgggctcctcatgggagccttttcacgggaagcatgaggtcacgttttctggctttcgtttgctggcatttgcttaagagaacatttggagtttgagaggagaatgactgaggatttcttcccatgaactcactcaatgtacttgcacagctggggcggtagaattcctttggattagttacacaaaatcccaacatgattttatgaagctttggtctcagaatttgcagatttgggaacctcttgatgaccccgtttaactaaagcggttgcatcccctgcccttcttgctgctgctttctttattttagtagcctttactgcattctcattttaaagaagaatctttacaatgtgtggtatggtaacattataattactattttttttttaatagggaactcctgaatttgtaactgcaacagaatgtgtgcactactttgagtggaggaccactgcagcctgcaagaaagacatatttaaagcaaataaggaggtaacatgggaacttcaaattacatgcttatgaagtatactctggggaactttatctttcaaatactgattctaacctttccgggtgaaaatcttttttagcttccaaattgcatttgagcagagataccatgtgatttaatttttaaaacttttctgagtggttcttatttttaggacagggcatttaaaatatcacaggatgtgatttttggtccagattggaaatagaatggctcatccatatagggcaagttagttcttggtttctggtgctgtgcaactcagtaaactaagtgacgtgtttgggcttgggcttagagtattcactctacctgcaggagccatctgtttctgacgctgcctgcttcatcttcctttgcacctggctttccacctgtgttgtaccccgcttttgataagtctcctttacctgtttgcattgttaaatctctctgtccctctcctcagccttgggatgacttctggctgcaatgtgagtccaggtcaggtatcccttaaattcttttccagctcacctcagagactagattactaggttactgttactattacgtccaccccttattatttgaacccagcattccttggtcaagacattcttcttgggtgcatgtatgtatatatatctatatacatacacactgacctatatgtattatgtgcaacatgatattttgaaatatgtatacattgaggaatggctacattgagctaattacatatgtgttacctcacatatttcgtttttttttttttttttgtgaggactcttaaaatctactctcttagtgatacgcaagaataaattacattgttattaactgtggttgtggtggtgtttaatggatctcttgggcaggtcattcttgttgactaatggaatgtccccttccccagcctggattccctcatgttgcactgctacttgattctccctggtcctggggaagagcagactgtgttccttctgccgcttctccatgcccaccaccccagatcctaaagggaatttcctgttctcaccttgataacaatcttaattaattgattatctcacttttctctcctactttctgtttttaagaactttcaaaggttgtaaggattcaggaactaatgaatggtcataatcagtaatttttactagtggcctaataccatgcagtttaataagacaaaaagaaatgtttatttaaaaacattaattcagattaaattatgaacaataaatcactgatattttcagatatggtcatctatgaagggaaagacagtgtcatatggaagtggaagtggtaaaatactgcccaggaaagccataaggagcattcaatgaaaaaaaaaaagtttaaagtggaaagaattaaggctgatatttaggagacagtgtcaaatgtaagcttcatttaaaaacttaggtgaagctgttagatgacatactgttagcggtgggaaaagcatctcaaagcagacatctgtttggggtttgggggtgagggtgggagcacagtgtgttcattctcgcagtgctataaagaaacacctgagactgggtaatttataaagaaaagaggtataattagctcacagttccgcaggttgtaaaggaagaatggcagcatctgcatctggagaagcctcaggaaacttacagtcatggcagaaggcaacagagtatcgagcacctcacgtggccagagcctgaggaagagagtgggagggggaggtgccgcccactttgaaatgaccagatctcacaagaactcactcactatcatgataatagcaagaagggggtgatggaatctgccctcatgatccagtcacctccccaggccccgcctccaatgttgaggattacaatttgacacaagatttgagtggggacacacagtcatcctgggattacaggcatgagccaccatgcccggctaatttatatatatatatatatatttttttttttttttgtttgtttgtttgtttatttgtttgttttgtagagacggggtttctctatgttggccaggctggccttgaactcctgacctcaggtgatccgcctgcctcggcctcccaaagtgctgggattacaggagtgagcccctgcgcctggccccacacacagtcatcctcaagtgtccagttggccggatctgagttgcttcctgtgggaggtggaggctgcggtgacagtggtgccctctgctctcctgttagaccccagacctctcagtcccacagatactctcctgggctctgattttccaacctgatcatgataccctttttgttttgttttgtttttgttttatctgagtgtacctcttatgtcacgttgctgaattgacagttgtgtcttctaccacctaggaaaaaattgctttccaaaataaaatgaatagcaacttgttttcaatgggtcagaaatcaccaactacagcccatggttcaaagcctgccctggcctgtttttgtacaaccccaggactaagaatggttttcacatttttacaggattgttacaaaacaaagaggaatatgccacagagacctatgtgacctgcaaaacccaaaatgtagataccacatggttctttgtaaaaaaaaaaaaaaaaaaaaaaaggtgctgatctgtgttctaaatagtttttggggtgggaatggggaggtatagtctgtgtttttctcaaaacaatgacatttaatttctcttagaagcagattgaagatgcatgagaaacatttgtactttgtactctcttacctcttcaggtgtaattggcagctggggctttattcattgagttttcatttattgagagcctattgtgagctaagcagtaggaattttgttaaattttggaatgctttcagggagcctatagactaatggtgtgaaggacatatccatattcattaactcatttttttttgtcttatggatagattaaatggaaagaactgaaaagcataatgactgctaaaaatgtagtgctgtcactgttagcaaatcttaataaagcgtatgcccttttttctgctttcagtttgatttgattacaccttacaggcttggtatgataagtttaaaacatattgaaggtttatgtacttataaaaacctcatcattccctaaagaaaaaaaatctcaatttggtttagtgtcattgtagtcttgctttctacatcttactaatgtctcatttatttattcattttgctctgtcacatttagaatgattttgatgggcaaaaatcatggtagttacaaacagccctttaaaactattgttatactttgttcagtggattctggtagaggctttaaggtaattatttctttaaagcattgtgtaaatatacctcctactgtagtgcccttgggaacaggcaaaattcagaactggcctgctagcagtcttaccagggttataaaagtaagattattatatataaaacagcattaactcaatgcgtggtgtgttgcagctggcaaacaacctcgctccccaggctgctaaattcgtggtcttatgaatgtctccattgctgtgtttgctgtagcaggaagtgggagggtgttccccagtagccttgactgtttaccaatgcacactccagttctgtggagtgctgtgtgaggcatgtcttctcttccctcctggagtagggagacagccagtagttgctacctgccccgagcagggtgcttgcagatcttgcctatgtggaatcctctaagtgtcttggtgaaatgcagctgttttcagaatgaagagttctttcattttcccttcttgccatatgccatcttgctcccttttccatcataggcttttattttgctggttagagaattgcatcttgtcttgcatcctacccagtccactgactcactcccctcttgggttaatgttttcatatgatcttgctgtgggatgacaagctttagatttgcaggataatgggcacttgtggctttttactgtaacccaattatagtctgtggcaataattttcttttagttgcctttctgcatgaatctggtggtaggcttaagctccatgtgctggtaccctctgagcactagaggttctaacttcctccattattagtagaaacacttaggtgtctgagaagtattttaggcgacaggcaactttgctttgaggatatggtcaaaatgagttcaagtgcctttgaggctgtgagtaggtgtaggtcgtttgattcactctattagctctccatgaatctctgacagcaggactggggaaaaaggttagtgggttagagcattcctgcagatttgatagcctatttctaagagaaatttgaaagctaaatattaagcagttaacttttgtaaatagacctgtctgtgaattgcttcagtctaaaagataaaattttgggaaacttatccacagaaaataataaaactatctactttgaaatgatttcagagaacatgaagttttagaatattctttggaagaggtaattaaaatgatgccagtgtattattttggaaataaaacttacaggaatgtttcacatagtcatggttcacttggtgaccagggccttttttactctgggggggattcctttctgggcttgagttcttgctgtgatgcggaagttgggtgcccctacttcatgaaactgtaccgcaaagatgtgggtgcccctacttcatgaaactgtaccgcaaagatgtgggtgctcctacttcatgaaactgtaccgcaaagatgcgggtgcccctacttcatgaaactgtactgcaaagatgtggcctcagagccatggtttctgtcctgggcagggagtcttgcagcctggggcagtttcaccatctgagcacagaccctgatatagtttggattttgtccctccccaaatctcacattgaatttgaatccctaatgctggaggtggggcctggtggaaggtgattaaatcatgggggtccctcatgaatggtctagcaccatccccttggtgctgtcctcatgacagtgagtgaattctcatgagatctggttgtttcaaagtttctggttgtttcactctcaccgtcttgctcctgcttttgctgtgagatatgcttgctcccacttcaccttctgccgtgagtgaaagctttttgaggcctccccagaagccgagctatgcttcctgtacaacctgcagaactgtgagccagttaaacttcttttctttataaattacccagtctcaggtatttatagcagtgcaaaaacaacctaatacagactgcttgggactgggctggcttttttggcctgctgccagcgatgggccacaggtgggagactcactgagttaagggcattagaacttggtgggtcctgctattgcctgctatgctgtggagctcaggctgcacctctttttaccatgtgggctctttgatgtggtagaggcgcctctgtccctccccagaatgttgccctggaggcccgctgatcaccgttggggccagtgcttgtctcagctgttggagagcctgaatatgtgcttgcctgacccagctccacccagctttccttcctcaatctgccttgctggcagaacacaagacagtgatgcttaggtgtcccatggccccacccattgtctgggacatgggagtagcctcctcgttaacaaaagccaagcataaatcctgttgccaccactgcagctgcctctttcctgcaagtaccacttcctggccaggagatgaacttgcgtagcccatctgctgagacaagtgcacaattgcacagtgctacggcaggagacaagctttccatgacctcagttaccatcatccctcaccacaccctggctactcagaaggccctgagcctgctcaccagcctggtatattactactacaactgatgtttgagaaagtcaccacacaaagcctatctataaccaaggaattcatacagtctttgacgctgaaagcgtccagaagcaaagccaaataaaactatgcaacatacattatagtcacattctcagggcggggggaaccctctagtcaaagcaaaagtaaattcaaaccaaaaagtgacagtttctctagatgagaaggaagcagggtaacaattctggaaatatgaaaaagcagggtgttatagcaccctgaaggatcatattaatcttccagaaacagatcctaaccaaagtgaaatgcttgaaatactagttaaagaattcaaaatattaattttaaagaagcttaatgagatacatgagaaagttgaaaaccaatacaaagagatcagaatatcaatccaggatataaatgagaaatttaccaaagagatgttttaaaaaaatcaagtagaatttctagaaatgaaaaatttattataggaattataaaattgagttgaaagtttcaaccatagactagacgaagcagaaggaagaatctcagaacttgaagacaggtcttttggattaatccaatcaggcaaaaacaaagattcaaaggaaatgaacgaagtgtttgagaaacgtgggactacatgaaacatccaaacctataaagcatagatattactaagggagaagaacaaacaaaatctggaaaatgtatttgaggacataattgatgtaaacttctttagtttagcaggagatctagacctccaaatataggaagctcaaaaaattctaaggaaatatgttgcaaggaggacttcaccacaacatatagccatgagactgtatgaggtcaacatgaaggaaaaaatcctatccacgagaaaagtatctaatcacctataaagaaaatcccatcaaactaataggggacttctcaggagaaacttaagagccagagagattgggtttctcttttcaaggtgcttaaggaaaaaaaatctgtcaaccctgaattttgtatcctgccagaataagtttcatgtatgaaggaaaaataaagtctttctcagacatgcaaatgctgagggaatttgtcagtactagatggaccatacaattaatgcccaaaggaggtctatacagggaaacaaaagtttgatacttgctatcataaaaacacacaaaagtataaacactcttataaaacaattattcaaacaagaccacaaagcaactaggaaacagttagcattatgacaggaataaaacctcacatattaatattaactttgaatgtgcatggattaaatgctccacataaaagatacagattgggagaatggatttaaaaaataaaagacagaatccacccatatgctgcttacaagaaagccagaactaattggtaaagacatacactgaagctaaagggatggaaaaagatattccaggcaaatggaaatcaaaagcaagcaggaagacccacctatacttagataaaactgactttaaatcaacaacagtaaaaaaaaaggaaaaagatggtcattatatgataaaaagattattcaacaagatgtaacaatcttaaatatgtatgcatgcaactctagagcacaagattcataaaacaactgctggtagacttcagaaaagaaatggacagcaatgcaataatagaattcaatcactgagaaagaaaatcaacaaacacggcacataaattggattcaggaccacgtagacctaacagatatttatagaacattctccccacagccgcagaacatatattcttctcatcagtgcatggaacgtttttcgagatggactatatgtcataccaaaaaacaagtctcaataaattgaaaaaaaccaaaatgataccaagtatcttctcagaccacagtggaatgaaactagaaatcaattcacagagaaactctcataactatacaaataattggaaattaaatagcctgcttctgaatgaattttgagtcaacaatgtagttaagatggaaattaaaaaaaaattgaaacaaatgaaagtggatacacagcataaaacctgcgggatacagcaaaagcagggctaagtgggaagtttatagtgttaaatgcctacatcaaaaatagagatcacaaattaacaacctaatatcacacttcaaggaactagaaaaaaaagaaaaaaccaaattgaaacctagcagaacagaagtaacaaataccagagcagaactaaatgaaatggagaccaaaaaatgcagtacaaaggataaaaaaaatgagaagttggttctttggaaagataatattcatagactgttggtcagattaaccagaagagagaggattcaatcagaaataagaaagtagacattacagctgataccacaaaaaagatcataagagacttctgtgaacatctgtgtactcacaactgagaaaatttagaggaaatgtgtacatttctggaaacattcaagttcctgagattcaaccaggaagaaatagaaattccaaaaagaccaataacaagtattgggattgaatcagtaatttaagaaaaacaaaacaaacaaaacaaaacaaaacaaaaacctcccaacaaaaaaagctcaggaccagacagattgacagctgaattctcccagaggcacagggaagaactagcacaaatcctactgaaactgttaccaaaaatcagaggagggaatcctccctaactcattatttgaagccaatattatcctgataaccaaagccaaacaagcacacaacaaagaaagaaaactagaggccaatatctatgataaacagattcaaaaatctcaacaaaatactagcaaactgaatgtaacagcacttcagaaaaataatacatcacgatcaagtgggttttattccagggttgcaaggatggttcagtgtatgcaaatcaataaatgtgattcaccatttaaacaatttaaaaaaaagtctgaccatctcaggagatacagaaaaagcatttgatgaaattcaacatcccttaatgaaaagacaacactcaaaaaatattagaagggacatacctcagaataataaaaggcatatacgacagaaccacagccagcatcgtactgaacagggaaaagttgaaagcatttcccctaagaagtggaacaagacaatgatgcccactttttcatctctcctattcaacatagtactggaagtcctacctggggcagtcaggcaagagaaagaaaacgcatccagatcagaaaagagacagtcaacgtgtctctgtgtgctgatgatatgatcttatacctagaaaactctaaagtttcctccaaaagtctcttagatttgatacgtgaattcagtagtttcaggatacagagtcattgtacaagaatcaataacatttctacacaccagtaatgatcaagctgagaatcaaatcaagaagtcaatcccatttataatcactaaaaaaaaaaaacccactagaaatacatttagccaaggaggtgaaaaatctctacaaggaaaactgtaaaacactgatgaaagaaattgtagatagcagaagtgggaaaacatcccatgttcatgaattggaagaatcaatatcattaaaatgattatattgcccgaaacaatccacagattcaatgcaattcctatcaaaatgccaacgtcattttttatggaattagaaaaagtcctaaaattcatgtggtcccccaaaaaatcttaatagccaaaccaatcttaaggaaaatgaacaaagctagaggcatcacaatacccacctacagattttactggagggctatagtaatcaaaacagctagtactgatagaaaaatagacacacagattaatggaacagaatagaaaacccagagtcaaagctgcatacttacaaccaactgatctttgacacagttgacaaaaacatacactggggaaaggacaccctatttagtaaatggttctgggaaaactggacagccatatgcggaagaatgaaactggacccctatctcttaccacatataaaaattaactcaggtcggattagcgacttgaatgtaaggcctgcctgaaactataaaattcccagaagaaaacccaggaaaagctctctcggatcttcgcctaggcaaagaattcatgactaagacttcaaaagcaaatgcaacaaaaataaaaatagagaaatgggactttattaaacttaaaaacttctgcacagcaaaatacatagtcagcagagtgaacagacaacatacaaaatggccaaaagtgtttttaaactctacattcaacaaaggattgatattcagaatctacaaagaatgcagacaactcaacaagaaaaaccacaatccctttaagaagtgagcaaaggacgtgaacaaacatttctctaaagaagacatacaaatggccaagaatctcctaaacatactccacatcactaatcatcagagaaatatacaaattattataaaaccacatggaatactatgcagccataaaaatgatgagttcatgtcctttgtagggacatgaatgaaactggaaaccatcattctcagcaaactgtcgcaaggataaaaaaccaaacatcgtatgttctcactcataggtgggaattgaacaatgagaacacatggacacaggaaggggaacatcacacacctgggactgttgtggggtggggggcggggggagggatagcattaggagatatacctaatgctaaatgacgagttaatgggttcagcacaccaacatggcacatgtatacatatgtaacaaacctgcacgttgtgcacatgtaccctaaaacttaaagtgtaataataataaaattaaaaaaaaaagtttaggaaaaaaaaaataaactgcatatatggaacgtaataaaaaaaaaccccacaatgagataccatcttataccagtcaaaaatggcaattattaaaaagtcaaaaaacaacagatgttggcagagttgcagaaaaaaaagagaacacttatacaccattggtgggaatgtaaattagaatgacctttatggaaaatagtatggaaattaatcaaagaactaaaaatagaactaccatttgacccagcaatctcactactgggtatctacacaaagtaaaagaaatctgtctgtcaaagagatacgtgcactcgtctgtttattgtggcactattcacagtagcaaagatacggaataaacgttaagtgcccaccaacggatgactaggtaaagaacacacacacacacacacacacacacacgtctatcatggaataccactcagccgtaaggcagaatgaaatcctatgttttggagtaatattggtggaacttgaggccattatcttgagtgaaataacttagtcagacaccacatattctcacttataagtgggaactaaataatacatacacatggacatagagactggaataataaatattggagcttcagaaaggtgagagggtgggagggcagtgagggttgagaaatgagaaatttcctaatgggtacaatgtacagtattccagtgctggttacactaaaagcacagacctcaccactgtgcaatatccatgtaatacaactgcactcggtcctcctaaatctaaataaaacaaacaaagaggcacccccttaaagctcagggtcttgccaactctaacagtggggtttcttgatgttttttaaaataaaaagaccattagttcataggtatgagagactgtcataaattaaaaccaagtaaggatggattgaaatacccacaggaggaactcatcttcacagtttatggaacaaatatagaacaaatatttactgagctcccactatgttgtaggcatcatctttagcctgcagtgacaaacccttgacctcaaggagcccctattatagtggggggaaaatgacaaaagtcaacagatggcagtacctagtatcatacatcacagtgctgtgaacaaaagtgaggctgagtatgggagacagagagaggtagagagtgctgttttaggtaaaggtgtcagaagaggccttactaagggcgatgtttcatcagagacctgaatgaagtgagggaaagagccatgtgtatatttgggtaagcacatctcaggtagagaggacttttgagtttcaggagggtagaattgcatcaagaggtgagtgtggctgcgttgagtgaggagagtggtaggttagggcggtgtcatgaaggagttggaatttccttctcagtgtaatgggaagctgctttgaacagggagaggtgtggcctgatttaattctgaagtgctaatcctgtgcttgtggagacatgggctgaggtagtagggcactgaagctggaattggggggccagttaagatactattgcaggcaagagattatggtggcttggacagggtggcgatggtggaggtgataagtagggagtggatccagggtttagtctgaagggagagctggcaggacttgccgatggttggatgtagacgtgagagaacttggcggtggggcagggggaccttaaggttttggctcaagcaactggttgaatgatggtgccatttgttgagatgaggaacactggggtaacagtaggttttgggggagaaatcaaaggctcattttaaatttaaatacatgaaatttgagatggttttgtgtatccaagtgatgatgataaacaacagcaataaataacacttatgccaacctgccaggagctgtaccccaagcttcacatacattagttcactcaggccttacagcagccccatgaaggaataactgtcattattccagtatggcacgtggggaagctgaggcatggaggttaacttcattcatggtcatgcaaagtgttcatgccagaggttgaaccccaagtgttctgcttcgagtctgtgcttataaacgtagcttctgctattgttggctgtgtaagcctgcagttctgtggaaaggtcaaggctagagacatgaatttgggagtctttggcagacatttataaccatgcacgaggtcaccaagggattgggtgtagacaggaaagagggctgctcagtaagctgtggcacacctctggattgagagtcagttagagggaaggtgagaagtgtttccaggaggctgaaaaagagctggaagtggggcagaagaaaaccaggagcctgtggatgcaagccacaggagaaggggtttcatgaggtggagaatgatcagtagcatccagtgccacaagagaccatgtaacgggaaggctaggacacgagcactggatgtgtcagcagagatgttgtgggtgagctggtaagcggggttttgctggagtgggaggcagcaagctgatgggactgtgttcaagagagaatggaaggcaggaagaggagaagacgtgtagggacaattgaagaaattttgctctaagttgcagagacatgagatgatagctaggggaatgtagggaccaggaaggacgtttgtgaggtggtagatctcatggcatgctgacggaaacgatccagtggagagggaaaacctggtgatgtaaagtgagaggagatgattgcacaacagtcctcatgtaagagagaagagataccgaaaagaacgcagaggagccaagacgtttattgacctttgcctgagttcgttattaggggacaccatagcatgatagtccctaaggaatggagagcagtgttgtgtgacattggtcataagcttttctgattgaccaagatgtatactgaagactcacttttttcttcctcccttccaggtgccatgctatgtgtttgatgaagagttgaggaagcatgatctcaatcctctgatcaagcttagtggtgcctacttggtggatgactccgatccggacacttctctattcatcaatgtttgtagagacataggtatgaatctttgtggggctgagggggtggtggtgagggatttcttctatggcttcaatatctttgcctttctacctttatttctgttttcacatccatgtttctgattaggccctctaataaagcttttgtccccaaaaatgttctatttgcacaacccacctcttctcccccagtagattccatgcctcctccccaacccctgtagattccatcctaactgttgatccattccatgtgggtgttctctcggccagacaccttgggtttcgggattctacagaagtgagggtcggtcttgttctctgtgtgtgcctgaatcccttggctctgagttacgggctgggtgaaaaagaaaaagggatgatcaaggacttgggtacttggtcgggatgcatatttggcccaagctgacttgttcctttctctgtacttgccaaaactggtgtgagaagctttagcttaagctttagaatctttgataaattaactaaagaccgtaaataaatggtctttatctaaaaagggccatgaaaagttttactaagcctttgactagccttcagctggttttactaagccaagtttctaaaacccagcttgatgttcccctcagggctatgaattgttagtcctgtaggccaggactgtctttctgcagtgctagccatgagtaaattctgctggtgattaactaatctaaaggtcatttttagtgttcttctttgttttttatttctcaaatagtacataatgctttgcccttagaaaagtttggagaaaattttaaaaaataaactcaatacatggaagtattgctggatagtagatgagtattaatttatgattattctttaaattatatatatacattatgtactatcttgtttatgtattatttctaaacagttaaaaacagtaaatataccccattcagggctcaccaaaagtaaccaatgataactaggtttttttgtgtgtgttagagtattacatctttcttttgttctccaaggataacctttattgattttttggaaaaagactaatacagtctttgtcttaaatgggtctgtaactcaagtttggttatagagttgatgagttgtagattattgaattctggaataatacgctattttgatttggaaaacatttaggtttctggtctcttaacattttacagatcatctgaatttgctgagtattttcttacaagttttttctttccaatttattggcaatttgagtagagcttgaatgactttgattcacagtagaggtgccctagtttttactcagacattctccattcccaggaaattgccctaagtctcaaaccaagattgaatgtgaccctcaaaacctcttggatagtttcggacttgccatcatgtgcttacctccttgcatcctcagggcgcttgctgtgtattctgcctttggtataccaagtggattgtcttacactgagtccccatgagggcaaggagcctatggcacagcagatactataggtggaacaaagcagtccatttgtgaaatttcataattccacataattcataattgtttggaaggcttgagagttaaaggtttgcttacctcttcactagctggtgcaaaggtagataaccctctccatctttgattaataaggcaggtaaaacttaagggaggtaagattattcactcactcattcgtgggagaagggttgtttgaatcccttctgtgtgctaggcactaatctaggcactggattatagcactgaactcaccacagttcctgttttcctggaactttagttagataggagaaaagatagatagtaaacaaataaatcccaaagtatactgtgtaaggtattgagtcatggtcatagaaatgaatggtaaagagcaacctagctgtaatcatagctgttgctatactggcaatctgtaaagcctgcgggatgttctggacatattctgggtatgttttcatctttaatcctccaccaaacctgtgcagtagcacactggcaattggatagttttgtagttagaccaacgttatcgacatagtaagtggtcgatttaggatttgaacccagagctgtgggttctttccctaatctcctaattgttccagtcatctgtggagtgcctgcattttctagtctctgtagcttgaaaggggatagtgctaatgttgttgtacctcaagcagaggatgggtacatttcttgattacaaataacatcatagcctgtttcctgtgcacctcttatataccagtgcagagccagtactttacagtccttcatcctgagctttgtttgcagagggttaatggcttgcccaaggtttcagaatagttacttagggagacttttaggaattcaataatgtatttaaagggaccctgggtctaagggtacgtgtgattatcactcctaacacctaatctgatttaatgtaatacatgattttcagacacactacgagacccaggttcacagctgcgggcctgtccccccggcactgccgcctgcctggtaagaggacaccaggcgtttgatgttggccagccccgggacggactgaagctggtgcgcaaggacaggtcagtcaaggcctccgatgctgttggcgtttttaatctccagcaaggacctgactttcagggagctgcaggaacatcctttttcagcaaggcttgggatagtccctgcagcattgctgcttcacatgtacttgtaagattgttggtcattgctgtgagtcacatagtctagtgtgcttgtctactttttaatcatttgtctcttacagcagtaaaaatacatctcatgatccagtccatagtacatacctgtatttgcctcatgaaataatgcctatcttaaggtgccatctgatatttttcattctgtggcacccgtgaaattgattttgtgtccattgtgttctcatcttgggagggcaagagacaggagggacagtttgctggtgaccttcactgggatgtgacagggaccttggttcccagtggggaatggtgttccttataatgtgttgtgccgtgtacatatgctcttgtactgcctttgtatcttgccttggcagacatacgcatttctctagtgtgttgcacatgaccatatcctgaacttcgatcaaggattcacattttctccccattcagaggcctttggtagacaccttgttgtgcttgctctagtctggagctcgtggcatgtctgggtggttgtagggagcatgtgcaattataatggcactctgtccaaagaaaaaacttgagcgtaacctgaggggaaaagtgtttggaattttctatgtgtgtgtctgtattagtttgctcaggctgccataagaaaatacgataggctgggtagcttaaaccacagaaatgtatttcctacacagtctaaaggctgcatgtctgaagaaggcgtcaccggggctggtttgttctgaggcctctctccttggctcgttagatggccgttttctttctgtgtcttcacgtggccttccctctgcgggggtctgtgtccgaatctcctcttctgataaggacaccagtgattttttggattaaggcccactcacatgatctcctttttccttgttcacctctttaaaggccctgtctccaaatatagtcacatgctgagctatggcttaggccttcaacatacaaattttgaggggaaacagttcagtccataacagagtctttaagtgacacattggtaattcttaatatgaatgagtttgtgtgacgatttagtaacatgtgggacactgagcaagtgtgagcttctcttgtgggaaaaggcaggtcatctgtgatcagctattctctagcaggcagccaggggcactgggccctttccacactgagtgcagtaaaccctggtggtgggggccatgttggatggtggtttgggtggtggaagagaaccccagttcagtaactgctgtaactgctgggcaggtgctgtggggttaagacaaaacaaaacttttggctggcacttagaatttgttgtataaagaggaaatgattgactagccttgtgggcaaaaatgcacctggcctgcttgtctgcctttttttttttttaattttgttatctcatttacaaccgttttttgcttgttttagtcaaatggtgtttcttcctttttttaaaaaaaataatttttttgttccttttctctttccttattctaggacatgaagcagatcaaacaggttttgtttttgtttttgcttttgtttttgagatgggtcttgctgtgtcacgtaggctggagtgcagtggtgtgattttggttcactgcaacctccgcctccctgttcaagtgattctcctgcctcagcctcctcagtagctgggactagaggcgcactaccatgcccagctaatttttgtagttttagtagagatggaggttcgctgtgttggccagggtagtctggaactcctgacctcaggtgatccaccaccttggtctcccagaatgctgggattacaggcgtgagccatcgcacccagccaggttttcttaatatatcaaatttatgtgctggtcactttagatatttgattttttaacaaaataacactcactggagtttacttaaaacttttttttttttcaaatggaaataaagtcattttataccatatctacttttatattttaatatttcttctgttaccctctcctcccccccaagtgaatgtgctgaatgctcagggcaacatatgaatttggatgtactttatacttttgtaatactcttttctcaatgtggctctcccaggcttgtcctgagttacgtgagggaagaggcaggaaagctagacttttgtgatggtcacagccctgcggtgactattacatttgtttgcccgtcggagcggagagaggtaagtgactcgtctcctgatcactaatgtggcgcacagtagcctgggttgcccatgcgaacgcgtttctgggcttggggcagggtgggcctggatgcaggaagctgggagccatgacagaggcactggtgggttctcaggagaagacaagcttcctgggatagcttctgtcacatgcagctcactcagggagagctgtttgcattttgccttttgcttttttacagcaatccggaggggcctccacatataatgggatggtgttttgttctagtctctgtgagattattttaagtagttcacggacagatttttttttggtagttgggttgttttagtgaatagtggaaaaacgaagtagaatttcaagcctgtgatttcttatgagaagcctttccctccctctctcttcccagtctgcccctaaacccccatccatgccttctcccctctttctcatcacaggccagtttattgctgtgccctctgctgttgatgaaatctccagcgcagctgtaaactcttcgagtgtggctgctgagacttacttgtccttgagtgcccagcgcctgcaagtgttttaaccaggggcaggtgctgatggaaaggaggcgtcccccagggagggaggggtagggcagggctttcctttagtttctttctgccttcttagtaatagggtgaagtagggaggggctgaattcttttgccagagaaccacactccccttcccccaagcaaatgtggaatttgctctgacgtcaggctggcagctggcctggtgtgtgtgggatatggagacagtgcagggctcagctttccactttctgtccccagacttccacatcaagtgctgtcagctgaatgaaggccggagtgtctgatgtttgttctgaatgtgaatggggaggaatatttattcacacttttcatttgtacctacagatgtgagttgaaatcttttaagcccagtgagatgttctcaggcggtagtggttttagtgttttccctttttatttgttctacatttggtaagaatcattttacactgtgagaaccaagagaattgggagttttcctcctttttcttcgaaggggtatgaggcatttcttggtgttagaagaagaggctgatttgttattagtggagcaagaagttccctctgttttttttttttttttttaaagacagtgtcttgctctgtcgccccggccggagtgcagtgccacgatctcacttcactacaatctccgcctccctagttcaagcaatcctcccacttcaagcaatcctcccacttcagccttctgagtagctgggactacaggcatgtgccaccacgcctggctaatttttgtatttttagtagagacagggctttgctatgttgcccaggctggtcttgaactcccaggctcaagtgatctgtccacctcggcctcccacagtgctgggattacaggtgtgagccaccgcaccggccaggtttcttttcaagcttaactgttcactgggcagaccttgtgtgacatgtgcttggacactgtaatacttgggaggtttgtttaagcatttacatttgctcattgaatgattttaggagctggtatttagtaaacactcaccttgtcatatagatcattttaaaaatgctttatttaatttatttattgggtttacatactgtaaagttcagttttttttaagtacaattcagtggttattagtatttttttttagaactgtgcaaccatcatcacaatctaattttgcatttccatcaccccaaaaagaaacctcctgcccattagcagtctcttcccattcataccccaagccctggcaactgtccaccttcttcctgtctctgtggattggccttttttggatgttttatgtcaggagaatcctacactgtgtggctttctgtgcctggtttctcttacggagccctggggtctgcatcaccatgtgtcagactgcactgagccacgtgggcagaagcatcgattatgagtcaaacagaagagggttgggcctgcagctctgcaacttactaattgtgtgcgacctgtttgtaaacctggcacctagtgcctggcgtgtagcaggtgctcagtgagtatttacggaatgaatggtgctgggaagcagcacggctatgcccggtgctaagcccagtaagtcgtgtctcctaagggtgattaaaaagctggcagtgacattcctggtgagcagggaccccatcagcccccttcatggctcacatcaaagacgaatggtggagctcctgctctgtagaagcaacacaatggcagaatcgggtttgtgtctgggtggtgccctggcttcacccaggagcaggtgtgggtacagatatggtggtgcccaggatcccaaaggggttgtggaccgtgtctctggttgtgcacgcatgtgataatgttcactcagtgtcagggttgcaccactccagttgagcacctcgtggaaagcggtgaatggaccatgcaccctgcacggcctgttagcgcttgccgatgtcctagtgattgccacgtgccactgagtccaggtgcttgctggccgaagcttgagtgtctctctgaaggtgactagactagaaagggaatagagtgtaaagaggaaatggaggtgttacgagtcaaatggaaaaaaaataacagtttagaaaaaaattaaaagtaactttactgagttgttataagtcaaataatcttaatgtgttagaggcaattatgattcaaaaaacagaaacagcaaaatgtagaaacctaacaacctgtctttgagcttttcataagtgtggaaaatctgcattaagctgcatgaaacattttttattttgcttctttcacattgttcctgatagggcaccattcccaaactcacagctaaatccaactgccgctatgaaattgagtggattactgagtatgcctgccacagagattacctggaaagtaaaacttgttctctgagcggcgagcagcaggatgtctccatagacctcacaccacttgcccagagcggaggtaagcaggtgctttctgcctcctggcgctgcttaggaagaaggggatcgagagagggaacgggacagtaggggccaagtcagtccatgcatgcttctgggttggagagagctgtagtttgggctggtgtttcagaaataggattcaggtttgactaagtaagactgtaatcttctaatacctattcatataaaacaagcctcttcttgttaatttccctgtttttaggttcatcctatatttcagatggaaaagaatatttgttttatttgaatgtctgtggagaaactgaaatacagttctgtaataaaaaacaagctgcagtttgccaagtgaaaaagagcgatacctctcaagtcaaagcagcaggaagataccacaatcagaccctccggtacgtcaacaacctctgtgcgattttcctttttctttgtatttcttgagatagggttgcactctggcgcccaggctagactgcagtggtgcaatctcggtgcattgcagccttgacttccctgcctcaagtaattctcccacctcagcctcccgagtagctgggactacaggcaggcaccaccatgcctagctggtttctgtagtttttgtagacatggagttttgccatgttgcccacgctgatcttgaagtccttgcctcggtgatcctcccacattggcctcccaaagtgcgtggattagaggcgtgtgccttgggactggcctgcataattttcaagtgcgttgtgtgtattcttgtgaaacataactccctctccttttcttcctctttccattttccgtaaggtacgggagaatcagttactccagcattccttcctagtagacttcggcaagttgccgtttgtcactaaacaatcaaatgtttttcctggctttagagtaagaatgcttctgttagaactgttcactttataaacttgctgtttgtacggaacctactgtaggaaaagtatttaatgagtttacagttgatagggttttttattttaaaattcgtttttaaggagttttgatttttctctggcagtttgagaatctgaagcaccatcaacataacagaaaattttaaacaactaaaaaaatgcattcagcacatttcttttgacccttaacttggtagttgaccttcataaaagcaggatgaaaatgcagttttctgaaaatgtgttaggggcagttacgattcaaaaattaggaacagaaaactgcaaaaaccccagaactggtctttgagctttttaaaagcatggaatatctgccgagaagctgcattttaaacattttatttttgcttctttcaaattgttcaggatcagtatagtccaaggcccctcaggcacggctgtgttcatggcggctgttaagaaggctgtctaattcttgggcgttatttattttgtacgaaatctaaaagtgagaacaagagaagtcttcatgctcacagcaaaaccttcggcactttcttccagccagttactactttgaagcgagaggatgtcaagtccatacatttggaactcatttcctgtagatatttttccctagctggctagagagcttgctgttttagatccgtagtgatttgttgatgctacgcaaaaggcttaatgtagacatttaaaaagattcaagtttttttcttggttctcccaaacacatttgtctgtgtattcacaaaaatctagatattcggatggagacctcaccttgatatattttggaggtgatgaatgcagctcagggtttcagcggatgagcgtcataaactttgagtgcaataaaaccgcaggtaagtgtgcgctggagttcagcccctcctctttgcattcatgggcatgtgcttgtgtgtgtgcacaggcgtgttcttggaagtgaacactgaatggaggagtcagatgccctcctttggactggccagctctagcccccagactgggttttttctgttggagtaacactttccccacccccactgccccagtggacacacacacatcctgtttgtgttttcctcggttttctctgtttgttttgggaatgggcccagcaatgagcttgttgggaaagttttcatcttgaattttggtgcacactaaactacagcaaggacagattcggcaggggcgggatggcttgtcaattttgattgagtgacctcttcttttatgtaatgagtatcaagataatcctttttgcaaagtggtgaccctatggtagagtttggatctggggattgcagaatgtcactgggtgcgttgaagctgaaggcgtgcatttctctgagtaatgagaagcacccttgagtcaccaaggcactggcatatcaaaaagcggtgccgctgtccatatcttgacgattgtagacacagttgtagctgtagagagatgatgggattccgtcatcatcagagacctgccccatctgttgacccccaggctgtgactccaggcaccctgcagggcatcccaccactgctcagagcaattctagggcccattctggtttccagcctaagtgctgccccacccagagggtctttctggcccttgcttccgtgtgttctgtgtgtttttctacagcagagctttgggtggcttggttacaggatgggttgctacaggattcactgtgggatgagggagaggcagctggacatgatgtgaaccatgctctcgaagcctccggagatcaggtctgcgttgggagagacaggcacccctgccctggtagcaccgcacccctgcgaacgtcctagcaagcaggcaaagaaccagcccagggtcttgccactgggaaggctttcaagcccaaaatgccccagtaactgctgttgtggcacctgcccctgggatgcccttgttcacaggtctgccattgctgtccttgttctctacatggccccttttgttactttcacaatacacacattttttaagtacctatttgcttaggccctatgaggctggagggtgttgtgaggatagatggctctctaggtgttcacagactagcagcagagagagataaggagcatgatgatggaggttcagggcagtgctgctagagtagagcgagtgcttagtgttgtcgctccgctgctttaccaggagggaggcaccgaggtcagctggctggggtctgggctgggtgcaggggtcaggcagttcagagaggaggaagtgctgcctgagccacactacattgaggagcatgccagtcccgtgttggggtggctttagggcctgggcctccagacattcaaaggcatggaccaggggaactgcgagcaggttagaggcgtgtatggggaatgtggctgaagatgaccctggaacggtgagtgtgcagtattgtaagaaacttgtatgtcctgcagaggagctggattatatctggaaatctgtgaagtcccaaggattttcagcaggggtatgacatacatctgactcgtgaatgagaaaatcagtgtggcctctggatggacctcgcatctggtctgagcactccctgcacccctcagcttctccatcattctctcatcgccctcacctcctagcctacctacgctactagcctccttagccatgtctgcaccctgaatcacgtctctcctacttggtgtccccagtccccagggatgcagcctgtatcttccccatgtgcccagcccctctgatgcctgaccttggttctggctcccaggtcaccccaactggctctcctggactccggctggctcaggctgctctgctgtggtctgaatctccctgcaactttgtgatgacctcctttggcctgttctgttcagggctttttattaatgacttggccgagatctttgagagtgtgctgatctcatttggggatgctgggaagacagaatcattatccaaaaagatcgaaatggacgagcaggatatgagaagggcattatatcgtttcagacttacagggaagaggtgtggacatcgatgagctgccaaccaaacaaaaaacacaggagagaaaaaccaaagaacagaaagaaagaaaaatagaaaaaaaaaagaagacccgcagtagagtggggagatcttgccttgtagttatgagcatagatgaggccacaccctctgggtttggttcccagctgccctagtttttagttatgaaatcatgggcccagagggagctaaagcccagatgagctgaggcttgacaaaacgggtgaaggcctcccatagctccatttttccttttcattataaaaattttcaaacatggaacattaaaacagaaatttacatgcctgccactctgacagccattgatgttttgccagatttttcatgtaagccatgcgtcattgatggctcatatcaccccaccctgatgccaagaacgaacattcctttatgtaaattcagtaccatcgttgtacttaacaaaattaacagtgacatcctgatgttaaaaaacccatgttttcctaggctgttttcattatgattgtaacaaggagcctggacagagagatgtcaggtgttttgtgggagggttttgagctggctctcaggcaggagttggattaaaaaatacttacatttccttccagctctgtaattcagcactccaaactctgagagcaaattgtgtactgtaaaattagttcattattattttgctcgaatttaaacttagagtttttggagaatatcccttggtagactctgtttattagatagatgtatttttgaaggtgaacgagtgttaattggctatgtaatagaagtgtggtttaagttggatctctaggaattattcatgtgaatctaggttcatgtacttttcaggatgcaagcgcatcttttggtcataatattttttaccagtttaaatctagtttgttgtaaagcgatgctttattattggtgatttttttaaataaagatgttagataattttttggaagagcagaattcattaggataggctaataaactactcacaatttaagtggctcagcccattaaaggtttattttcttagttcagtgctagtctttggggatggggctggggtcgggggtgcgggctctgctccatgtggtcatttggagacctacgctttttccatcctgtgtttctgccatctgcagatgtgacttccaggggctctgcaggatgggaacatcaatttgctttgttttattttttttccaggccagaaataagtcacttggcccagcctgaatatcaggggaggctgggaaacggagtttagctatgtgtctagaggaaaaattaaactagttgggtaagaggtagcattgtttttgccacagagaaatgggtgctgctgcctcctccttaggcagagagctccttggttccatttgaaaaccttccttccccttttgctggaattgagagactgaggacacaaagtggtgtgctggagaataaactagagcctgtggtgccagactggcaacttggggattgtgtgagtgagggagagattgtgcagagctaatcctaacattgctgatgagtggacagaaaccataggcctcatgaatagtgatttctgaagtcaaagcccagtatgcttaaatatcaacccaagtggtttgggagaggggagcacagcttactgttctgctaaaattctttgaggaattaagtaagaatacgtgtaaggtacgtagcaatggttatttacaaaatggactctgcctgcagattattagtatgtctcagatgtaaaaccagctcaaaagtactaggacgatttgtagtagtatttaattatttgtaaacttacacgtttttcttcacgtttgcagaatacaaatctttgtcagtagtgaaatgtgaatctagtaggattaaactgtgtgtaaaccttgtgggcgggatgaagagaggcagaggcgcgtcactgttgctgttagttgaccggcaagctcaggggcccagctatggtagctgcctctgggttgtcagctgcgcccaggaggtgaaggtggaaggcattccttaaagacagtggcttagtgtacttattaaaaaccaaaccaaaccagccaaccaaacaaacaaaaaacacaggagagaaaaccaaagaaaaaaagaaaaatagaaaaaaccccacagtagagtggggcaatcttgccttgtggttatgagcacggatgagggcagaccctcagggtctgattcccagctgccctagtttttagttatgaaaccataagcaaattatttagccaccctaaatctgcaaaatggtgctaaaattgtacctttgccatggggttttgaggatcaaatacattaatatagtcatgtgttgcttaacaataggaatatgttctgagaaatgtgtcattaggcgattttgtcattgtgtgaacatcatagagtgtacttaacacacacctagatggtatagcctgctgcacacctaagctatatggtgtagcctattggctcctgggctacaagtgtgtatagcatgtgagtgtactgaatactgcatgcacttgtaacacaacggtaagtatttgagtatctaaatatatctaaacatagaaaaggtccactaaaaatacgatactataatcttttgaggctaccgttttatatgcagtctgttgttgaccaaatgttgttatgcagcacgtaactgtataaagaaagtacttaaacagagcctgttcttctgcagcttgcctttatgtagccgaggtgctgagctcagtgcctggctgagattgtgctcactacaggtttgccgctgtggctggtattataattatagtgatgataatattaaagattggatagaaattacaattgaaatatcatttgctcttggtacagaatcttacttcctgttttcttagatcattacctagcttatgataccaaacctcaagaaggcagatcacatggtgggaggctcagacaaggattatgaaaccatcaggggtgggaaaaggagtgttgtgcccacggacccctagcctggaaaggtgcagggataggatttccagcaaggagcaagtcagcaaagcctctgaatctcagcgtccatgggatggggacgtggcctgtgaagagctggttttcagacttaggcctgaactattcctgctgatggatgggaaatctgggtggctcactcttggtggaagaagaggcttgatttgaggagggtgttacagacaggtgcactgacggaaccacagaatttcagcactgtttggagttgtgctgctaacattgtggggctggcataggaccttggcgtgcttcactgggagcgactgactatagatggcttccactcttgttttactttagggatgagtcccagagaacttgtcttgttcacagtcgcatcactaagtcagcagtgcacagggaactagagctccatttctgtcctcctttctgtgagtccccagtgtcacccagagatgttcaggagcctctgggagctgaccacagcccgggagcagaggatcccactcactgctcttgcgttcctcctgcctgcccttttaatcttatctttggagatgctgtacacagccttctgtcaatgtctcccaaggtgaaaggcatgctggcctgccatcgaggacttagggttaagcatctgaagcttaatagaagcctgtgtcaactcagatccccatggtctctaaaaaaacctggacctgaattttttaacggagcagttggcattggtcctgttcagtttcttccttgctccttagctgttcctcaattttggtcacgtatggagtttaaatttctcctcttgaattgtgcaggtaacgatgggaaaggaactcctgtattcacaggggaggttgactgcacctacttcttcacatgggacacggaatacgcctgtgttaaggagaaggaagacctcctctgcggtgccaccgacgggaagaagcgctatgacctgtccgcgctggtccgccatgcaggtactgccctccttgccatgcgggtcttagtccacatgctcatggaacattttcccatgagtacttttggaaatgcggttactattttctttgtcagtgggttgcgtcacagccctcccccagttttttcatgtggctgtgtgaattattagaaggagcattggactgggaggtgaaataactgaatttgagaccagcatttttgaccttgtgttttcacccttttacacactgcctctcttccatctctgaggtgggatctgcagcctctgccccctggggttcttctgtttggatcctctaggcagatggatgtgcaccttgggctgctgttcaccgctgcctcagcgtgcagtgggcttgtactcgaggctgagcttgctgttgcacggcaggcaccggatgaggtgccaaggaggcagcagcgccccccacagcacaacccctgtccttgggggcctggaatttagcaggaaacagagcaggtggaataataagaatgggagtctcaagcagggataatctgatgggggggatttctggttttaccctcttggcagctcaaattaggtgtacagaagccagttgcctctgtaagggggagatgacccgaagcagagagaatgacttgcctcatgtaattaccacccagaacagtcacagaactgctggcggtatgttctcgctcgtaagtgggagttgaacattgagaacacatgggcacagaggggaacagcacacaccatggcctgtttagggttgggggtgaggggagggaacttagaggatggatcagtaggtgcagcaaaccaccatggcacatgtatacctatgtaacaaacctgcacgttctccacatgtatcttgtttttttttaaagaaaaataaaactgccagggtgacagcactgctgctcctgtcttctgagtcccacctggtttgctaaataccaggttagaaagaggaatccctcttgtggagtgtttgagaacctgcctcactgtgaaccgcctgggcagggagtgctggcagtgctgttgtggttaaacaccctgtgtgctgctgggaacggtgccatagttaattctggcacatgtgtgctagtgaagacattggttttctgtgaagtggaaagagttctagctgcagagttggagacctggctgaggactggtgttgccgcatccaaccacatttgcttgagcgagctgctctccaggcccgggtttcttacggtgaactgggtggtgctgttagattccttaagttaacttttttttttttaaacattactgtgtataagagacaacctaggatctatgagataaggagagatacatttttcaatctacagacttcctgacatagctctggtttcttggaatctgcagtatttcgtggtatttgtgcgtagatagccctaagtaaattatgaagggagagctaaaaccattccttactgcttgaagaagtcccttaagactttacagcccacctggctccaccccagacttccagtgtttagggcaggtccttgttcacatgcacagtcttgtatggtttcttttaggctgttgacattggaaagtacttctccaaatgtactgtatcaccactgatgagtcatggggttttgccttccaaaccccagtacccaacctgcaaagggagcattttcaaatgagaacgtgtatttttatatctttacctcctccttgacacactttgtaagttactccttcagcgactgttcgccgtgtggtttgctttttgtggatgccctcgcccttgcttgctgtgctggtgacactcagctggtgccccctcacgtcctgcaggtgcctaatcagtgtctgatcacactgaccagctcaccagtcttgtgagttcagcggccacctgtggtaccttgcttgtcttctgtggtagcatgcattgcatcctgcactcagtctgcagatgtgtaagaggttgctggtttcttttagcttcacaggccttcacaggggccgagcggggtgtattagcaatggtgttaagcggggtgtactagcaatgatgtaccactctactgcgtcccaagacacaggctggcttcttgatttgggttttcagtttctaatttcatactgtggggcttgggagaattttgccgttcagttctctgtcccccagttgggcctactcttctgaagaagtattgggatgtagtttgtttctgtcacattaaatgagaaacctgagaatctcggtgaatttttgtgctttcagtctgcccgggttccagaaacagcgctggggattgagtgacgaagtggtttgggaactttgagcccttgacttttggcttaatcactatttattctgtgactcagagaaatcagcattgcttttggctaaaatacacttttgttttgttacagaaccagagcagaattgggaagctgtggatggcagtcagacggaaacagagaagaagcattttttcattaatatttgtcacagagtgctgcaggaaggcaaggcacgagggtgtcccgaggacgcggcagtgtgtgcagtgggtgagttgtgcctggatggaagatctaggtgatgcttttctagggcatccagtttggaatgagttagaagatctttctgtggttcatctaagcctcctctttctataatcacatgaaggatggtaaaaatttttcattcataactcaaatgtcagtaattgcttgatgcactctggaatcctgaagttggctagagctccctgacatgggctaaagccataactgggaacagaaggaaccacgtggaaaatactacatcatctttttagtttgtaacctgaagaataacattgccagtgtttgtgtacaagtgattttattttattttttaacaactttattgcctagaatcgttcaaaagttatggcttgagtgaagtgtaatctcagctgtagccctagtgtaagaggggcttgcatgcttcgcttccttttgctgtcattgttttggtcccgtagctgtcatgcagagacttctcaattatttgatacaggtatttagcacttcatttttgtcatttatgactcactttgaaaatgccaggctatgagaatagtgagaatctgttaaaagcattcaataaggaattgtgagcctcgttggattttaggaattatctcggtattcagaattgctggtgtgtctttaaaagcaggttcaggcatgtccatgtctttactaagaaggactttggaacagagttttaatcctttataacaaaaagcaagtgaaccaagaagtaagcggcctcctgcttgggttgctaaacaggtttcgttaatttctgctttggatatgagacacattctcaccctttggctgtgtggctgtgctttcaaaagactttgtgtcttggggtagctgaagccctgacagtaggggacaatgtcagtttacagttggtgctgatgcatgttgcaagccatttggtctttcttgccctggaagggcattgtgcatccttcatggcgctttctggctgaacctatggatgaccctggaggaccccaatgtggctgttaatgtctagccaaacgtggcactctagggaaacccatccgctgccttggtgggttcagggggctggagaagggctgcacttgctgggtttgggctgatttctttctttctttctctttctttcttttttttttaagtcacttctttgtctgcgtgatgatcatttttaaccacatcttctgttttctccccctttctcttccagataaaaatggaagtaaaaatctgggaaaatttatttcctctcccatgaaagagaaaggaaacattcaactctcttattcagatggtgatgattgtggtcatggcaagaaaattaaaactaatatcacacttgtatgcaagccaggtaaaaattttaaaaaagatgaaatcttttctggcttctgccagaggtcctgcattcttcatagctctgttcctcatcagtcactgcaaagctgatcagacagattggcatggtgttcagcattttgagttccagactctggcgatgggagataggtcatttggaatttttccctcatcccctcctcaaaaccaaatcagaaatggagaaaccagatggtgtcagaagggagttgtgggtctcagcgctgtatcctcttcctcgggactgatactcggccagtcatgtggttacttaacttccttcaaaggggaaaaaaatcataaatggtttaaaacattgcccgtgatctcaccacttaaacacaatgttaatttttcattacctttatttatagatgtatgttgtttttaccaagtcaaaatttttatggtaacaaatcttaatgtttctcaaagtgtagtattttgtaaatacttttctatgtttcacagttccattaataatttttaggaacttccttgttgacatggtgtggttttactatttttgaacattttccttattgttggattaatagcgcgtttccagtgttgctaattgtgctattatgtatcctctctctacctcccattgaaatatttcctttggataagttcccagctgtgggataaagtcagaagctagggtcattttgtttgtttgttttatatggtaaaatatacaacataacgtaaaatgtaccatcctaactgcttttaagtgtgtagcttggtgacattgttgtgtaataccaccaccatccatctccagaactttttgatcctcccagactgaaactcagttcccattaaacacgagctctccattccctctcttctactttttgtctctacggatttgactgttctagatacctcatataggtggaatgctacagtatttgtagggctgttttttgacccttctatgcattatacctcatttcccactgtcccttccaagtctacttctagcagagaagaatgaggtaagatattttaggaatgaacggattagtgatccccatctcttttccccattgacaggtgatctggaaagtgcaccagtgttgagaacttctggggaaggcggttgcttttatgagtttgagtggcacacagctgcggcctgtgtgctgtctaagacagaaggggagaactgcacggtctttgactcccaggcaggtctgtgtccaagcaggacctctgctttaatgtgacttggaaccacttaaggttttttccttaacattctgtgtgaggttttcaaggtgacccgccttagaattttattcatgctgtttgaacaaaattctgaacatccgatgtttgaggcttatttgagatactgaaaatactatcttaaattcattattgaggtggttttgctgaatgcaaaaccttcggaacacaagggaataaattatgtttgaaaaggctttcgtgtgaattctaggcaagaaacctctctgagggagaccttacaagaaggccataatatcatgctcgtcctactttgaacatgctgttgtttattagcccagcagttatgggctttgaatagcgctttaggctaacccagtagaagggaatggtggagttggatccatctccaaggaaaatgttagtaatcgcggttctggtggcctcaaggggcagcgtctcttctgcctcctccacttcttcctgccgttgggaacctcctgggaagaacctctccctttcaaactgtggggtgagaccactctgttaactgtcggactgaccttccatacttttattgtttttattctttcttagggttttcttttgacttatcacctctcacaaagaaaaatggtgcctataaagttgagacaaagaagtatgacttttatataaatgtgtgtggcccggtgtctgtgagcccctgtcagccagactcaggagcctgccaggtggcaaaaaggcaagtagcttctcagttctgtttcattcttaggcattatatgctaagaaatattattttcaggaataggtgtgttctcacttaatgtcattgctttatgacaagcatttaaatactgatgagacctggtctgaaaactgaaggatgttaggagtttaatttcccagagaaaggagcaggcccatccttgggaaagaagggtggattgaggtcatgcctcactattgcgcattttgtgcttctcagtgcctagatatctctgtgcgtatttctgcattctgcgtaactgcagttcaaatgaagtgagttgtctaaaccagcggtgccaagaggagatttgggtcccagtgttcctgctgccgttggagaccttgtgtgggttcctgtggtctgcagcccgggcctggttctggtgactcctcacgtcgctcacgggccctcccttcagtgtggcagccttggagtgcttctgcccctcaggtctttgctgagagaaacgtgtgtttatttcagtgatgagaagacttggaacttgggtctgagtaatgcgaagctttcatattatgatgggatgatccaactgaactacagaggcggcacgccctataacaatgaaagacacacaccgagagctacgctcatcacctttctctgtgatcgagacgcgggagtgggcttccctgaatatcaggtaggaatgtttgtccctcatcgcgctccctgaggatactcatgcctgtggtgggcctttcatttaagcagagcttgtatcagtctgggtttccagccaaatcatcaccgtcattagatttgccagggtgcctgggcagtattagtattttaagctgtttatttagtgggttgtgcaccttaataacagcccacaagcctgtcagttttgggtacaaaacatacaaaagcataaaaaaaaatcctgaattaacccccacttagcagaggctaaattttcatcctgatttgttactggacagtcttctttttaataaaatgaagggagatgggcagactaagcttttcttcacagtttctcattgggaacattgctctcgtccttttttgaatcctggttttatgtcacgtgtctttctctttttgccatccctccgcgcatctgccgtggattaggaagaggataactccacctacaacttccggtggtacaccagctatgcctgcccggaggagcccctggaatgcgtagtgaccgacccctccacgctggagcagtacgacctctccaggtgaggcagagtcagctgctctgtttttggcctggtacagatgctgaggttgcaagtgttgctggtgagcgtgtgactgagctgatgatggggagtgatgctggctgtggggctgcaggaccaaggtggggcattttcagcagagtgaattctaataacagtctggtcgcctttgggatagcaaccagtcttggccacagcagagcctcagcctttagcttcatcatttaaaacaatgactgtcagtgcagaggcacgggggacagttaaggtccactgcatactgagttcagcgaaggtggagtgtaatcctggtgcgtcatgcgcccagacaagccaactcctggtagtgtgattggtggagcatgttttatttggtagctttacttccccaactacatagaaataaatgagactgaaatgtgtaagctctttaaaagcatatacattttgctttgaaattttagtctggcaaaatctgaaggtggccttggaggaaactggtatgccatggacaactcaggggaacatgtcacgtggaggaaatactacattaacgtgtgtcggcctctgaatccagtgccgggctgcaaccgatatgcatcggcttgccagatgaagtatgaaaaagatcaggtgaatctgttttcactgcttgtctcctttgccctcctaattccatgacttagtgggaggaggtggttattctgggacatccagatcaaaggcagcacagctgctcgagagaaaccctctgagtaggagtggggcctccatgtgaactcatctgcctcctgtaggagcagaagtgtgtcacacaggaatcattgttcacatggagaatgctgtgttgcagacttttgatcacacaaagggcagaggaagcaccgaatggttatgtctagcctgaattcaaaagtgtctttaggtgctttcagcagacacctgtgaaaaagagagttttgcttccaaaagctcttgtttctggattgattagggggaaaaaccgatttgggagagttgctgtggatgaaccagattcaagcacacgctctcattcgctgcagttcgtccctgggttgaatgcagtcaccgccagaacatttacccgtctcctgtggtcgttgtacgtggtgaatcttaaaagagatgtctctggacatctgtattggcttctgtaaaaatagcatgttgggaatgtacttttcttggtgtatgctaatggcagcttggaggtttttgaaaggaaggtggcaagtgtgctctggtggttaggaatcgagttcctggttgtgtttacctctgcacatgtgtgttctttactggagcaatgagttcagtgtatagtcagtcctctttattcacagattctgcatctgtgaacttgcctacttgagaacacgtgtaactccaaaatcaccacgcggaacactttctcagtcattgttggaacgagtgtagtggcccaatgtgcatagtacccgacaagcctgttcctggttgaagttgaacagggggacactctggcctcttgtttctgcctcaccctgagatgagcaggggatggagagggcgaggcagtgcagtgcaaaagctccagccctggggccagttggacggggtctgaattccaactctggcatctcaactcagagatgctccagagctggaacttccgcgctgcactgcctggtaaggtctccctaagagaagtttcttgcctagaattcacactaaagccttttcaaacatgacttactcccttgtgttcggaaagtttagcggggcagccttaggtgagccacttaacactccttaacctcgtttttccttctgtaaaataaagagagtagaatctgtcagcatgagttgtcttgggatttcagatttataatctgtgtgtaataggtttgtttgcctgatgtgcggccagtcagtacgctgagacattggggattacagccgagaaagagtttaattgtagggcaggcgaatgaggagatgagaagaaacctcaaattcacctccctaaggaatttgggttgagggacttaagggatttggagcgggccaaggtgtggggattgtttattggtagaagagtgcagggtgaagtcatcggatggggagatgaagaaactgcatttggttccctgtagggaggtcttcatagtggttagtgtcagccgttccaccggaattcaggatctgaagaacatcttacacgattattgaacgaaagccttatgattccaatgccagtgattctttctgtagcaataatggggatgtgactagtatctagtgctatgtgactttcagttacaggccagcatgcagcctgattggtgctcaattgcatgcctggaacgcagcatgcagttgttgttaactctttgaggatggtttcctattccatatgtaataaggggatttccccaggagcagtggttctgtattcaataattcattgtttgctgcagctttatagaatgtaaccaccaccaataacgaatcgactgtatcttcagggggaaaagcctaacaagactggttttcttgcagggctccttcactgaagtggtttccatcagtaacttgggaatggcaaagaccggcccggtggttgaggacagcggcagcctccttctggaatacgtgaatgggtcggcctgcaccaccagcgatggcagacagaccacatataccacgaggatccatctcgtctgctccaggggcaggctggtaaggcactgctgctggctggtgaccttcactgctgcattttttgactgagcgttgccttatgtgtctcttaacagcagcagtcttggggtgggtggcggagctaggccagtcttagttctgcttaaggtcagtgtgcggtatatatgttcacaggcagggagtgatttgtggtaccttcatggctgcgatttctgaagtgtaagcctcatcttttgctgcggagtttgaggctctggtgacatacactgtttcctggattttttttctgagtcgtacagacattatcttgcctcttagttcttgtgagttgaggatcgtggcagtggaacggggcttagagatagtttggtcctgtaggggccaagggaaagcttccctttcaccctttgaagtttccctgaaaatcagctgtcaacaggagaaaagacattaaaattttgacgtgcatagcaccggggaataaatagcaggagaaagatgacccagtagcctaatgcaacacagaaggttatgtaccctatttcacaggggagagggagataggggatgtagacagttcttttgacggggcagcaaatgattatttgggagaaagaatggacagaaattaacttgcaaatgattctctttggagcctgaatgaggaaggcattatcttgtgcacaagtctgtccaggtgtgattgctgtcctcagtcttcttttgtgggatagataatgagatttccgagtttcttttggaaagaagccttcttggtcaggtaaggaaattccagagaaagtctctccctgtgcttgagggtggaggtaacaaggcacggttcaaaggatgaccttgattctcaggcagcttctcagcatgtcaaagcactgatccttggggtattgctttctgagccccagcagtccaaaccacaaagaccacagataggaatctgaggcttggtatagctcaggcctgtgggtgaacgatgagggctgtatgtgtaatacaaaacaggaataagaaattaaggctgagggctgggcacagtggttcagatctaacccagcactgtggaaggccaacatgggaagatcactcacttgaggacaggaattggtgaccagcctaggcaacatagtgagaccccatctacaaaaaatttaaaaaaaaatttagccaagtgtggtggctcatgcctgtagtcccagttactctggaggctgaggcaggaggattccttgagcccaggaggttgaggattcagtgagccatgattgcactgcagcctgggagacaaagcgagcccctgtctcaaaaaaaaaaaattgggaggcagaggtaggaggattgtttgagcccaggagtctcagactagcctgggcaacttagtgagaccccatctctacaaaaaattagccaagtgtggtgatgtgcacctgtagtcctggctacttgggaggctgaggtgggaggatcacttgagcccaggaggcagagattgcagtgagctgaggatgtgctactatactgcagccccttggcaacagagcaagatcctgtttcaaaatagtaatcatataaacaacttcagcaaagtctcaggatacaaaatcaaggtgcaaaaatcacaagcattcctatacaccattaacagacaaagagagccaaatcatgagtgaactcccattcacaattgctacagagagaataaaatacctaggaatccaacttacaagggatgtgaagaacctcttcaaggagaactacaaaccactgctcaaggaaataaaagaggacacaaacaaatggaagaatattccatgctcatggataggaagaatcagtgtcatgaaaatggccatactgcccaaagtaatttgtagattcaataccatccccatcaagctaccaatggttttcttcacagaattggaaaaaactactttaaagttcatatggaaccaaaaaagagcccacattgccaagacaatcctaagcaaaaagaacaaagctggaggcatcatgctacctgacttcaaactatgctacaaggctacaataaccaaaacagcatggtactggtgcaaaacagatatatagaccaatggaaccgaacagagtcctcagaaataacaccacacatctacaaccatctgatctttgacaaacctgacaaaaacaagaaatggggaaaggattccctatttaataaatggtgctgggaaaactggctagccatatgtagaaagctgaaactggatcccttccttacacctgagacaaaattaattcaagatggattaaagacttaaatgttagacctaaaaccataaaaaccctagaagaaaacctaagcaataccattcaggacataagcatgggcaaggacttcatgactaaaacaccaaaagcaatggcaacaaaagccagaatagacaaatgggatctaattaaactaaagaccttctgcacggcaaaagaagcatggatgaagctggaaaccgtcattctcagcaaactatcataaggacagaaaaccaaacactgcatgttctcacttataggtgggaattgaacaaggagatcacttggacacacggtggggaacatcacacaccagggcctgttgggggctgggggggagggatagcattaggagaaatacctaaattaaatgatgagttgatgggtgcagcaaaccaacatggcacatgtatacctatgtatcaaacctgcatgttgtgcacatgtaccctagaacttaacatataataaaaaaaggtattaaaaataataataataaaatgaattaaggctaggaggtagaggaggtgagtgggattgatgttggccctgagttccttagccaggggacaacagcagactgtgtggagtttgctctgctcttctctccatggaaatgctttggggccattttatacagtcccaattgcttctgttttttaattggggtaaaatatatataacattaaactgaccattctgactgtctttgggttacatatattatacacatctctggtgtcctgtatttatcaccagtatccatgtccaggacttttacagggtcttgctgtgtcacccaggctagcgtgtagtgggtgtaatcattgctcactgaatcactgcagcctcgacttcctgggctcaagtgaccctgtcacctcagcctcctgagtagctggaactacaggtggagttacctgtagttatcaaaatggtttttaaattttttgaagagatggggggtctgtctatgtggcccaagctggtcttagaactcctaggttcaagcagtcctcctgcctcagcttcctaaagtgctgggattataggtatgagccaccatacacagcctagaagttttttgatggtctcaaatctaatttggaaaggagagctttatttctcataaagatttgcagcctgcagggtggccatttctgacaggctgggaagtgtagcctcaggccagaagccagaaacaagcgctgggagggaggaagactaagacacgaatggatgctgaacaggttagtcaagtatacatattcagcaggttacaggagcagctatgcatattcacgaagggatggcacacacatgcgtggtaggcaacatgtatgcagcatgtgtccccatgttcattttgggttgaagacataacatttaaatatattacagttgggccctgtatgtcgaaaggtgaagcagaggacatgaaggccctctgtgtgcagcctccttagaaggccaggaccacctgggagttgtggtctcttatcagcagggaatgctggtcgattgttgtgttgtcagaaccacaaaaagggatggacgttgtcaggtggtaggttgataccagcagcagagtctttcaaaagggtcggcttctgtttagcacttagggaagaaagcctagtggttaacgaggaaaggggtgtaatggggtatgtctcacctcccaccccgtcatggacaggaatgcaatttttaagtttctctggagtccccttggctaagagtggggtgtgttcagtcagttatggggcttaggattttattttcatttcttattacctgtagttttaggtttataccagggtcatgtgtttttgagaaattatcaaatggttaggagagtggagagactggaagccatgttcattatcaactaaattattaacaatcccttgttaagggtgtgtggcagcttcctcaagccccactgaaatgagccagcaggatgcgttctttccctgcagtggcccagtggacgctgcgtcactcacctgcctggtctgctttgtcattggctaacactctttttcctgagagacacttcctttagagttgaagatctcggtgatcagggaatgaatgacgggcaggctgagcttggcccatgctctctgcgggaggtgttctacccaggttgtacacactctccttgggttcacctgagcttgggccgcccacttcttctctcagtctcaggaaggatccaggtttggtgttccacggggagatgcctaggttgcccagttcagcctgctggtctgtttttgggcacatctgtgcattccctgcctgtggactgccccctccttctctggtttcttgttgccattgagacactgggtagttccagaaagttcttggacccttggttttccagcttttctgtgataccatatttagtttacagggtagcttcacattgttgtcgtgtctctcagcactcatatagggcctgcagcacaggaaatacactcactgaaggaagaaagggccgctctcccaggggtttgcagtcacagaactttcacaggctaaagctcagtccctttcacaagcacattgtgaagtggaaggagcaggtgtgtttttattctactgctagtgttgctgaggcctggagtgggtgggggctttcaagggtagagagcccttgacggccaagggtgtggactcagtgttagtggctgttgttcctgaacccgtgaccctgggcaggtgtcttaacttccttgtgcctcagttttctcatttgtaggctgtgtttgtgggtcactgtgaggcgcagttgagaaatactaacaaaactcatagtgcagtcctggtgtgtgataaacactccctgatcggcagctaccattgcctgtgtggtggtggtgctctcacaaagctaatggctctttgggggagctttttatggaaacatacacaccgaagggcacacagatgataacgtgacacagctgggtgagtgtccataaactacacatcaagaaagaacatgcttccccctaggagccctcctgtgccctcttcctgccactgctgagcatcctcctgacctctgacagcgcaggccattgttgcccaatcctgagctgatgtcagtgaatcctacgtaccgttgcctttgtgtatggcttcttgcattcaactttttgtgtagggtacttttcagaaccttgagctcagacctaggtttggatctgaattctaccatttactgctggcacgatttctatatttctgaatatccaagcgtaggagattattttgtcttcatagggagaatgagaacattaaattctaattaggtaatgcacattaagtgcctagcttattggctgactcataataaacatctagcagattttggctatttttatgtctcaggcgagtattcttttggttctatcaagttccatgttactgtattgacttttaccctggatttgcccattcagaacagccaccccatcttttctctcaactgggagtgtgtggtcagtttcctgtggaacacagaggctgcctgtcccattcagacaacgacggatacagaccaggtacgtgtgctttcacctggccctcgtgctgagctgcctgctggacatcctcaactcaccccagtgttccagctctgaaccgacccctgccccttctttctgaatcagttactatgttgcattgacaatgggtgtctgcaggtcacccagagttcctctccactccgcagctcccagctcctgggataagaaccaggtccctcagtcttactctctgctcactgtagtttccttccttttgtttccattcctttgtgccttccatgtggcagtggtatcctggtgggctctggggcttctgcaccaccggcagatgtctgactagtcgatacgtcactccacacctaaaccatctcagtgcctgtcccctagagggtagagcccgtatgttttaatgtgaccctatccatagagcacagcctgcaggtgttaatgtgatcctgtctatagggtaaggcctgtgtgtctctcacctgtgcataggccagagcccacaggtgttaatgtgatcctgtctatagggtgaggcttgtgtgtctcaccgtggccctgtgtgtagggcaaagcccacaggtgttaatatgatcctttctatagggtgaggcctgtgtgtctcaccgtggccctgtgcatagtgcagagcccacaggtgttaatgtgccacttgagtctctcagtgcctactggctcctcccgccttctgcccgggtccatgccctccacttgttgagtgcaccctgcagggcatagtagtaagctgctcagtgacgttctctctgacctccccaaggtagtgagttgttttcacagcaccgtgtatatttctttatggtgggacctgtttgccttcccacttcctgttctaagctacactgcagactctggcagcagagaccaaggcttttccaaaccaacggccccagcacagggtcctggctttgtaactgctcagtgagggcaggatgccaggcaccctgttcatggacaatgtttctggggctgtggccaccgtctccttccctgcattcagtggacagagggaggcccagggcaaagttaaatatggagaggagaggatatcatttgacagtcacctggtcatacttcccatgattaccttaagggaataattgagacagaaaacagaacatgagatttcttaagatgtttattttctttaagaaactaatttatgagtcttatatttcctctccaactttagggagtagcaatagtcttcttagggaaatgcagtagccttaacagcttccaggtgagtgtaatttctgagtctgggctcacacttggtatacttcagggtggtgtatttgaagaggctacatgtagggctacatttttgatagggattttgaaagtaaatggagaaacagttttgtcaggtgcatacttgcaggtttctggaggtgctgtatgtatgttatgttcctgtggaattggtttgaatgcgcccctttttccccattttgtttcctgtaggcttgctctataagggatcccaacagtggatttgtgtttaatcttaatccgctaaacagttcgcaaggatataacgtctctggcattgggaagatttttatggtaagagcgatatgatgcatttccagtttgctttgaaacagggggagagtgcattattgaagtcacctgcacgtggtgatatgagagaattgcccaggccactgtggtggcagctcttactcagaaggagatgggaaaatccagatttaagggaaagatgaagtaaaaccatttaccaccattctggcacagttcagacgtgaagactgttattcttcaaataataagttgttctctttaaggaaacactttctaaaggtagtgctgaagcctgtactcattgtccattggtctctccttactgtatcttcacaccagagagcataattgacttcatttttacaactataatataataatttttaatggaataacaaatttaagaaatgtagggtaccactttatatttacttgtaattaacatgatttcaatgatacatactttctcataattgaaaatattataacattatgacttctgtgtcttccctctcttatatatggtacattattacatgcagtagatcttacacatttatagatacggggatgtatgaatttaaatgatgtatagatactaaaccttaaaggcagtttatagatactgccctttggacttatgtactaactgtactaacatgccagaaagtggaaagttggcaagttaactaacaaataagaaatgtttaacctagtgggatttggagttgctagggttcttgtctgtggtgagatacgaggcataaatttgtttgtatggctcttaccgtctgacctgcagtttaatgtctgcggcacaatgcctgtctgtgggaccatcctgggaaaacctgcttctggctgtgaggcagaaacccaaactgaagagctcaagaattggaagccagcaaggccagtcggaattgagaaaagcctccagctgtccacagagggcttcatcactctgacctacaaagggcctctctctgccaaaggtgagctcagagccatgttgttttgtagctaaaaagggccctggtggctctgtggctggccatgcaccttcctgagtgtaggatgtgcacatcccccgccaccatgggctgtgctgtccaccttgctgcaggagccatcacggtggtcttcctgcgtttgacctcgcagaatacaggggtcccgttatccgtggcttcacttttgtggtatcacatggtccgaaaataataaggtattttgtgagaaagaatgagagaaaccacattcacgtaactgtcattacagatattgttacagttgttctgttttattgttgatctcttgctgtgcctagcttacaaattgagcttcatcctctgtatgtgtgtataggaaacagcatagtatatatagggttctcaatttcaggcattcactgtgggtctcggaacatatccccccgcagataaggggggctgctgtagcctgtattcaacacagcagtcagagtgatgtttctgaaacatcacatcatatcacttcccagctcagagccctcggaggctctgcactgtacctagagtagaagccagtgtccacagtacggccatgggacgcccgtgggggctctctgagatgatcaccccctgctgctcttcccgcttggcccgctggcctccctgtttctgatataaacaaagtgcactgtctcccaccctcccctcttgaatctttgtacttgctcctcgctctgcaaccagcacagctgcaggcaggggttttcgtctgcttcattcattccgatacatggtaggaacttagtatttgttcaataagccaacgaattagagttacattgtcttctaatgcttggattggtaaactcgtgggatttaaatattttctggaagagtaggaatgccaggatgttaggcttatggtagaaacctgtcataacataggccgctgttgcagtgtgtaaagctgtcatcacataggccaccattgcagtgagtgtgtaaacctgtcataacacaggccaccgttgcagtgagtgtgtaaacctgtcatcacataggccaccattggagcgagtgtgtaaacctgtcataacacaggccaccgttgcagtgagtgtgtaaacctgtcatcacataggccaccattggagcgagtgtgtaaacctgtcataacacaggccaccgttgcagtgtgtaaacctgttgtaacacaggccactgttgcagtgagtgtgtaaacctgtcataggccactgttgtagcgagtgtgaccactttgttcatgtcgagtccctcgatacacacttggtgccctggtgtcattgctcccacgaacggctgtgaagcttgttgccagtggcagccttgtcctgttgctgcactgtgcttgtgggctgcgccatgaatactgttctgtctcttaaaatctgggccttcttgctttacaggtaccgctgatgcttttatcgtccgctttgtttgcaatgatgatgtttactcagggcccctcaaattcctgcatcaagatatcgactctgggcaagggatccgaaacacttactttgagtttgaaaccgcgttggcctgtgttccttctccagtggactgccaagtcaccggtaaggccgtgcggcctaagaactgagaggccggtcaagagtcagtgtgtgtgtgagtggatatgaaggtgtgtttctgtgtgtatgtatatttgtgtgtgtgtggtgtgtatgcttggttatgcaggcagcgtgacatttctgttatatattctctttgaatgatgcctagagttgtaatgtttttcttgaagagaatctgactatatagttaatggttttaagctatcttttgggatcagatacatcttaagaacagagaagaaaatgcagaggaaacacatttcacatgtactgtcagagcttcttatttgagggtgaaaaaaaaagaaaaagatgttaaactccctaagctgtgccctggaagctgacagtgtatacaggagaccttgacctctgggattgaccctgcctgctctgcaacagtggtacttccttgtcaagggcagtgggggtttggcttttttctttaaagagtctttagggactcactatgttgcccaggctggccttgaactcctggtcctaagtgatcctcctgcctcagcctccaaagtagctgactacaggcgcatgccaccaggcccggctgtgaagggcagttttgagggacagagtgggtgtgttttgtaggcaaagcctctcagcctcccgtggatttccttatcctcacagttaggaatgccaggttcacgcctcctcagggcttatttagggtgaaaggcagttcttgagtgctcacaaggaggcagagttctccagcgtggttttttgttgtgtttcagacctggctggaaatgagtacgacctgactggcctaagcacagtcaggaaaccttggacggctgttgacacctctgtcgatgggagaaagaggactttctatttgagcgtttgcaatcctctcccttacattcctggatgccagggtgagttctccttggtctcttgattggcgtctgttcattttattagagcatttgactcaaggtcatcgccttcctcatgcccaaaccacttattctgttcttccaggcagcgcagtggggtcttgcttagtgtcagaaggcaatagctggaatctgggtgtggtgcagatgagtccccaagccgcggcgaatggatctttgagcatcatgtatgtcaacggtgacaagtgtgggaaccagcgcttctccaccaggatcacgtttgagtgtgctcagatatcggtgtgtgttcagaccagcaatgagatgttgtccccgggtgactccatttcccatttcccttgaacctctgaatcttctatcttgtttaaaacttgcctgtgttttcgtggagtttcagccattgctagggtttgacgagaatgcactcatttcttcaggtcttaaatgtttaataaatgttacgtagtttgcacatggaggtcaaagattgggtactaactgtggctatcatttatttaatttttttttttttttttttttttgagatggagtcttactctgtcacccaggctggagtgcagtggtgcaatcttggctcactgcaacctccgccccccaggttcaagtgattctcctgcctcagcctcccgagtagctgggattacaggcacctgccaccacgcccagctaacttttgtatttttagtagagacggggtttcaccatcttggccaggctgatcttgaactcctgaacttgtgatccacccgtctcggcctcccaaagtgctgagattacaggtgtgagccaccgtgcccggccccatttgattaatttttaaaataaacaggaaacaaatcaggctgctgatttatattacagggctcaccagcatttcagcttcaggatggttgtgagtacgtgtttatctggagaactgtggaagcctgtcccgttgtcagagtggaaggtaggactgggcctgtccctacaagtcattttaaatgtatagagtagcagacgttctgaacgatgccttagatatgagaccgtgtgataacagccatagctggggtcatgagacacacgctagggggaggataatttcttttccttgagcttttttttttactgaagcatattgctaatttcacgagtgacattttccttgtgtgcctggattgatgggattttggcgtctgatgcttgaagacactaatgtggggtttggttttgtgttgtttgatgaagcaagtctttattcggggacctagactttcctagaaagctgtttgccaggcgatttgtattatatataaacaaaatcatgtggaaatggcttttaatgcccatttatagctggtatttacctaaccaaaaattgtaaaagtttttttttttttttttgagaccgagttttgctctgttgccaggctggagtgtaatggcgccatctcggctcactgcaacctctgcctcttgggttcaagtgattctcctgcctcagcctcctgagtagctgggactacagggtgcctgccaccatgcccagctaatttttgtatttttagtagagacggggtttcaccatgttggccaggatggtctagatctcttgacctagtaatccacccgcctcggcctcccaaagtgctgggattacaggcgtgagccactgcgcccggccatttgtaaagctttttgcttgaaaatgtgaatgcgtgtgtggttgcagttgcccttcacttcttccatgttcttgaaggggacaactgtgaggtgaaagacccaaggcatggcaacttgtatgacctgaagcccctgggcctcaacgacaccatcgtgagcgctggcgaatacacttattacttccgggtctgtgggaagctttcctcagacgtctgccccacaagtgacaagtccaaggtggtctcctcatgtcaggaaaagcgggaaccgcagggatttcacaaagtggcaggtaccattgtttgtcgttttccttttgttgcaaaggaatggaattaaaatattaaaatattttgctgaagatgaattttcccttgagtcagaaacatgagtgttctactgtaaaaaaaaaaaaaagcatattaatgatatttcggattttgcttgattttcttaaacagagtacatactgaaggatgttggtagagcatgtctattttattcttagttagccatgccagttactgactctaaggtcatatttctcttctttattacaacgttgggacacagtgagctagccagtgttggatgttctggggtagtacttgatagcattgagtcacagggaatgcatttagtacgaggtttggctgtagaaattacagggcacgctgttggtcattcatgctgtttcagcagttgggcaagatttaaatacatttaggaacttgtaaaaatgaagtcaaagtagctggtggtgagtacgtggacagccctcaggcacagtggagaaagtgacattcccttaggtgatgaggctaaggaatgcctcatgtcatcatacacgggtcagtctgtgacgttgcagcagccttggacaaggggaagcctgattttattcccaaagtgtaatgtgacaggagtgcatggtatggtgctgggaggccagggatactttgtctcacactcttcagggtgtgtggtgtcacatgtcttaggctaagtttgacagcctagggacccgaaccaaaccttgtttaatgttctccttctttacaggtctcctgactcagaagctaacttatgaaaatggcttgttaaaaatgaacttcacggggggggacacttgccataaggtttatcagcgctccacagccatcttcttctactgtgaccgcggcacccagcgggtgagcatgtaccgacggccctcagcggggtcttctccccaccctcaggctgctgggatcatattagaaagaatctgtcctcagatctcatcaaatctcctggttaactgagtttaaaataaccatttacagaaaatatgttgaaactttcatcagttagtattgattttcatgaacgtaaccattctttactattttcattcttaaaactcaaagtataaactaaagttttgcattctcacttttatatatgtgcctcttaacttttttagccagtatttctaaaggagacttcagattgttcctacttgtttgagtggcgaacgcagtatgcctgcccacctttcgatctgactgaatgttcattcaagtaagtccatggatgtgttgtctcttttggacagactaacttggtatgattttgctttaataattagtggtcttgggtgcaggggattagattagtcagttaatttacctaggactcggtttgctcatattaaaatgaggagtcgggctaggttaactctcagctccgtcaccacctggagctgctgtggtgactgcatggggaagggattggagctgaagcagagagtggacccctggcactcttgcgtgatccacatgtcagtgagcagagtgggccaggagcggtgtggtgacccctgcgatgaagggaggtcttcgttgcatgtgatcgtccacagagctgctctcaacagctttgccagatcgccctctggacacctggggtcccatccttagagattttggttttgtgggtctgcggttctgttttttggagggatgccctgtgttctgccgtgtgaaacacccagtatgagccacttgatcactgttgactttcctgggggaaagtgcaggtgattctgtttccttccggcctttgtcctgttgtgtcatcggttatttatgtaggtgaaatcatcatttaagttttaggaacgtatgtaaatgcaagcatttagtaatttatgttcagtgactttaaatcataattttagtaaccttaccttttccagttaacattttgtaaatattttcatgtgaaacaaatttgtttctcatttctactggatgggaaatgtcctcagtagatatccccagttcacttagcagttctctttctgccatgtgaggctgccttcagttttctgatatttatatacaaggaataaaattttgattttctttgcacataaagcatttttcctagagatatgtgtatgtgtgtgtgtgtgtgtgtgtgtgtgtgtgtgtatatatatatatatatatatatatatatatgtattttttttgagatggaatctcgctctgtcacccaggctgaagtgcagtggcgtgatcttgtctcactgcaacctcctcctccctggttcaagcaattctcctgtctcagcatccctagtagctgggattacagacaccaccatgcctggctaatttttgtggtgtttttttttttttttttaatgagacagagtcttgcactgtcgcccaggctggagtgcagtggcgtgatctcgactcactgcaacctccgcctcccgggttcaagtgactctcctgcctcagcctcccgagtagctgggattacaggcgcccgccaccacacctggcgaatttttttgtatttttagtagagatggggttccactatgttggccaggctggtctcgaactcttgacctcgtgattcgcccgccttggcctcccaaagtgctgggattacaagtgtgagccactgagccagcctattttttgtatttttagtagagacagggtttcaccatgttggccaggctggtcttgaactgctgactgcaggtcatcctccgtctgccttggcctcccaaagtgctgggattataggtgtgagccactgcgcccggccttcctaaagatatttttatgctaagtttttaaaagtagaattaaatcagaggagaattttataatctcataataaaagttaatatatgtctattgtaattgagagtccaaaaatattaatagatgaaattacccaccctcacctctccctccccaacccctagcttcactccactttttactgtttcttcttgtggttctttttggaaccttctataactctaaacctctgtttgtcagcttctaatggtgtctgttgactctcttttaaaagatgaaagctgtcctcacctgtgctgttctcctctcctctttcctctgccttggctttgttagttctatttctgtttcttctgttgactacttttagagcatttggtgatattcactaagctctgttcttgtcccatcaccttcaggcagctttcccttcctgccacctgcccctggtttgggcactcctcctctcgtgcgtgcagtactgcagctgccactccgaggtctccttgccatgtcccttgtcacacgtttggttagtcccacacagtaattagaatgatcctcttgagatataagtcccaccatgtcgctcttgctgaaaccttcaatgcagtgagcgcccatctcattgggacctacaggctgaagttcttcctctgatggacatgacccccgtgttgtctctaataacctcactttcactctgttccagccacacggggtttctgtctttctcgggtcatgtcgggcttatgtgcctcgggccctttgctcatgctgttctctgcctgggatgcgctttactgggtgccaggatggtcagtgattccatttctctcagagtctattcacaggtccccttctcggtcacgccttctctggctccactgtctaaaatttcaacagctgcctctgccccccgaacttcatatcccccttatctgccttttttccttcagctcttacttccatcaaatacagtatgtatttttaaaagtcttatcttgttcacggtcattttcttccacaggtaattttggtaaactttgtaagattgatgatgtttaatactgttttgtttaatacagtacccccagtttagcacacagcttttgaatgaatgaccagtttttattcccctctgaagcgctaagagctgccgctgaggtggcatctgtagctgctcccgttcctgctccgtggtggcagagtgtgtgtctcactcactgttaatattgctcctggcatggggttggttcccagttactgtctgtatttgggatttgtgtagttagtgaacctttagcctgtgcagaaaggtcagcaagcccattttaatttcagaatttcagtaactgctggcggccttggttttaaacaacaggtggcgtgcggctgccccgggcatggcccctgctgtgtgtgctcctagcatcttggctgcttacctttgtcaccagcaagttccacttctcagtggcctgagcacagacggcacgcactttgcagacttgagtttttctgttaaaatttaaatttttttttaagtgagcctaatagtttcctgaactattatgttcagggaagttatgttgttgctgattctgatggggggtgtgtgtgtgtgtgtgtgtgtgtgtgtgtgtgtgtgtgtgtgacagagacagagagaagtcgagtctaaagttctgtcaggcttagactatgcctgaatacttgaacgtttctagacagagtgcccaatgtttaaagagaatacgaccaagcctaactaactgcgggttttcttcttttcagagatggggctggcaactccttcgacctctcgtccctgtcaaggtacagtgacaactgggaagccatcactgggacgggggacccggagcactacctcatcaatgtctgcaagtctctggccccgcaggctggcactggtgagagagggcctcctcgtggggtggtgtttgcagtgagtgtatcacaggccagcactggtgagagggggcctcctcgtggggtggtggttgtagtgagtgtatcacaggctggcactggtgagagagggcctcctcgtggggtggtgtttgctgtgagtgtatcacaggccagcactggtgagagaggtcctcctcgtggggtggtggttgtagtgagtgtatcgaaggctggcactggtgagagaggacctcctcatggggtggtggttgcaatgaatgtattgaaagctggcactggtgagagagggcctcctcgtgggatggtgtttgcagtgagtgtattgaaggctggcactggtgagagagggcctcttcatggggtggtggcttgtcatgagtttatcagggaagatcaagtaggatggggattctttggaggcgctttactctctgcagcatggacgtggttcggccgagaaacagcaggacgaagaatgatttaagggtgttaacagttgatccctagtatggcccagggtaaatcagtgctgaggactgctgggaacatgataaccctttctgaacatgaggagatgaagatataatagatagaaataatagccatggtgaggaatccttcttagcaggtagaagatggggggtgtgacgtggaggtcttggtgtgtgcctgcgtatgttgagagttgtatggtcggtccttttgtgatgcagggacagctcactcaaacctgcggtggttggctgagactggatgtcagctgtacatgggaaaccaagggcacctccagggatcttggtaccactcatggcccctcggaaccctgaagatgaaactcatcccatgttcgtggagtttcatacagccccacctgcatcttgggtggctcacctcaaaggcggtgtggttatttttagctgcagaaggtggttccatcctctgtgtggtttgaggctgtggttccacttccccttgctgcgttgtgctgtgcagacttcgacagtggctgtacccctgtggcatgggactagttcttcacccagggcacatggcacaggcattttagggactgggaaacaggcagaattcttggtagcttcttgaataaagaaggtgcatggacgtaggccatttaaaatgttcctctgtcttaatttgggaatataaccttcatcctatatggggttcagaaagaatttcgactgctacagcctagctattcctctacactcacgcccgcctgccccagtccatctgtgacaaaacagcatgtaagtgagtgagaactaacgtgatgtcattgtcatctgacttatgtgaaagaaatagcaggtattttgaagtgactcttagaaagcgtatgaagttctgcagcgtgtgtgacatttattgcctgatgaagttctgttctagcctggggagtcactaaaggcaactctttcttgtgtctggtgctgcagagccgtgccctccagaagcagccgcgtgtctgctgggtggctccaagcccgtgaacctcggcagggtaagggacggacctcagtggagagatggcataattgtcctgaaatacgttgatggcgacttatgtccagatgggattcggaaaaagtcaaccaccatccgattcacctgcagcgagagccaagtggtaagggactgttcctgcaccttctgctgttgcagctttgggaattgagcccatgtgcagggcggtgagccgcacgtcctcatctgccttgggatgcgagttctagagcctgggatgatgcgcccttaccagaggttgggggaacagcgtcgccgcggcctgcaatctggggaaccctcgtgctgtctggctccttagaagcttgcctggcagttcccgactcagaattggttctcttcagagtttgactcagacccctaaaggctgtggaggagattgttgtttgactacatgcccttttgtcttcacggcggcagcttgggaagcacgagaaggttggctgggcccgggtcacaggtagcgctgccacttcccagccacataacttggttaattactcaggtagtctgccctgctcagccgttcataacatgaggcatacttgtcctgcccattgcagggtttcgagagaagaggtaggaagtgccaggtgtcatttctgacacacgggagatgcacagtcagtgagcatgagtgcctgtgatcagttcttcccttacttgtttggcatgcacgtaagcaggtgtcgactgcatacaggtttttctgtgtgtgagattgtggtgagccccagtgctagcgtgcatgacgagctcggtggctgagttgggcattaactcgggcaagaccagctcgctgggtgtcagggtggctcgccccatgctctccagcggtgggcagcagtggtaggggagcttgggatgggggggctccaggagcttcaggcctgccctcttgcctggagcggcagggaagtttcctcttgggaagattgtgcagaggcttagtccagactcatgagctgctggggcctctgagcattctcctctgtgacctgagaggctcatggccgaggacaaaagggctgccccacatgtggggggcaaaggtgagagggtgtgtggggcccctgtgcccagggcccagaaggctgggagggaagggtgaaggggtgtgtggggttccccatgtccagagcccaggaggctgggagggaaggatgagggtggtgtgtgggggcctctgtgccccagacccaggaggctgggagggaaaggtgaagggtgtgtggaggccctgtgccccagacccaggaggctgggagggaagggtgggggtgtgtcgaggcccctgtgcccagggcccaggaggctgggagggaagggtgggggtgtgtcgaggcccctgtgcccagggcctgggaggctggactgcagcgtggcttatcagggtgcccagcaggaatcatggggtttacctgggaaggaaggtgctgctgaactcatcatgctaactctgcagtggacatgaagcgttttgagatgagcagagtaagccttggctggtgccagtgggaggatgcgtggaatgggctagttctcttggtatatctttttgttttgactgtgataatggattttacctcatttggtttttagaattttatcaatgatttacacatttgtgtctccctgtagcccttccagcatcctttgcacgcctgtccccaacccctgtcctgttcctcagcctgagggagcttcctggtcccctaagtgtgttgctgcctgtgggtgtttcacttacctgcaggggaagcccatggtggcagctcaggacacattctgaccctttgcttttcctaatctgcgcctcatcccacaggcacatggagacagaaatgtcacatgctgtggagtttttcagagaagcttccacttgtaagttgaaatcatgatagacatggagtttttgcgtgatcccttcaggacctgtctgtgctttgttgtagaactccaggcccatgttcatcagcgccgtggaggactgtgagtacacctttgcctggcccacagccacagcctgtcccatgaagagcaacgagcatgatgactgccaggtcaccaacccaagcacaggtgagaggtggtgccagtcgttaaccccagcgcaggtgagagacggtgcccccaccaaacccagctcatcaggggagagacccaaagagaagctatgggcagcaggcgccctgggcagaggtgtcatggtgtgtgggtgtgtttggcctttctctggatgggctgctgtgtgttctcctggctctccttcagtggaggagagaatgctcccacagagaatccatccctcctgtcactctcctggtgtgagaggtgctcctgactggggttactgacagtgtcagtccagcagctctaggctctccagggcaggttagagctagcccctggctgcctttcagcatcagtgtagtggattgccaggagtctctcacctgcccttgtgctgggcacccagaaaggcacaggcacagtccattggcagcaagaggtgtgctgggcaggctctccccatgcccaccagactcttagtggctgctgtggtatggcccagcagagggtgctgtgagccacgatcttttcagctaaggatgggacatctcatggatcaagggactgacagtctcatgatacagcctggctgttggtggaggatttaggacaggggtcgtggtgagaagtcagaagtcccgatgctgacataatctgtgtgtgagctcgccgatgatgagcctcccaagtctcagctccctggagtcactgtgtccccatcttcttccaccctacaggacacctgtttgatctgagctccttaagtggcagggcgggattcacagctgcttacagcgagaaggggttggtttacatgagcatctgtggggagaatgaaaactgccctcctggcgtgggtgagtgctgtggtctctcgtgtgttgtctgactctcccgtcctctggggttgtcctcagtctctttgcatgctaatggcaaaaaggatgagcagagccaggaagctgagacgcttttgtctcctgcagcagtcaccccatgtgggggacacatggtcatgtgatggaatgaacattcaatgtaaaacaatggttaaagccggattggacacttgaagttataagtgttggctatgaaattgatggtcctgacttgcgaaagttctcatcagaaaattggccatcgagtctgtgattgtgttttctccgcctttcccttgtggtgcaggggcctgctttggacagaccaggattagcgtgggcaaggccaacaagaggctgagatacgtggaccaggtcctgcagctggtgtacaaggatgggtccccttgtccctccaaatccggcctgagctataagagtgtgatcagtttcgtgtgcaggcctgaggccgggccaaccaataggcccatgctcatctccctggacaagcagacatgcactctcttcttctcctggcacacgccgctggcctgcgagcaagcggtgagttttcagatgggcacgggagaagtgcatgtccagtgcctggctgcacccgggccccttcgtcaggttcacttgcccactagtagatgcccagctgaactgtccactcctgatcaccccaataataaagttgactggaagtgcccagtgctatgtaatgaagcattttgacacctttctactttttttgttgttgttattcagcttttaaattcttatggatgacctagtggtgattaggaaaatttttttgtagactcaaagcagtctttcctacttaacagaccgaatgttccgtgaggaatggaagctctattgttgacttgtctccccttattcatcgcactggtggttatgaggcttatgatgagagtgaggatgatgcctccgataccaaccctgatttctacatcaatatttgtcagccactaaatcccatgcacggagtgccctgtcctgccggagccgctgtgtgcaaagttcctattgatggtccccccatagtaagtatgacaaatccaagggtggagataatttttgcaagacttttagtgataacctttgcgttgtttcttgccttcagtggggagttgctcaagcataaaaaaaatggagaaagtaagtgggactgtgtatgttctgggtccgctactggaagattaaaggtttgcacattgaactgttcgctgatgatggtagccagccagtctttgagcatgggaggtaacacgaatatgtgtgtagggactctacttgtcatgagcctcagggttgacccaaatcaagaagtttttaggtgaagtgacaggaaagcacattgccctagcctggtttctttgtgtgaaatgccttgtcttctgtagttaaaacgcttgcgaaatgcaaacagtttctttggcaaggagttataattaagggcaagagtacgtttgctaatagctaaatattttgccttaaaagctttggttttatgcattaaaaaattattttgtagagatgggagtattgctatgtcacccagccaggctggcctcaggctcctggccttaagtgatcctcctgaagttctgggattacaggcatgagccacagtgcctggcttactagcatgttttaatagaaatttggatctttaaaaattgtctccatgagttatattcatattttgtcaaatccttggtatgttttaatatttgaatgtatctcacaagtcgtctgtatttctgtctgtatcatctattatgctttaaagatggatcctcttgtaacatatctagatgtcctttagaaagatggccattatatgtggcagtgatatggggagatgtcaggagtgtgtaaggagatcggccacagcctgaattagcacagctccagctctgtgtgagatggaggcctggacaagctgagtctccccaggaagctctttggtagcgtcctttctgacagcgcagaccggggatcctcgatcgggaatcattgcctggccacccattgtcaaatgttaaaagatgtagaaagttatttaactggagaaggtgtggtgccacgtggtctgaacgtgccccacagtggtgaatgaagagcactgtagctgagaacaaaatcatggggaagctgcttatacacacactcacacccacatgcacacacacgtgcatgcacacacacattcatcacatacacagttcctggccattcacctttatttactttttaaaaataaaaaaagagttttttgttttttttctcataatactcagactggtcttttatttatttgtttattcactcaaaaatatctcttgggcagccgctgtgtgccaggtgctgtgctaagcaatgaaaatgaacagtgaacacctcctgtcccctctcccaaggacatagccagtggttactgctgggccacgtcagtgggcagtcccggggcagcactgggcagtgagggtggcaggtcagcatggaggttccggccttcccctgtcaggtggtgggaggaccgtgtagcatccttagaggtttttcaggttccgggcttccctcatcagctgatgggaggactctgtagtctccttgatgtgactggagagattcctattgcttaggatctttgaaaattgaagatacctagaaatagaaccaaccttagaactaacgttaggatcaaaacgataaccactgacatacggaggttacacagcatctgtcaagccttccaactggagttggtataaacccagtttctttagatgctgctcattctcagaacctatgaggtctggtttttgcaattctgtatcaattcttaattccactaaccttgggaatggttaatttcctgaaatactgtttgccctcgctctttgtttaggatatcggccgggtagcaggaccaccaatactcaatccaatagcaaatgagatttacttgaattttgaaagcagtactccttgcttagcggacaagcatttcaactacacctcgctcatcgcgtttcactgtaagagaggtgtgagcatggtaagtgtgggcctgtgacgatctagatgctcaactgcgggttagtgagccaaggctagacaaccagaaagtgcgtgtcaggtccaaggatactcttattcaaaatgtctgccttgggtaagatggtacgctagtagtgtgtctgaataatttaaaccactgattgagggctgagtgagctcccccgcagttaacagcatatagaaacttgctgtaatttaaaaacatagaacacaagtatagaaatgacattcagctttgactgctgatgcataaaagtgtcataacttttgtttttactttaacaattactgattttattctaactgggaagtcagaaagacatttgggcagctatagtcactcaggacatagcccagaagttaacaagtaacaaaagacccctggaatcagaatagctacaacaaagtggcaccttttacttataatgaggtattgacttccattttatgtgcattaaaaaaagaataccagcttccattataatgagttcggtattggttatagtctttgaggacgttttcttttgatccctgctctgtgagataaattggtagattatggcccctattccacagggactcagagtagctctgcaggggcagagccaggtcccagctactgcacaggggaacagctctttgctccagggacacagcaccacagcctgtcgtctgtgcttctgaaatctctgaagctctgaaaacttggggctcctttgacatgaatggactgaggctatttatggtgtggatttgtcccacctaatgtggatattgatacatctagctgcagaaatattaatatgtttgatcacaggatctgggggtgtgagaattgcctcttaaaatcctaataaagatgttggattccaaggctcatctgacccctaggagttcaggtgatggattaggatctgttgggtgtcttgtaattctgataaagacatccttctgatgtttgggcctggagcaggtttgtaaagggactgttagacatgggtgtgctgacagtgacagaaagtgacctggcagccgcctgaccagtgagagagacagtatttgagaaggaggaggaaacagtcctgctgtttggggctactccacaggggcccagagcacctcaaagcccttggatgtgttcatgaatcttagagtgtagtgacagtcctagttagtaaggaaaggcagagctgtattcagtccacccattgcatctgtttataagcgtattggcatatttttataggggtgtctgggtgtgcctctgtagatgcacacagcatggggcaacgtggattttgccttgcggggggcttctgcattaagttcttcgttctttaaaggacagtcttcacttctaagacccacctcatcatgagtgatgctttgttatctacaccaccagctaaagagtgtggaactatgccttgctttgactctgctgccaacgtgacaaatcgaattagctaatgtgattttagttaattctcagcagctgcacattgagggtgattagtgtttacttgattttagaaatgaagcatcttatgctgaatgtgtgttctagcgttccagaaagatttttagaagatttttcttccccagcagttttcattttcaatggaagtacttttaccactgaatcatagggaaaaagatgcttaacattaattacaaatggaattcctgagagctgcctcatctttttttgttgctgttgaatgagggagggaataaataaagtgattctacaatacttggcctatggaatatctggccatgtggcatcttgccccttgaataaatgtctcccgtgtctagagacagtagattggagcacttgtgaggcagggtctcagtttcacagacctctctcatgacatataagccctccccctttcttcctttgaacccgtagcacagaacattgaggctttctctctaagtagaagacaagacctggattcagccagggagctcacaggatgtgtagggggcaagggcagggtgatgtctgtgccttgaagatggcattgggtctttcagctgctgttgtctagcatcccttccctctgagaggccgctgtgggttatgcacagcccctgtagggacgtggtgtgtcactgctatctatccctatgccatggggtttttaagacccgtgctcttcctggcaacagggaacgcctaagctgttaaggaccagcgagtgcgactttgtgttcgaatgggagactcctgtcgtctgtcctgatgaagtgaggatggatggctgtaccctgacagatgagcagctcctctacagcttcaacttgtccagcctttccacgagcacctttaaggtaatgcgttcaccctgggcgttgctggtgcaggtgtaccaggtgccaggtgctgtgaggctgctgggagtgttttggataatgtggtacctgtgagctgagagggtgtatgtggccactgggcagcatcttggtgctctcgtagggcatgccaggtctcaggaaggttcttggattgcgtggccaactcagcgcagctgacacttgcgttgtacctcatggctctgcacttaacgctttttgatgataagtaacctcatgaggcgggtagtgggaccctttgtatcagacagagggcaggtggggcagcccggagacatgaatgtaaggtatccatgggggcagggccagctcctgggtggctgaaatctacagggatttaattcctccaacctggttgaagatgatcaaggcagttgtttgctgattgtggcagctttgggaagagggaggtaggaggtgccctggaattgagaggcacttgggcatgtgcctccatgccatgccagagccctggcgtgtgctgattctttgggctgctggtcttactgatgtggtgtcgtggtcactggtgcctgggggcccctgactccctaagcctagatatctagatgttaccatgccagtgcctggactggggtacggaaccccagcacctgctgtggcacggcggctggtgagtgatgagcctggagttttgggcccaggtgtcaacaccctggctcctgtgatggagccctctgcctgggtacaggtcctcccgacaggtgtgcagtaggtgtgagccttctgggcgctgggtgggccaggagagtcaggtccatgcttcagcgtgcagcgtcggctctgctcattcactcacttggcccgcacaatgtcttattacacaggtgagggaggtggggtgaccccactgctgggtcccttctcactgggctctgactggagacgacagccagagcagtggctggctggcaggggtggccgaggcccccagcagggagcaggaggagcaagcaagctgggcctaggggttgggggaggccccccagggaaagcctagggccaaggcgattgcgtggctctgatgcacacagaggagtctttgctcttcctcatgaacctgcctccagcatcagctgcaatagtggttctctcttcactttgagacctgggtgctgccactctgctgacggccacgcatggtttttgtccaggtgactcgcgactcgcgcacctacagcgttggggtgtgcacctttgcagtcgggccagaacaaggaggctgtaaggacggaggagtctgtctgctctcaggcaccaagggggcatcctttggacggctgcaatcaatgaaactggattacaggcaccaggatgaagcggtcgttttaagttacgtgaatggtgatcgttgccctccaggtaaatatttgcaatgaggtaaataaacttcaagctcatagtaaactagaaattagacatagcagcagaaagaagctgcggagtggagctccacggtcctatgagtgctgtaaccttgggcgtgaatgtgagctgttcctctgtacacccccggtgtgaatgctggtgtgtgaatcacgctgtgttctctcagttgcctggtgagttttggcaggtgaatgccggttgtcacgtaggtgctttaggatgggcagcttccttagggactgctgctgcattctgaggtgattgtgcctggcgaggcacagctgccacactgataatgttcttcttctttccagaaaccgatgacggcgtcccctgtgtcttccccttcatattcaatgggaagagctacgaggagtgcatcatagagagcagggcgaagctgtggtgtagcacaactgcggactacgacagagaccacgagtggggcttctgcagacactgtgagtaggacggctccgcgtccccacatggcctggggccttgatactgtcaaggctcgattcacactgagacctttgtggatgccccagtcagtggcaggaattctcttgcataaaatattttcttactcgggctgtttcccacagagaaacgtttgaattgctctgtgggattgctgggtaaccgtatctacagaccgtggtagagctgccgtgagatgctgtgctgggtggctggctaggcccactcactagctggagggccttgtgtccacataccaggttttagccctggtggttcagattatgcctcaggaaaatgaatgtctgctatgggtcttcaggattctgaagctagtgaggattccggtaaaccaggcgactcatttattgactttccgccatgtggcagcccaggtggggatggaggtttcttggtgagccacactcagtgccttgcccctgcggtgctcaggaagtttcatgagaggagccaactgctgtgacttgtgtctacggaccgtgagatgagggaaatgcatgaaaaattactaatttttggccaggcgcggtggctcacgcctgtaatcccagcactttgggaggctgaggcgggtggatcacgaggtcaggagattgagaccatcctggctagcatggtgaaaccccgtctctactaaaaatacaaaaaaaaaaaaaaattagctgggcgtggtggcgggcgcctgtagtcccagctactggggaggctgaggcaggaggatggtgtgtacccgggaggcggagcttgcagtgagccgagatcatgccacttcactccagcctgggtgacagagtgagactcggtctcaaaaaaaaaaaaaagaaaaattactaattttcataaatgtccagtatcgggggaaccagcccccgatttttcaacgtaggttcttttctatttccctaagtgttggccggtctgagaaataaggggaaagagtacaaaagagagaaattttaaagctggtgtccgggggagacattacatgttggcaggttctgtgatgcccccgagccgcaaaaccagcaagtttttattagcaattttcaaaggggagggagtgtacgaatagggtgtgggtcatggagatcacatgcttcaaggatgacaagaggtcacaaggcagaaggtcagggcaggatcacaaggtcagcgcgaaactagaatcactaaataacttccatgtcccactgtgcacacattgtgagggttcaagagcagagaaccggtttaactagaattcgccaggctggaatttccaaatcctagcaagcctgggggcgctgcaggaggccagggcgtgtttcatcccttatctgcaactgcataaggcagacacccctagagtggccatttaagaggcgcccctgccttcctcccgggaatgcattcttttcccagggctgttaattattaaaattccttactggggaaagaattcagcgatatttctcttacccgttttcggtaataagagaaatatggctctgtcctcaccggcccacagtcagccagactttaaggttatctcacttgttccttgaaaatcactgttatcctgttcttaaggtgcccagatttcatattgttcaaacacacatgctttacgaacaatttgtgcagttaatgcaatcatcacagggtcctgaggcgacatacatcctcagcttacgaagatgatgggattaagagattaaagtaaagacaggcataggaaattataatattgattggggaagtgataaatgtccatgaaatcttcacaatgtatattcttctgtcacggcttcagcaggtccctccgttcatggtccctgacttcccgcaatagtccagggaccaaaatgggatgtattaaggaaccaaacgtgttaaatttacgaaggattgctatagctttgttttgaggcttattttgacaaaacgttattccctattttctgaatcacactcctgttttcaagtacttgtaggtattacattattatcttaaattttttttttttttgagatggagttttgctcttgttgcccaggctagagtgcagtggtgcagtcttggctcactgcaagctccaccttctggtttcaagtgatactcctgcctcagcctcccaagtagctgggattacaggggcccgccacctcacccagctaatttttttgtatttttggtagagatgggatttcaccatgttggtcaggctggtctccaactgctgacctcatgatccgcccacctcggcctcccagagtgctgggattacaggcgtgagccaccgcgcccagctatcttattttttttcgtgatcattagtagattggtcaaatattgaatacccgtgtgaggaatcacctagggctgtggggttattaagaagtacgatgaaaggctgtgtgccaaggagctgggtctatttggagtcaggatacacatgagtgaatcaacatgagatgtggccagggcagcacgtggtgtgttgccagatggcggatggagtctgcaggtgctcctgaggcagcatggggaaggcgtgcaggaacgtgccctggtgcaggccttggtctgacattctcccgcctctgctcccctgaaggggtggcctgcccctccacacttgtgggtatttctagtcgggtgggatgagagactgagaaaagaaataagacacagagacaaagtatagagaaacaacagtgggcccaggggaccggcactcagcacaccaaggacctgcaccggcatcggcctctgagttccctcagtttttattgattattattttcattattttagcaaaaaaggaatgtagtaggagagcagggtgatgataaggagaaggtcaacaaaaaacatgtgagcaaaagaatctatatcataattaagtttaagggatggtactatgcctggacatgcacataggccaaatttatgtttctccccacccaaacatctcagcggagtaaagaataacaaggcagcattactgcaaacgtgtctcgcctcccgccacagggcagcttttctcctatctcagagttgaacaaatgtacaatcgggttttataccgagacattcagttcccaggggcaagcaggagaaagtggccttcctccatctcacctgcaagaggctttcctcttttactaatccacctcagcacagaccctttacgggtgtcaggctgggggacagtcaggtctttctcatcccacgaggccatatttcagactatcacatggggagaaaccttggacaatacccagctttccagggcagaggtccctgcggccttccgcagtgcattgtgcccctggtttattgagactagagaatggcaatgacttttaccgagtatactgcttataaacattttgttaacaaggcacgtccttcacagccctagatcccttaaaccttaattttatacaacacatatttttgtgagctccaagttgggtcaaagtggctggggcagagtggctggggcaaagctacaaattaacaacatctcagcaaagcaattgtttaaagtacagggctttttcaaaatggagtctcttatgtcttccctttctgcatagacacagtgacagtctgatctctctctcttttccctacactccccagcaaacagctaccggacatccagcatcatatttaagtgtgatgaagatgaggacattgggaggccacaagtcttcagtgaagtgcgtgggtgtgatgtgacatttgagtggaaaacaaaagttgtctgccctccaaagaagttggagtgcaaattcgtccagaaacacaaaacctacgacctgcggctgctctcctctctcaccgggtcctggtccctggtccacaacggagtctcgtgagtgccttcccagtccacccgcggcgccacaccctcagcatgtgaacttcagactgcttgacgatggttggctcttttgggttctcaagatgggaatactatgcccatgtgaggctgatggtggttgagttgtgactgttcctggaagcagcccgcagtgtcaatcctggcacagagggtggttctgaggtcagagtgggggcaggagctttggtgactggaaacggagcctctggagctggaagaacctgggcggactgagttaggctgggtttgatttgcgtttgtgtgtagctcaggttgtgggaggcgtgtgggttttctcgggtctttggcaggagctccttaggctttgctggctggggtcagcccatggtcctgaccactctgcgtggggagcgcccgcttggccaggtgctcctgcaagacatcaccgaggagcaggggcatggactcacagggtttaagtggttctaagtgaggtgggaaacttgccgagattctagccactgcctctcccagccccggagcccttctttctactgtaccacgctgtgtccagggtggccgcaggtgtggacattccactccgcgtgtgtctggttggtgagctcccttcttcagtgaagacttcttttgccctttttttttttaattggaaaagctattttagtgctacattcagtgatggaatggagcccttagttatcagaacctttctctgaaagtaaagtgaagagccctcctgtgtcagggcagagacgtcacttgcatgccttttacctgcccctttgtgtcgttttctaggtactatataaatctgtgccagaaaatatataaagggcccctgggctgctctgaaagggccagcatttgcagaaggaccacaactggtgacgtccaggtcctgggactcgttcacacgcagaagctgggtgtcataggtaaggcctgtgggtcctggtccttggttcaaggagcagcatctgaaccgggaaggtgagggtgttctcaggatggcaaggagagtgagcatgtgctttggtggaaacctccagatatgattgcctgatatgattgcctgtcactgtctcacaggcattttggctctcctggcacattaaaataagtgctgctttgtattatatgagactgcaggtcctagtctgtgtgtttagaggggttgggctatctcggggaagtgcgtctatccaggaggaagtctcagaatgttcagagttcctctgaagttcacgttctagctgtagatcaagtgcctaaattggcataaacacacgtgtttgtttaggaaagccaaacagttgcatgaggacttggtacaggtagttcagaggtacatctttgtaaaatgtcttaacaatttttcacgggaaattgatcttgtacttggttgctgagtgaaagttgttttctttcattatttaaaggaggaaaatagaggtttcttagtaagagcaattaggatttgttggagggaccagtaaaggaaaatattcacctttgcctcttaggctggagtggggtttcccgagttgtcctgattcagccacagggctacttcagattagcttgagatgttgagatggagaaagagaattccgagaaaactactgccacccttgataaaaatcacacacagactctgcaggttggtaggtggagggagagctgccatacaggaagtggcgcccagaccgccagcctgagacccgccctccctgggaggttcttactgctttagaggtcagttattgctgccactcccacactgccccagaagggggaaggagggaaggtcgtggagggttgctttttcccctgtaatcttgcagtatatatggatattcgactagtctttccccaacttcagccaactgaaatgactaaaacacttaaggcttcctaaaagtttgaggcaggaggagcaaaagagagtagtgaacacagggggtgacatggaactagatcatctgacttcttagcggtgacctgcaggccacctccatttggagagcaccattttgcaagtccagcctcgcctggcgggaagagctcatgctttctcctgggactggcatttggcatcctgagcacctgctgaccggaacgagaaataatctggtgtctgacaccaaatgagctcttaatctttggcgccaacaagacagcatctaaggacaaccacggtgcccccattgtccgcttagggaatggacccctgttggggtgggaggtagactttttgttttcagaaccaacatgtctcaagcagctgtgcttaatatatgtttaatccccatccactccatggggcagcgttgtcatccgtttcacaggctgggcccctgagccgaggaggttgagcctcctgcccaatcagtaagggctgtctacactattaaagttttttcttgtttgatcccatatgccagaagttttaaaaattttccgtaaaacagtggaattcttttttccaaaattttacacagaagcccaatatttaaaacaaattcagctggagcagctttgagtttggggcaggcctgagagcctagagtcccacctcccacctcaccatccagcagccctcagtacctcagcctgtgtcctgtggaaaacactcgggaagtgagcactgtgcccatgttgcctccaccgcatgcccctgcctggaaggatctgtgtgtgtgtggtcagggtggaaggcacctgcttcccctggacaccctgcgccatgccctggagacatcatctgtccatgcagccaggctgggcccagaccgttcccagaacagccccctgcgcagccacaagcagcctcttggtggtggcttgagagttggaacctggcggccatgctgccccagtgatacctgcagcttaaagcatgtactcacttttctctcagaccctgcgggttcgagggctcaggtttttcttttaacgggtcacttttaaaagcagacagtgctcgactgaaagctagaagaccctagaaaaccacagttggtttctgtttctggcttttcactttttccattctgtgctctgttattactgggaggctcacatgagggtacctgtcaggaaagcacctaatatgatagagagagtttacacaattggagcgataatgaaggctgccattacccggggtcccactgttcacatgagtttgttgggcactttctatacatgcccgaaacctgcccactttggacagtgccctgttctgcaggtaaggccctcaaggctcagaagctcagcaacccagggccacaaagtacgggagtaggagggtttgggtttgaccccaggtcttaggctgtgacaattgtgcagtgggccaggtgaccacccctgagtgtgggaatgcaagaacaggtcgataaacctttagggagcccaaaatttattttcttctggcctttaaaccagatttttactcctaacattgaagctttgtttgtttgttttttgtttttgtttttgagatggagttttgctcttgttgcccaggctggagtgcaatggcgccatctcgatcttggctcactgcaacttctgcctcccgggttcaagcaattctcctgcctcagcctcctgagtagctgggattacaggcacctgccaccgtgcccgaataatttttgtatttttagtagagacggggtttcaccatgttggtcaggctggtctctaactcctgacctcaagtgatctgccctctttggtttcccaaagtgttggaattgacaggtgtgagccactgcgcctgcctgaggctttttataatgcactagaaataatgtcagttcaatcatttgtgtgtttcaggtgacaaagttgttgtcacgtactccaaaggttatccgtgtggtggaaataagaccgcatcctccgtgatagaattgacctgtacaaagacggtgggcagacctgcattcaagaggtcaggagactgggggctcagagcgggactgtgcagtgagcatactggagggaattcctccttggggttttcatgggcaggttttggctgagtcttaggagctcagggccagagccgctgattgtgctgtattgggcggggctgctccaggcagggaagacctccagatacagtgctgagacactgttacaagaccagtgcaacttctctgggctagcttgtctcttgaactaggtttagcactggctgagcagtacttaactgacctctacctttgaatgtcatagtagaaacaaaggggcgtggatttgtcccacccgaggtgttcaagcagcctggctgggaccctcgagcagctgggacctgcatctggacctgggatgtgcttggattatattcaagttttcccggccacattgcatctggtgccagggagagcttggccaacagagggtgcatgtgagctgctgtttgtgaacagaactgattccttccagacgctgagtttggaaaaggggtgactcagaaattgccaaaggatttatgaatgtatgagtctgagaagcttaaacaaaaatctaaaaatctaggagcaaattttccaggttttgaatgttgcacggtttacaaattttaaaaaatttatattgaatgcttgcctgctttgtcacattactgatgtgtgcaccacagtcatcttccctgtccattgtggtgatgaaaagaagtgagtaaaataaccaccctcgctccgagctgccgtcagtgttgagtcgggaaattctgcctaggcctgcgcagcccggggagtgggggcctcgggacccaactgaagtctcgcagcaccttgactgaaagccagtgagctgcttcaagggctccgcagtgttcattgttttgcagtcttcccttatgtctggctggggaagtgactgtagcctgtgcttccctcctcctaggtttgatatcgacagctgcacttactacttcagctgggactcccgggctgcctgcgccgtgaagcctcaggaggtgcagatggtgaatgggaccatcaccaaccctataaatggcaagagcttcagcctcggagatatttattttaagtaagtaaaacgttttccttctgagctgtgaaatgtgttcaaaattaaaccagcaatgccgctctttccctatcggggagcactgcaggataaataggtctgtgttttagttactgttgctggagtcatcgtcatcttttgcttaaactgaggaaaagcgttactcaatcattaagttttaacaccaaagatggtgaattctcatgagtgtaaaaataaatcccccgtccttctccctctcttcatgataatctcaggggttgaagccgaagccttctgacatgtttgagcaggaatcttctgggcttaccagtgtttagaaaataagtttctcagcagtgttactggggctgctcttgggggtggtggccgaggtgcacagacagggcgagggccgtgtggtgctggatacggcacctgaggaaggtggattagcactcagaggccagaactggttggggagaaagcctcttgagagggaaactggtgtcctcagaattgctgtggggtcacagacgtgctgccctagcgtgtccgtgcttcctttccctaggaaaggaagcatcctggggccctgcagtgattctgaggactgagggtttatgtcatgaatgccttcttgaaggacttccatgtcactgtgatcttttctgtctcttcaggctgttcagagcctctggggacatgaggaccaatggggacaactacctgtatgagatccaactttcctccatcacaagctccagaaacccggcgtgctctggagccaacatatgccaggtgaagcccaacgatcagcacttcagtcggaaagttggaacctctgacaagaccaagtactaccttcaaggtaatccgtggcttcccacaaagttccacatttaacttcctccaaggaaggggattaaaattttcaactaactcccttcagttgaaatctcggaccacttttaaaacaaaaaccttggtctaattctttactttgttatgaatttcttgacagtggattgagcgatacgtgtcagaactaagcatttcactgtaggcaaattgtgtcttagttatcaagtaaatgtacaaaaaaactaaaacctggtctgatccagtggttctgaggttgggtggaggctgagctgtgcacagtcagaattgcctttgatttggttttaaccatgacacttccttattttggaatgccaaataatattagagaagggtaagagattttatatttgtaagaaggatgaaaggaaactggcctaaatgttaggatgtaggttaaaatcaaccaggacgcacatagggcagagtccagggtgtgaaggaaggttttaaactggcactaataagggtgttgccctttgttccctcacataatcgtgaaaggctgcttttgttttgaacagctagtcttaactatatacctttcataatttgatttttgaaccgtgtgtggatgtaataactctttaaaaaaaaatgaagtgtgtttaaagaaaaccccagcctgctctgatgtcaaagagctgccgatcatgtcctctgggaggggagagtagtgatagctgagaaggagcaggtgctctgtgccctggtgctgagcacattgccgagaaggagcaggtgctccgtgccctggtgctgagctcatcgccgagaaggagcaggtgctccgtgccctggtgctgagcgcatcgccgagaaggagcgggtgctctgtgccctggtgctgagcgcatcgctgagaaggagcgggtgctctgtgccctggtgctgagcgcatcgctgagaaggagcgggtgctctgtgccctggtgcggctgagaaggagcgggtgctccgtgccctggtgctgagcacatcgccgagaaggagcaggtgctccgtgccctggtgctgagcacatcgccgagaaggagcaggtgctccgtgccctggtgctgagcgcatcgccgagaaggagcaggtgctccgtgccctggtgctgagcgcatcgccgagaaggagcaggtgctccgtgccctggtgctgagcgcatcgccgagaaggagcaggtgctccgtgccctggtgctgagcgcatcgccgagaaggagcaggtgctctgtgccctggtgctgagcgcatcgccgagaaggagcaggtgctccgtgccctggtgctgagtgcatctccacgacggcagcacctgatggagggaagctgggtcagcatcgctgctcctggtcacagattgtagacagcgccctggtgcatctgctcatagcacctgtggcccctgaatagaactgggaaagtgaatgttctgctttctgggtgagttgatgatgggaaagttgatcagcctcattcacttgcataactccacagcacggagctagcactctgtgtttctctgttctctgccttcctcacacttcggtgaatccttcagtcattcagaatcagatgttgcatgtcacaggttgtgccttctcttgctgtcctctttcccagtgctcggtaaatcttgattaaaggaaggaaggaaggattgtttcagaagccttcaggggccctatcatgcagagaaggaaagtctaggctctctctgacacagcttgaagatgtctgagaggctcccatgtaccagggtagccttgcaagctgctgctcctacacatgcctcagccatcaggttattcactagttcccaaagtcaccctgtaacctggtgggtttacatatgctgctcttggtgctggaatgccttggcccaccttcctcatccttccaaacctacttctagtgcccctcctgggaaggcccaccttctcatagcagggtgacaccgctggtgtgtctgcaggattccaaacctacctccagtgcccctcctgggaaggcccaccttctcatagcagggtgacaccgctggtgtgtctgcaggattccaaacctacctccagtgcccctcctgggaaggcccaccttctcatagcagggtgacaccgctggtgtgtctgcaggattccaaacctacctccagtgcccctcctgggaaggcccaccttctcatagcaggtgatactgctggtgtgtctgcaggagtcttcacgctccatcgcgcagcactggccacttgtctggttacacataagacctccacgttcacaagtggtatgtctagcagacctttgaggatccccagctttcagagtgcttgtgcatgcgcatttagtcattcttggtaaataaaatccctttcagaccttttcactttcttcattcaccagccccaggaagtagctttagttttaagacatcttttcatctttcatgaagaaatgaagtttctatctcttcctgaggcttgccattccttcgggagggcagagctgtctctcatcaggacgtggagctgctgggcggtttgcttccccacatcagccctgtggaacagtccattcagcagcccctgcttcagctactcccaagcgagaatgtggggccctcccggagcggagccgcaccgcctgtctctgggccccatctgtgtgtggacatgtccgtctcctaccctgcactctcgcctctgcattcctggcacccagcagcaccagccacaaagattttcagccagtgacaaaggttgggagcagcagagttcatgcaaggagtccacacaagggttcctcacttctgacagcaacagcacactgaaggggttcccaagccaacttcagatttaccctttcaccataactcacagagctccctggaagcagttacacttatagttatgatttactgcagcaaaaagatacaggttaaaatcaaccaagatgcacacagggcagagtccaggagggaattgaatgcagagttcccaccagctctcccgtggaatcagatgtgttgtgttcccagcacccacgtgtggcagtgcacatggagtatcatcagccggaggtgcttccccaagccttggtgtccagagtttttcccggggctctgacatgggcaggattggtccattgatcactcaggtactgcatggccagcccctgctccgtatcctgtcattagccaaggagcaaggccagccctctttttgggcaaggttaaattcttgccttccctcttgttgccgttgcttctgttcctggaggagctcctggcacagtgatggggtctcaggcctccaccttactgcacgatgaagagtttgaggagatcaagaaggagactggcttttcccacagtcaaatcacacgtctgtacagccggttcagcaacctggacaaaggagagaacaggacgatttccaggggattccagaacttgccatcaacccagtgggggactggatcatcaatgccttccttccagagggagaggaccaggtaaacttccgtggattcctgcaaactctggctcatttccaaaccattgaggataatgaaaagagcaaagttgtgaatggacctgaaccactcaacagccgaagcaacaaactgcagtttgcttttcgactatatgatttggataaagataacaagatctctcgtgatgagctgttaagggtgctgtgcatgatggtccaaataaatatctcagataagcagctgggcagtatcgcagacaggaccattcaggaggctgatcagcatggggacagtgccatatctttatcacagactttgctaaggttttggagaaggtggatgtagaacagaaaatgagcatctgatttcttcactaaaggacagacagcaaactattccttgcagtctagtatttaagtactggaacttgacagtcctcctgtccaccagccctacctccaccccatcattccccttctcccaaagtactactgctgttgcataacaaccccaaatatgttctgtcaacacaaacctgcttttggtctataaacagggcgttacagaatggtacacccagtctatttcttctcagtatccattcgccagttcttcatttataaatatcgtcttcctctgttctgctgctgaatgccacacatccatccagtctgagaaagtaagatagggaatcctgccgaggaacaagccagcaaagctctttcactggatgtagactgcacctgctgccttccctctggcgagtctgccagcatgcttctccatcctttttatatgtcctttgcttcccacttctgtgtacattcaacatactgttcacgtagtcatgcagtctttctgctttttgtgaagcctcagaatctcctctgttctacttggcaccccaagctatgcctggtattgtatttctgacttggctcgatagttcggtggtctggcagtttttatctaccttcattattaaaaggccctctggagctgggcgtggtggctcacgcctgtaatcccagcactgtgggaggctgaggtgggcagatcacgaggtcaggagatcgagaccatcctggctaacacggtgaaaccccgtctttactaaaaatacaaaaaattagccgggcgtggtggcgggtgcctgtagtcccagctactcgggaggctgaggcaggagaatggcgtgaacctgggaggcagagcttgcagtgagccaagatcgtgccactacactccagcctgggcgacagagcgagactccatctcaaaaaaaaaaaaaaaaaaaggccctctgggatgttgcctctccaggagctttttggtaaccaacacttctctcgggagtatgagatcatcctctgcactcttctctgtcatcaaagggctgctgggtggagatattcttgaaaggtggccttggtgagaggtgtggagtcaagtcttttaggttgcttgcccacgtcactctacctctggcctctgattctcaactttgtacctatggggcgtctcttgttagtgcagtgttgactattcaaaaagtagcaatatgcctgcagatttgcttagtcttgggacacggttaccaccagaacggctgctcagacaatatgcttggggactttctcatggctttttgaacaaggaggctgcgcaccctgtgaagcctcctgcattcacacctctgctgcatggtttatgcctcagtgttatgtgcactggaatgcttttcactatacgtttccaagttagaaagattagtgttatggaagtgcctaatgtatcctagtccaaaatatttaaagattgttctctgtgtcttgaagttttgcacaaaattctttatgaattttacacttggcaaatgttaatgctagaagccatagtccgcttcttatacaagtccaaagcgttgactgttgtatcattagctccctggttacactggtttcccagctccttgtgtagaccactgctaatcccttagaaacaagaggtctggcactagtagcacaacctaaggtggcattccaagtctttaagcaagtcacagcaacttttctgccaaagtcagcttagtttagacttcagtgaatcaggctgttgccatcctaatgtatgtctctgtgagtctgttcattcacatatctgccgttggctgactttcttgactcgctgcttgcttgcttgtttccttgctttggaaagctattgaagatgtgtacataattctttaggaaggggattgctaaaaaatacactgcaaagcgatggaaaacagtggagaacaggggagtagccaggctggatggctcaaatataaatgaatgaggaattctttatgaagtgtcagttggactttgtgattgagtgatgtaatacaggaattatatagaaagggaagaatatctgatactgatctgttagatacttcagaggctccttgatttgcatatttaaagttcctaaaattgtagcttttcccttcttttggctgtacagcagactgttttaatccacggttgtgccttattgttccattaaaattgtgtcttcagtccatcaataaatactcgtggttaaaacaaaacaaaaattctttactgcatgctgactaagggcagggctctatccatgtgcatcgagtggcctcgtaagctgtgaacagagtgcctgtgggacgtgggatgaagtctcttctgcctgattttaagtctttgcaaactttttagaccgtaaggagctaagctcagtctgctcgtgaaaaatgatggtgacatgccatgtgtgcccttcccgtttgacagacggcgatctcgatgtcgtgtttgcctcttcctctaagtgcggaaaggataagaccaagtctgtttcttccaccatcttcttccactgtgaccctctggtggaggacgggatccccgagttcagtcacgagactgccgactgccagtacctcttctcttggtacacctcagccgtgtgtcctctggggtgagtatgacatccggaagcttagcacttgtaccccacatcttcccttaagaataagtgtatgtgtgttttttccccaatgttttcttgtgaaatattcagaacatgcaccaaaaaatagagaaaatgatagaagcggaccccacatagtcagtgccccgctccgttgcttgtcagcatcctgccactgatttttggtccatggctgcgtcacctcccaccacccccagcagcagtgccattgtttcctttgtgtgtaccatgccccgaatagggtccagtcagggcaccccagctctgtccctctaccctgttcccattgctgcctccctctccttagctcctgggaggcaagtactggtggtgcctcctctgtgtaatcctggaacatcttttgtgtcgtaatacaaatgattgtttggtaaagtttcactttgatttgagtgcagtatttttactttgatttgagtgcagtatttttacgtttgtttgaatgaatgaaaagcttactctccagattttgagaatcagcatgagaacagagggagcagtttctgctctgaaggaaggtggcacctccattggttgtcttgtgtcccacagccgttttatactttgccacgaataacatgttgtcagttgctttcctcttggatttattttcttcttatgttacccccacccatcattgtatttatatttatttttattttttatttttttgggatggactcttgctctgtcactcaggctggagtgcagtggtgcggtcttggctcgttgcaacctctgcctcctggttcagacgattctcctgcctcagcctcccaagtagctgggattgcaggcatgtgtcattatgccctgctaatttttgtatttttggtagagatggggtttcaccatgttgaccaggctggtcttgaactcctcacctcagataatctgcctgccttggcctcccaaagtgctggcattacaagcgtgagctgccatgcccggcctggcccaccattttacataagcttttcattctctgtcctgagactttaagattgggggaacatgaattcttgccatgtaattgtttccttcatgtcctgaaaaagggaccgtagagtcagcagacgacagtggtgggggtcatgggggaatgaagatcacacattttacatcttaaatcagcactccccctgcccacccttaacagtggacatgagctcagcaaaaaccagctttgtcctgtgctgttcaggcctgtgtacttagggatcctcagctgcacagtcagggaaagaggcttttggttgaaatttcacttgtggtattttcagcttttgaatgtttatggtgttccggtgacgtcattacaaaatgaaaggattgaaactggaagttcttcctgaaagaagcaaaatgtgaatttttataaaagataaaacccagaagtgaactttccctgcattctctgtcatggagaggctacagctgccatgagatgaatcctgcctcctgacatggcagctggtcttctgtgtgggtttgagggaccaggccaggctaggatcccgtccatgttgaatgtttagagttcgacttctgtgagtaggaaaagcactgtttatagggctttggtgtttgactctaaaaccagagaggaagattctccaggaaacctcggtttcatgatgttcagaacatcaggattgggagctgtttaaatcccttaacacactgacaaggtaataaggactttaaaaaaaagaaacagaagttgaaaccaagagcaaaaactcagatggtggattttgagggatgcaggtaccacccgggggtgacgtggaatagtgcctgagatttttttttccccaaatgttatcagtgttgtacattgtagaatcatgtaaatatggccagacgcggtggctcacgcttgtaatcccaacattttgggaggctaaggtgggcggatcacttgaggtcaggagttctagaccagcctgggcaacatggtgaaaccccgtctctactaaaaatacaaaaattagccaggtgtggtggtgcacacctgtaatcgcagctactcagaaggctgaggcaggagaattgcttgaacctggaaggtggaggttgcagtgagccgagatggcgtcactgtactgcagcctgggtgacagagcgagactagatctcaggaaaaaaaatcatgtaactataacaaacaggtagcaatgttcgccctaatagattaccatttttagttcttttagctatttcttctggaatttacctcagtattttaaattaacatcctatatctcatctgttgacttcctgcaatagtagatgaagatagagctgtcttacaccttcctcctactttacaaaaatggttctttcacaatatttgattaaagtcaaaaaatttacacaaagctaaaagacaggcatctacagatggaaggggcaggctatgtgcccagcacagttattgatgacaagacccacccacttatgaaataccaggagagcagatacaaagaaaagactgtaaaagctttaggggaggctaatttgttgtattagaaaataattcaagaaaggttaaaatactttaaatcctcactttatatcatcgataggttcttggaaactgcaactttatgtgaaatgatgtataatgaaaccagttttttttcctcagctttatgttatgttatgttatgttatgttatgttatgttatgttatgttatttttttgagacagagtctcgctctcgcccaggctggagtgcagtggcgcgatctcggctcactgcaagctctgcctcccaggttcacgccattctcctgcctcagcctcccaagtaactgggactacaggggcccgctaccatgcccggctaatttttttgtatttttagtagagacggggtttcaccgtgttagccaggttgatctcgatctcctgatcttgtgatccgcctgcctcagcctcccaaagtgctgggattacaggcgtgagccaccgtgcccggcctcatcaactttataatgagacagttttgaaggaaatgatgtcattcgaggacctcccatagtcgcttcacggaaggttgcagtttgaaggaaactgtcagcgaccctatgaggacacactgtactggacaacagtggtgtctaagctgagaggggtggcagagttcccagcttttaaaatttcttacagtgatagcatcatatgaaagtaaaaccattttcttgaaagaaatgaaggaaggaagaaaaggtagagttcctaattgtttggaagacatactgttagacttcctgtcttagtatgcatgccagtattttaagaataaccactaaaataatataaatatagtatgtaacttccaaaacagcggagaagaaaaggagaagtaaaaatacttaaatccccaaagaagacaagcaaggagaaaaataaaacaaaaatcagataagtagaaatttcagcccagtatggtagaaataaatctaaatatatctataatcataagtatagcttgactaaacttgtcagctaaaaaacaagttgtcaaactggatttcaaaaacaactctgtttacagggaacatgcctaaaacaaggatacagaaaagaccaaagtcaaaggagaagaaaagatataccagaaaataatctgaaagaaagctgcagtagttatgttaatataagataaaataggatattaaagaaaaatattagggataaagaataaagagggtcattataattttaaaagggctaatttcctaggaagatacaagaatcctaaacttccatctacctaataaaaaagccttgatatgtaaagcagaaattgacaaaaccacacacaagaaacaagcctagtgattgctgggttgagtagacaaagagtaaagctttttttggaagattgagacagcacagtgaaaagcaagatttaatagacatgcgcagaacactgttccctgcgttgggagaacactgtttgcccaagcttacatcaaacacttagaaaactttagcaaaaattaaccacaaagcaggcaagtcagcaatttccctttttttttttttttttttttttttttttttttttttttttttttttttttttttttttttttttttttttttttttttttttggagacagagacttgctcttttgcccaggctggagtgcagtggtgcgatcttggctcactgcaacctctgcttcccagattcaagtgattctcatgcctcagcctcctgagtagctgggattatgggcgtgtgccactacctcctggctaatttttgtatttttagtagagatggggtttcaccatgttggccaggctggtctcaaactcctgacctcaggtgatccacctgcctcagcctcctagagtgctgggattacaggcatgagccactgtgctcggcctaagtcagcagatttctgactgatgcaattaactacatacatgatgcaattaagttaggaaccaagaacaaacaactgaaaaatagaaatacgtttgaagactaaaactcacttctgaataatctatggtccaaagaagaaatcaaaggtagaaagtaaaatacgcttagaactgagtgatgatgtgtctcttggatgcatttcgagtggtcctgagtggctggagctgcttctgggtgagtgggtttctggcttggagggagaggtctgcatagctctcagacctgtctgtggagtgtggtggtgcttctttctgagcagaggtcaacccttgcaggcccacctagaactggacgccaggctgtccctgtggtttcttgtcttgctgatgttttagattgtttggcttaagctgaactttgagagcggcagcccttgcggctgggccgcgggttggcctgttgccctcaacctcagttctttgagcagccggcatcttcagcagcacaagatgcgccccgctggggttgcctcttatcaccagcagcacaggaggaatttctgtttatgtgatcctgttcctgtgtgtgtggccccaagtgacagagggccagagagattagaagtgtcaagtcgttacactcttgagtgtcatcttgctccctaagcgcaaagggaagtctccgtggttgtttctcattttctattattgtcccaactctgcttgagtgttcgatgtcatggaaacgcactgctttttcccacaagtgtgcatgtgggtcttgggtgggaatggtgaactccgctggtgaggcagctggtgtgctcaagagccttctcctgggatggagcaggcttggagagaggagacccgtcgggggctgtgctgggctctgctgctccctgggccccaccctggtctgtggccgcccctgggccccgtcctggcctgtttctaaggccccctgggcccctttcgtgtggagatggtgtctcatggtgggctgcgctcactgcttccagaagaaattctgagaggaaagagctctgaccctggagagaagtgtggtgcttcgggacagcctctgccccagcctagtcctgccgtggattgggccacctagagggggccgcgtccctcctgcctgtctcctctgtgtttgggtgaatgatagttcatggagctggaagcagtgccttcttgtctgctttctgacaaccctgccacaaactcatcatcaggaactttttgcagccctcttccatgtggagtgggacttgtggccttgttttctgggcaggagtaagaatcacatggtgttgggaaagtcagagctgctcttgccttggggactcaggtctcaggttgtggctgtggcagcaggaccaccctgtgacacggctccttttctgtgacgtccttgcagggtgggctttgacagcgagaatcccggggacgacgggcagatgcacaaggggctgtcagaacggagccaggcagtcggcgcggtgctcagcctgctgctggtggcgctcacctgctgcctgctggccctgttgctctacaagaaggagaggaggtaagcgggtggcagggcgaggtggggcgggtggatgcatgcctcccatagctaatcttggggtcagttttgtggggttttatttatttgtttttaagccctacagcagcgaaggctcgaggttcttagtccaaaactctctggaagcagtccccagcgttgtggtttttaaatgcctgcatttctgtctgaccaaggccgaggccctcgcacatcacccgtgcctgcggcttctaggaccgtggtcctttgtgtccaaagatgagtagaacattaaacggcacctttcatgggtgccttttcccactgagcagctgacccctctgccctcctcacatcataaatgcaggagtttattaagcgcctgctatgtaccaggtatgatgccatccttttgcgccactttgctgggtgaaaggactctccatgtgacggtcaagcagattttcacgtcaggcgtcagtgttagtggctctgacctgggggcaggagctggccagctcaggcgttccctgctgccactgtcatttgccagctgagccacaggccaatgagagaggtggtcagaaagtaccaaccatggaggttgcagtgagccaagatctcaccactgcactctagcctgggcaacacagtgagactctgtccaaaaaaaaaaaaaaagtaccgattgtggccctctacacccaaaatgcagaatggggcagaagaaggtctgggccgggaagggcatgtgatgtctgtctctgcgagccaccattgggcaggcttagtggcgacggactggtgtggtcctgttagtcatgtgaaaaagtccttgccctaatgttaagttgctctagagggccctctgctgttggattccaaagcccatcttctttccactcaatcacaacaaatacattagggtatatataacctgtcacggctactcatttgtcattcagaatgtgggagaaatgcagccaccaccagccccctggtggtgcagatgggggtggggctggcgggggtggggctcctgcccatgccctctctacactggagtaattattgtctcctttttttttatagggaaacagtgataagtaagctgaccacttgctgtaggagaagttccaacgtgtcctacaaatactcaaaggtaattttctgtggcgagtctcttgaaggcctgcctccccggccccctgtgctgcgctgtccatgtcgttctcatcaggggtgccaaggaaagcagtcacaggctgactggaatccagaaaggaaagcaacacccgttgcctcagccacttacgccagcacatttttttgttatttttttccctcaagtttctctcgtggttacaactgatttccttgaagtatttaataattaggttgtttccactgtttttggctgttctttaaaaaaaaaacaaaacacacacacacacagtagtgaagatagttgtgcatgtagcatttggatgatttctttcaggtaaatttgcagaaaagaggcattatctggatcaaaggacataatgtttgtggtctcgatgggtaatgatgaattgctctctaaaactaggcttttgactggagtccctcctttgacattcctcccctgccatgcagtgggcacctttcagtctatgagtagcccggaagagccccttctcccccagctgcgctgggggatcactggtctgcttttcggtccaggccatcccgaacgccttctgcttggtcccacccttggctgtgagactcctgccaaatgaccccactgccaccctcccaaaccctcctgccttggtgcagtctcattaggaacaggaaggtgttgccagccctcgtcttcctttccctgggaactggagatgcagtgactgtgaggacagtgggccagttcttccccagctcgtgccagcagagagcatccctgatgtggtggatggtggagcagaatggggtctcttagggggctcacgtggtctctgctgttgatccctggcaggtgaataaggaagaagagacagatgagaatgaaacagagtggctgatggaagagatccagctgcctcctccacggcagggaaaggaagggcaggagaacggccatattaccaccaagtcagtgaaagccctcagctccctgcatggggatgaccaggacagtgaggatgaggttctgaccatcccagaggtgaaagttcactcgggcaggggagctggggcagagagctcccacccagtgagaaacgcacagagcaatgcccttcaggagcgtgaggacgatagggtggggctggtcaggggtgagaaggcgaggaaagggaagtccagctctgcacagcagaagacagtgagctccaccaagctggtgtccttccatgacgacagcgacgaggacctcttacacatctgactccgcagtgcctgcaggggagcacggagccgcgggacagccaagcacctccaaccaaataagacttccactcgatgatgcttctataattttgcctttaacagaaactttcaaaagggaagagtttttgtgatgggggagagggtgaaggaggtcaggccccactccttcctgattgtttacagtcattggaataaggcatggctcagatcggccacagggcggtaccttgtgcccagggttttgccccaagtcctcatttaaaagcataaggccggacgcatctcaaaacagagggctgcattcgaagaaacccttgctgctttagtcccgatagggtatttgaccccgatatattttagcattttaattctctccccctatttattgactttgacaattactcaggtttgagaaaaaggaaaaaaaaacagccaccgtttcttcctgccagcaggggtgtgatgtaccagtttgtccatcttgagatggtgaggctgtcagtgtatggggcagcttccggcgggatgttgaactggtcattaatgtgtcccctgagttggagctcattctgtctcttttctcttttgctttctgtttcttaagggcacacacacgtgcgtgcgagcacacacacacatacgtgcacagggtccccgagtgcctaggttttggagagtttgcctgttctatgcctttagtcaggaatggctgcacctttttgcatgatatcttcaagcctgggcgtacagagcacatttgtcagtatttttgccggctggtgaattcaaacaacctgcccaaagattgatttgtgtgtttgtgtgtgtgtgtgtgtgtgtgtgtgtgtgtgtgagtggagttgaggtgtcagagaaaatgaattttttccagatttggggtataggtctcatctcttcaggttctcatgataccacctttactgtgcttatttttttaagaaaaaagtgttgatcaaccattcgacctataagaagccttaatttgcacagtgtgtgacttacagaaactgcatgaaaaatcatgggccagagcctcggccctagcattgcacttggcctcatgctggagggaggctgggcgggtacagcgcggaggaggagggaggccaggcgggcatggcgtggaggaggagggaggccgggcggtcacagcatggaggaggagggaggcgctgctggtgttcttattctggcggcagcgcctttcctgccatgtttagtgaatgacttttctcgcattgtagaattgtatatagactctggtgttctattgctgagaagcaaaccgccctgcagcatccctcagcctgtaccggtttggctggcttgtttgatttcaacatgagtgtattttttaaaattgatttttctcttcatttttttttcaatcaactttactgtaatataaagtattcaacaatttcaataaaagataaattattaattgggtgttaccattttttccttgatagtgagacgttcccgagcgagttacccatctgcctgcctgtcttttctttctgttaagtgactgaatttgggttttaactctggtgttctcgttgaccctttatgaggcagcactttcatttttctccagagtctcctggtcgtaggtgttaactttgggtccaatctgccttcccttggctctttctagatccgatttctttaccttctccaggccaacctcggggtgtggtcctgttcatcaaaacaatgaacatggagtttagagtccagtgagtcaataaagcttttttttgtgcaacctgatctaacatggagatgttttctcttgagtaaactcactgagttttccatcttaaattactcagcagtgactgagagctacctgcatggaagcaggaagttactccagtgttataaacaaacttcttagactcaacatcctattctccatccctttttttttcctgtagagtccaaaaacctcaaccgtctcatttttaaattatccaattggagttacctttttaaaaaagttattcttaaggactttccaatacctctcctgaggaagacatgtcaggtcttctaaaagtttacattatgaccaaagaaagatgctggtcctcaggcattctacccagggggctgttctccaggccattcccacctcctgctaagaccatggggagccctctctgtaaggaggggcatatgcagggacctgcccatccccttggtaagctggatggcaaaaaggcatgttgtctgcaccactggctgcctgctaatgtcgctgtcagtggggaaggagaagtgacaacacgtttgagtgcatttgctttgactcttagaaacccaagcctctgaaaaaagagtaactacttgccagctgttgttacagatgatatttttaggaaaacatcccgtgacagcaaatcagaattggactctttttcagagaaatgattttattgatggagtacaacctgggtatttagcttcctttcaacaaaattttttgtgcccctttcttgagactgtccatgaatgacagagacatagaataagaactggggtgctaaagatggaataggcaaaccccacaccaaggaaatccacagtgaagtggaaatctggttcttatgaacattttaagagcatctgaagcctgtacttcaccaaccctaaaataatacgtaacacgagatgattcctcag

SEQ ID NO: 24988 - DNA, 3523 bp, Homo Sapiens
ggagggagcgccggggccctgggctgcaggaggttgcggcggccgcggcagcatggtggtgccggagaaggagcagagctggatccccaagatcttcaagaagaagacctgcacgacgttcatagttgactccacagatccggggagcctggattgtcactgggggtctgcacacgggcatcggccggcatgttggtgtggctgtacgggaccatcagatggccagcactgggggcaccaaggtggtggccatgggtgtggccccctggggtgtggtccggaatagagacaccctcatcaaccccaagggctcgttccctgcgaggtaccggtggcgcggtgacccggaggacggggtccagtttcccctggactacaactactcggccttcttcctggtggacgacggcacacacggctgcctggggggcgagaaccgcttccgcttgcgcctggagtcctacatctcacagcagaagacgggcgtgggagggactggaattgacatccctgtcctgctcctcctgattgatggtgatgagaagatgttgacgcgaatagagaacgccacccaggctcagctcccatgtctcctcgtggctggctcagggggagctgcggactgcctggcggagaccctggaagacactctggccccagggagtgggggagccaggcaaggcgaagcccgagatcgaatcaggcgtttctttcccaaaggggaccttgaggtcctgcaggcccaggtggagaggattatgacccggaaggagctcctgacagtctattcttctgaggatgggtctgaggaattcgagaccatagttttgaaggcccttgtgaaggcctgtgggagctcggaggcctcagcctacctggatgagctgcgtttggctgtggcttggaaccgcgtggacattgcccagagtgaactctttcggggggacatccaatggcggtccttccatctcgaagcttccctcatggacgccctgctgaatgaccggcctgagttcgtgcgcttgctcatttcccacggcctcagcctgggccacttcctgaccccgatgcgcctggcccaactctacagcgcggcgccctccaactcgctcatccgcaaccttttggaccaggcgtcccacagcgcaggcaccaaagccccagccctaaaagggggagctgcggagctccggccccctgacgtggggcatgtgctgaggatgctgctggggaagatgtgcgcgccgaggtacccctccgggggcgcctgggaccctcacccaggccagggcttcggggagagcatgtatctgctctcggacaaggccacctcgccgctctcgctggatgctggcctcgggcaggccccctggagcgacctgcttctttgggcactgttgctgaacagggcacagatggccatgtacttctgggagatgggttccaatgcagtttcctcagctcttggggcctgtttgctgctccgggtgatggcacgcctggagcctgacgctgaggaggcagcacggaggaaagacctggcgttcaagtttgaggggatgggcgttgacctctttggcgagtgctatcgcagcagtgaggtgagggctgcccgcctcctcctccgtcgctgcccgctctggggggatgccacttgcctccagctggccatgcaagctgacgcccgtgccttctttgcccaggatggggtacagtctctgctgacacagaagtggtggggagatatggccagcactacacccatctgggccctggttctcgccttcttttgccctccactcatctacacccgcctcatcaccttcaggaaatcagaagaggagcccacacgggaggagctagagtttgacatggatagtgtcattaatggggaagggcctgtcgggacggcggacccagccgagaagacgccgctgggggtcccgcgccagtcgggccgtccgggttgctgcgggggccgctgcggggggcgccggtgcctacgccgctggttccacttctggggcgcgccggtgaccatcttcatgggcaacgtggtcagctacctgctgttcctgctgcttttctcgcgggtgctgctcgtggatttccagccggcgccgcccggctccctggagctgctgctctatttctgggctttcacgctgctgtgcgaggaactgcgccagggcctgagcggaggcgggggcagcctcgccagcgggggccccgggcctggccatgcctcactgagccagcgcctgcgcctctacctcgccgacagctggaaccagtgcgacctagtggctctcacctgcttcctcctgggcgtgggctgccggctgaccccgggtttgtaccacctgggccgcactgtcctctgcatcgacttcatggttttcacggtgcggctgcttcacatcttcacggtcaacaaacagctggggcccaagatcgtcatcgtgagcaagatgatgaaggacgtgttcttcttcctcttcttcctcggcgtgtggctggtagcctatggcgtggccacggaggggctcctgaggccacgggacagtgacttcccaagtatcctgcgccgcgtcttctaccgtccctacctgcagatcttcgggcagattccccaggaggacatggacgtggccctcatggagcacagcaactgctcgtcggagcccggcttctgggcacaccctcctggggcccaggcgggcacctgcgtctcccagtatgccaactggctggtggtgctgctcctcgtcatcttcctgctcgtggccaacatcctgctggtcaacttgctcattgccatgttcagttacacattcggcaaagtacagggcaacagcgatctctactggaaggcgcagcgttaccgcctcatccgggaattccactctcggcccgcgctggccccgccctttatcgtcatctcccacttgcgcctcctgctcaggcaattgtgcaggcgaccccggagcccccagccgtcctccccggccctcgagcatttccgggtttacctttctaaggaagccgagcggaagctgctaacgtgggaatcggtgcataaggagaactttctgctggcacgcgctagggacaagcgggagagcgactccgagcgtctgaagcgcacgtcccagaaggtggacttggcactgaaacagctgggacacatccgcgagtacgaacagcgcctgaaagtgctggagcgggaggtccagcagtgtagccgcgtcctggggtgggtggccgaggccctgagccgctctgccttgctgcccccaggtgggccgccaccccctgacctgcctgggtccaaagactgagccctgctggcggacttcaaggagaagcccccacaggggattttgctcctagagtaaggctcatctgggcctcggcccccgcacctggtggccttgtccttgaggtgagccccatgtccatctgggccactgtcaggaccacctttgggagtgtcatccttacaaaccacagcatgcccggc

SEQ ID NO: 24989 - DNA, 3538 bp, Homo Sapiens
gggccatctttgtgcggggccgcgcttccgccagcgccgcagcggggaatctgcagtaggtctgccggcgatggagtggtgggctagctcgccgcttcggctctggctgctgttgttcctcctgccctcagcgcagggccgccagaaggagtcaggttcaaaatggaaagtatttattgaccaaattaacaggtctttggagaattacgaaccatgttcaagtcaaaactgcagctgctaccatggtgtcatagaagaggatctaactcctttccgaggaggcatctccaggaagatgatggcagaggtagtcagacggaagctagggacccactatcagatcactaagaacagactgtaccgggaaaatgactgcatgttcccctcaaggtgtagtggtgttgagcactttattttggaagtgatcgggcgtctccctgacatggagatggtgatcaatgtacgagattatcctcaggttcctaaatggatggagcctgccatcccagtcttctccttcagtaagacatcagagtaccatgatatcatgtatcctgcttggacattttgggaagggggacctgctgtttggccaatttatcctacaggtcttggacggtgggacctcttcagagaagatctggtaaggtcagcagcacagtggccatggaaaaagaaaaactctacagcatatttccgaggatcaaggacaagtccagaacgagatcctctcattcttctgtctcggaaaaacccaaaacttgttgatgcagaatacaccaaaaaccaggcctggaaatctatgaaagataccttaggaaagccagctgctaaggatgtccatcttgtggatcactgcaaatacaagtatctgtttaattttcgaggcgtagctgcaagtttccggtttaaacacctcttcctgtgtggctcacttgttttccatgttggtgatgagtggctagaattcttctatccacagctgaagccatgggttcactatatcccagtcaaaacagatctctccaatgtccaagagctgttacaatttgtaaaagcaaatgatgatgtagctcaagagattgctgaaaggggaagccagtttattaggaaccatttgcagatggatgacatcacctgttactgggagaacctcttgagtgaatactctaaattcctgtcttataatgtaacgagaaggaaaggttatgatcaaattattcccaaaatgttgaaaactgaactatagtagtcatcataggaccatagtcctctttgtggcaacagatctcagatatcctacggtgagaagcttaccataagcttggcacctataccttgaatatctgctatcaagccaaatacctggttttccttatcatgctgcacccagagcaactcttgagaaagatttaaaatgtgtctaatacactgatatgaagcagttcaactttttggatgaataaggaccagaaatcgtgagatgtggattttgaacccaactctacctttcattttcttaagaccaatcacagcttgtgcctcagatcatccacctgtgtgagtccatcactgtgaaattgactgtgtccatgtgatgatgccctttgtcccattatttggagcagaaaattcgtcatttggaagtagtacaactcattgctggaattgtgaaattattcaaggcgtgatctctgtcactttattttaatgtaggaaaccctatggggtttatgaaaaatacttggggatcattctctgaatggtctaaggaagcggtagccatgccatgcaatgatgtaggagttctcttttgtaaaaccataaactgtgttactcaggaggtttctataatgccacatagaaagaggccaattgcatgagtaattattgcaattggatttcaggttccctttttgtgccttcatgccctacttcttaatgcctctctaaagccaaaaaaaaaaaaaaagacaaagcctcttaataaatttaatggaactatacatagaacagcagctcttcctcaccctttgcatacctttaatatttttccttcttaaattggccacagcaggggtcattcacactctcactgtcttgcaggaatcacaagaagtcttcatatgtgaacgtgccattcagttggtagttaagagcattcaacttcaaatatatagaagatatttgttttagtgcaaatccatgatggagtgcctcccttttccttttttcactttttgaaaaagatgttttgggtagtagtttaatatctcagggtgctctttctaacatagtaaaaaatgaagaaaaatgtttagattaaaactctgtagtctgatgacttagaaccatccttgacccttaggcccaacctttccacagagaaatcacctctcttcctttgtcttttaagaactatttggtattaactagtttcagaattagtaaatgtgagattcagtcacataattatcagacattccatttgtcagaaatgtatttggctttttaaactcctttccacaaaagtttaagtctaatgaccttcttagagaagttgagcatgcctggcaagatcatttcatggaataagcagatgtttaaagttggatttttttttttttttttttttgagtactagcaatgcacagggaccgtgttcttaggttcttagtctgtgaatctagcaataggcagtccagatttctgagtcgtactatggttttgccttgtcactgtgaggccctactaggtgtaagcattctctctgaattttaatttcctctcattaaaataggaacaaaatttgctatcctttagattaggagctgaagattcatttccctgggaatgtttcccatttagcttcaagtttcagctcaaacatcaccttctttctgactcctttcattcattcctccaggcagtaaggggctaccatagtactttgtttatgcctgtattatatgacatcactgtagttgcttgactgtttctcctactgttctgtaaacttattaatgggtgagaatctaattttactcatcttgatggcttcatgatccagcacagtgcctcacacaaagaactattgggtgggtggatggatggatggaggaatggagacagttggcttaaccagatcctatatacagattattactggctccaaaggatgagtagataagaccataagaattggatcaatgtaaatcctcacctgccctttgaagagccaataagggcatctttgtctttaaatacagcaaatgttattcagattttgtacttgtctatctgtttacctcagtgtagatgatatgaggatggtataactatgtaaattgtttttgaaaataatttgtttccccacaacttttgaaggttttatttgttgttgttattactagttcagtcccaaacttaccctttccttttcagagagctaatggccatgcttttcttcaaggaaagaataatttatttgaatgaagtgggatacttgcataacacaaaaaaaaaaaaaaaaaaaaaa

SEQ ID NO: 24990 - DNA, 2123 bp, Homo Sapiens
ggctggaggagcagctctccagtcagcctttgcagcccctctctttttccctttccaccgggcctcctcggatcccttggctgggcactgaggcgggggaagaggctggggtcgccacggcggaggttgcttggccgccacccccctgcgggggtggccggggttcccggctggggggtaccgtctctgggtgaggcatccaccatggtgaggcccctgtgcctgtgcccccgggccccccgggcgccgtgccttccttgcccccttcggtgctgctgttgctcccccgctgtgttgctcctcaatctccagatcggatcacggtgagggaaacgatgagcgaggagacgggactttctgacaacgataatagttatgcacgagtgcgagctgtggtgatgacccgagatgactcaagtggtggatggttaccacttggagggagtggactaagcagcgtcactgtcttcaaagtccctcatcaggaagagaatggctgtgctgacttttttatccgtggagagcgactcagggacaaaatggtggttttggaatgtatgcttaaaaaagacctcatttataataaggtcactccaacatttcaccactggaagattgatgacaagaagtttggtcttacgtttcaaagtcctgctgatgctagggcttttgatagaggtatccgaagagctatagaggatatttctcaaggatgccccgaatcaaaaaatgaagctgaaggggcagatgacttacaagcaaatgaagaggattcttccagttctctagtgaaggatcacctttttcagcaagagacagttgttaccagtgagccttatagaagctcaaatataagaccttctccctttgaagatctgaatgccagaagagtctacatgcaaagccaagccaatcagataacatttggtcagccaggcttggacattcagagcagaagtatggaatacgtacagcggcaaatatccaaggaatgtggaagcctaaagtcccaaaatagggtccctttgaaatcaatcagacatgtcagctttcaagatgaggatgagattgtcagaataaaccctcgagatatcttaatacgtcgctatgcagactacagacatcctgacatgtggaaaaatgacttggaaagagatgatgctgattccagtattcagttttctaaaccagacagtaaaaaatcagactatctgtactcttgtggggatgagactaagttaagttcacccaaagactctgtggtatttaagacgcagccttcctcattaaaaattaagaagtcaaaacgaagaaaagaggatggtgaacgttctcgctgcgtatactgccaggaaaggtttaatcatgaagaaaatgttaggggaaaatgtcaggatgctccagaccctattaaaagatgcatatatcaagttagttgcatgctctgtgcagagagcatgttgtatcattgtatgtcagactcagagggagatttttctgatccctgttcgtgtgacactagcgacgacaagttctgcttgcgatggttagccctggtagctttgtctttcattgtaccatgtatgtgctgctacgtccctttgagaatgtgccatcgctgtggtgaggcatgtggttgctgtggtgggaaacataaagctgctggatgaaatggtccagtgccaaaatgagcttaaaatcttgtttccaggaattagctaactttggatttgtggaagcttttggcaagcaatatggaatcttgcctggtatcattgagcccacacatggaggaagcagaactcatcagttcttggcgtttcacgccatgcctaacttttcccttgagtgcatggcatgtttgttacaggtgtagagtattgcagaaggaaaccatttctggttattgtggtataaaaagtcaggcataaaatatgatccaataaaagggattaattttgggcattttgttatatttatgcatttaggtgatgggacttttaaagggttgaatttataggacacgaacttaaaaattaaaagtgccttaggggacagttgatttcatctaagaaaagttaccttgggaattcagagtaaacaggcctaatctttataggttg

SEQ ID NO: 24991 - DNA, 4119 bp, Homo Sapiens
cacgaggtgcaccccttcccccaaaccctatcccgcgccctgcttccccttctgctgcggcgccctcttcatctctagccgccccccctccccaaatcaggcgatctccggagatgtgaagaaggggggcgagcggacaggaagatgaagggagcaaagctgcccgccgcgggacaggcgtctaggtaacaagaaaatgaccgaagaaacacacccagacgatgacagctatattgtgcgtgtcaaggctgtggttatgaccagagatgactccagcgggggatggttcccacaggaaggaggcgggatcagtcgcgtcggggtctgtaaggtcatgcaccccgaaggcaatggacgaagcggctttctcatccatggtgaacgacagaaagacaaactggtggtattggaatgctatgtaagaaaggacttggtctacaccaaagccaatccaacgtttcatcactggaaggtcgataataggaagtttggacttactttccaaagccctgctgatgcccgagcctttgacaggggagtaaggaaagcaatcgaagaccttatagaaggttcaacaacgtcatcttccaccatccataatgaagctgagcttggcgatgatgacgtttttacaacagctacagacagttcttctaattcctctcagaagagagagcaacctactcggacaatctcctctcccacatcctgtgagcaccggaggatttataccctgggccacctccacgactcataccccacagaccactatcacctcgatcagccgatgccaaggccctgccgccaggtgagcttcccggacgacgacgaggagatcgtgcgcatcaacccccgggagaagatctggatgacggggtacgaggattaccggcacgcacccgtcaggggcaagtacccggacccctcggaggacgcggactcctcctacgtgcgcttcgccaagggcgaggtccccaagcatgactacaactacccctacgtggactcctcagactttggcctaggcgaggaccccaaaggccgcgggggcagcgtgatcaagacgcagccctcccggggcaagtcgcggcggcggaaggaggacggagagcgctcgcggtgcgtgtactgcagggacatgttcaaccacgaggagaaccgccggggccactgccaggacgcccccgactccgtgagaacttgcatccgccgggtgagctgcatgtggtgcgcggacagcatgctctatcactgtatgtcggaccccgagggagactatacagacccttgctcgtgcgatactagcgacgagaagttttgcctccggtggatggctcttattgccttgtctttcctggccccctgtatgtgctgttacctgccccttcgggcctgctaccactgcggagtgatgtgcaggtgctgtggcgggaagcacaaagcggccgcgtgactcagtttccctcccttctccctccatccgcagccacaggggaactcgtctcttacatactctcatcttctcccccgctcccttccactccaaggagcgaggagggcaagcggcctcccagctccctggtacctcgaggcaccattccagccagggacgctgccgggtagactctccactccccctgccgcccacactgcagcagccacatccatacacacacgctcgcacagtgttctgaggaaggaaccttcgccacagactcctgtactattaacaatctgtaaccaagctaactgtctcatccatgtgttgatttcctgtttcctcctcccccgcctcttccagttcaaaggagtctgcaattggaactgctgattttcggtgggttttgtagttgatttttccaagagcgtcgaagactctctttctcttggttcaccttgcctgtcgctagcaagcatctggttcagcggaaatgggatgtgagaatgatgaaacccgacagaagtatctcagcctgcagtcagttattatgtataggaggtgagctagttaacaaacttgtaccacaaaacaatatcgctttaacttttctaaagccaaatttcccatgtaagctgcagtttctatctttagcccatcatcattttctgcccccccaaaatctgttgaaatgattcactgatgcaaaacattcacccgtaatagactgagaattgagccttaacttcagattaacttgtgagaatcaggaaaattccttcaactgcattgcatcctcttggaccagggctagaatggggatttcaggtttctatgagcctccccattacccctaaagtagaacattttttaaattgtgttgccaccacttctaaaaatttagcaatattagaataggatactagtgaagtaagaaattttgcttgttgttttgcaaaccaaatagtttcctcaaacacaaatcagtgttcccacgaacaagttccagttgagaaacactaaggttatggtgaataaaaccatagggagcttcttccccccaacccctggctattttatattaatggggagaggggatttttaaatgtcataaatttgaagagtggtgggttgcattttcttcatgggtttatgttttcgtttcattttggactcaatttcacatcaccaaattcctcatttatacttggggaaaaaacaaggccatatgtaaaaacccttccaatgcctaagtgtctttctcctgcaactccaaacccagactcgccactttgggtgcacaggtggttaggtcagccaactggttctgcctgtcgccttgccacggaggaggcttctaattagctggaaaagagtatttttctaatacgttgcaaggattagccaaatcttcttattgaagaaagaagaaaagtgaagagtggttacctatacctagcatagtacaatcagaacctcgtggagaccaccggggacaggcttgcggacgccggctgttcttcccgccacgatctttctgtggtagcggccagcagaagacatggcctgctccccactccctttccccactccttctttattgcacacaggacaccagtcttcaaggaaagggacttttttccagtctgccaatcatattgggaaagtgctagctgtgctcaccttcatggggctgtttccagctcgtccacaagctcatcgattttctttagtagattaccggtgtaaatacccagtgtgcttatgagtcagttagtagacgtcttcattcattggagtaactggtttaggctttccagtttggaaaaggagcagagagctgtccatctggattgatggaagaaaagagaacctcatccatgcctggagaacatctagaaaaccttcagccagcctccagtgctgtcgagagaccaccttcccccgacccggaggcacttccttggggtctttctctagggtctcctctctacaaagcacaacactaatgttcgtttccttagacctcagttcaagtgcccctatttatttcaataagaacgcacatatcccagctgttttttgtttgtcacctctatttagttgttacctgtttctctcttctttcaccccctgtccttttccacccttttaagagttacgctagcagatcttactccacgtatactttttggtttgtgaaggcatcggttaagggcacaaagacagccatggggacatttatgtaaatacgtctctaattgccacactgcagctgaacagtgtgtagtattttcccagtcagctttgccatactgacgtcaatcatttgagagaaattattcagattttatttttgtatctgtggtaacaaaacattaaccaaaagattttctgtccagaagcctccccgaccccccaagctatttgctcacattaacaaattaaagtgcctgaagcataattcattctttacctgtatactaaaaaccctgttgtattgatttttttataataagcctttttacctctgtgtaaaaaatatatatacaagtgtatgatgtacattttagttcttaactttttttttatggtttctaatatgtatgaccaatgtagccattgctttaaaatgtaccgtgtaaatataaacacatcctatcagaaaaaaaaaaaaaaaa

SEQ ID NO: 24992 - DNA, 3311 bp, Homo Sapiens
ggcgccgtcggagggagagtagacgtcaggcggagggagggaggcaggcaggcagggaggcagggagggagagagggaaggaagagaaggggagagaaagggggagcaaagaccgaaagagacccagagagatacagcttgagaggagaaataattaaagggggagggcgaccaggaggagaaaaaggtctgggaggaaagagagataaagagaatcggagggcagggaaatgagtttgtgcgcgtgagtgtgcgcgcgcgcgtgtgtgtgtgcaggggcgggcgcgggcgggcggggggcgggctcccgggctcccgggctcccctcctccccagcccgctcctctggctcgctcgccaactccgggccccagccgcgggcgggcgcacggcgggcggacagcatgctgagcctcctcgtctggatcctcactctctccgatactttctcccaaggtaaggacccagacccgcttcagccaggagccagctgaccagacggtggtggctggacagcgggccgtgctcccctgtgtgctgctcaactactctggaattgtgcaatggaccaaggacgggctggccctgggcatgggccagggcctcaaagcctggccacggtaccgggttgtgggctccgcagacgctgggcagtacaacctggagatcacagatgctgagctctctgacgacgcctcttacgagtgccaggccacggaggccgccctgcgctctcggcgggccaaactcaccgtgctcaaccctcctacagtgaccctgtccattgagccacagacggtgcaggagggtgagcgtgttgtctttacctgccaggccacagccaaccccgagatcttgggctacaggtgggccaaagggggtttcttgattgaagacgcccacgagagtcgctatgagacaaatgtggattattcctttttcacggagcctgtgtcttgtgaggttcacaacaaagtgggaagcaccaatgtcagcactttagtaaatgtccactttgctccccggattgtagttgaccccaaacccacaaccacagacattggctctgatgtgacccttacctgtgtctgggttgggaatccccccctcactctcacctggaccaaaaaggactcaaatatggtcctgagtaacagcaaccagctgctgctgaagtcggtgactcaggcagacgctggcacctacacctgccgggccatcgtgcctcgaatcggagtggctgagcgggaggtgccgctctatgtgaacgggccccccatcatctccagtgaggcagtgcagtatgctgtgaggggtgacggtggcaaggtggagtgtttcattgggagcacaccacccccagaccgcatagcatgggcctggaaggagaacttcttggaggtggggaccctggaacgctatacagtggagaggaccaactcaggcagtggggtgctatccacgctcaccatcaacaatgtcatggaggccgactttcagactcactacaactgcaccgcctggaacagcttcgggccaggcacagccatcatccagctggaagagcgagaggtgttacctgtgggcatcatagctggggccaccatcggcgcgagcatcctgctcatcttcttcttcatcgccttggtattcttcctctaccggcgccgcaaaggcagtcgcaaagacgtgaccctgaggaagctggatatcaaggtggagacagtgaaccgagagccacttacgatgcattctgaccgggaggatgacaccgccagcgtctccacagcaacccgggtcatgaaggccatctactcgtcgtttaaggatgatgtggatctgaagcaggacctgcgctgcgacaccatcgacacccgggaggagtatgagatgaaggaccccaccaatggctactacaacgtgcgtgcccatgaagaccgcccgtcttccagggcagtgctctatgctgactaccgtgcccctggccctgcccgcttcgacggccgcccctcatcccgtctctcccactccagcggctatgcccagctcaacacctatagccggggccctgcctctgactatggccctgagcccacaccccctggccctgctgccccagctggcactgacacaaccagccagctgtcctacgagaactatgagaagttcaactcccatcccttccctggggcagctgggtaccccacctaccgactgggctacccccaggccccaccctctggcctggagcggaccccatatgaggcgtatgaccccattggcaagtacgccacagccactcgattctcctacacctcccagcactcggactacggccagcgattccagcagcgcatgcagactcacgtgtaggggccagagcctggctggggcatctctgcggggcagaggagaaggctttcacagctgttccctgatattcagggacattgctcattgctcccttctcggaccagccttcttcctcccaccatggcaggtggggagcaggtctcccagaaacaccccgtcccgaggatggtgctctgtgcatgccccagcctcctgggcctgcccttccctcttcttcgggaggatgtgtctcttctgacctgcactcttgcctgaccctagaatggggacagggaaagtgaaggttagggaaagcagaggggggcactttttagcattccctttctatcccacccctctgatctcccataagtggaaatgggggtacccagggatgggcaggctttggcctagggacatgaagtatgggagtgggtggctgtggcacagacaggtggaaaacgggatagcctggccagtccctctgttgtctgcattcgtgccctgggtgcctctctccttcctcagggtactgcagaagggagcgaacagggtactgttcgctcttgtctacagaacagccctggcactgcattcaaatccagtcttcattcagctgggatcaaaatgccagtcaccttggctacccactgtggacagctgtctgtcagcatgcagagggatccaggaatccccccggcagcacggcccgctttccttctcctccatgctgggccagccagataagtcagggtcctggtggagaaagaaaggctaggaccatgtcctcattgacccagatactgctgtgtgctgcacagcagtgaaccaacactagagggagccacacaagcctcctctccccagtctgccccacttcctggctttaactcttgagctggtttggggagtggtgaggtaggggtgggggtgctgtaggctctttttcaaaaaaaaac

SEQ ID NO: 24993 - DNA, 2976 bp, Homo Sapiens
atgcacagccccggcgctgatgggacccaggtgagcccgggtgcccactactgcagccccactggcgcaggctgccccaggccctgtgcagacacaccaggccctcagccgcagcccatggacctgcgggtgggccagcggcccccagtggagcccccaccagagcccacattgctggccctgcagcgtccccagcgcctgcaccaccacctcttcctagcaggcctgcagcagcagcgctcggtggagcccatgaggctctccatggacacgccgatgcccgagttgcaggtgggaccccaggaacaagagctgcggcagcttctccacaaggacaagagcaagcgaagtgctgtagccagcagcgtggtcaagcagaagctagcggaggtgattctgaaaaaacagcaggcggccctagaaagaacagtccatcccaacagccccggcattccctacagaaccctggagcccctggagacggaaggagccacccgctccatgctcagcagctttttgcctcctgttcccagcctgcccagtgaccccccagagcacttccctctgcgcaagacagtctctgagcccaacctgaagctgcgctataagcccaagaagtccctggagcggaggaagaatccactgctccgaaaggagagtgcgccccccagcctccggcggcggcccgcagagaccctcggagactcctccccaagtagtagcagcacgcccgcatcagggtgcagctcccccaatgacagcgagcacggccccaatcccatcctgggctcggaggcgctcttgggccagcggctgcggctgcaggagacttctgtggccccgttcgccttgccgacagtgtccttgctgcccgcaatcactctggggctgcccgcccctgccagggctgacagtgaccgcaggacccatccgactctgggccctcgggggccaatcctggggagcccccacactcccctcttcctgccccatggcttggagcccgaggctgggggcaccttgccctctcgcctgcagcccattctcctcctggacccctcaggctctcatgccccgctgctgactgtgcccgggcttgggcccttgcccttccactttgcccagtccttaatgaccaccgagcggctctctgggtcaggcctccactggccactgagccggactcgctcagagcccctgccccccagtgccaccgctcccccaccgccgggccccatgcagccccgcctggagcagctcaaaactcacgtccaggtgatcaagaggtcagccaagccgagtgagaagccccggctgcggcagataccctcggctgaagacctggagacagatggcgggggaccgggccaggtggtggacgatggcctggagcacagggagctgggccatgggcagcctgaggccagaggccccgctcctctccagcagcaccctcaggtgttgctctgggaacagcagcgactggctgggcggctcccccggggcagcaccggggacactgtgctgcttcctctggcccagggtgggcaccggcctctgtcccgggctcagtcttccccagccgcacctgcctcactgtcagccccagagcctgccagccaggcccgagtcctctccagctcagagacccctgccaggaccctgcccttcaccacagggctgatctatgactcggtcatgctgaagcaccagtgctcctgcggtgacaacagcaggcacccggagcacgccggccgcatccagagcatctggtcccggctgcaggagcgggggctccggagccagtgtgagtgtctccgaggccggaaggcctccctggaagagctgcagtcggtccactctgagcggcacgtgctcctctacggcaccaacccgctcagccgcctcaaactggacaacgggaagctggcagggctcctggcacagcggatgtttgtgatgctgccctgtggtggggttggggtggacactgacaccatctggaatgagcttcattcctccaatgcagcccgctgggccgctggcagtgtcactgacctcgccttcaaagtggcttctcgtgagctaaagaatggtttcgctgtggtgcggcccccaggacaccatgcagatcattcaacagccatgggcttctgcttcttcaactcagtggccatcgcctgccggcagctgcaacagcagagcaaggccagcaagatcctcattgtagactgggacgtgcaccatggcaacggcacccagcaaaccttctaccaagaccccagtgtgctctacatctccctgcatcgccatgacgacggcaacttcttcccggggagtggggctgtggatgaggtaggggctggcagcggtgagggcttcaatgtcaatgtggcctgggctggaggtctggacccccccatgggggatcctgagtacctggctgctttcaggatagtcgtgatgcccatcgcccgagagttctctccagacctagtcctggtgtctgctggatttgatgctgctgagggtcacccggccccactgggtggctaccatgtttctgccaaatgttttggatacatgacgcagcaactgatgaacctggcaggaggcgcagtggtgctggccttggagggtggccatgacctcacagccatctgtgacgcctctgaggcctgtgtggctgctcttctgggtaacagggtggatcccctttcagaagaaggctggaaacagaaacccaacctcaatgccatccgctctctggaggccgtgatccgggtgcacagtaaatactggggctgcatgcagcgcctggcctcctgtccagactcctgggtgcctagagtgccaggggctgacaaagaagaagtggaggcagtgaccgcactggcgtccctctctgtgggcatcctggctgaagataggccctcggagcagctggtggaggaggaagaacctatgaatctctaa

SEQ ID NO: 24994 - DNA, 5801 bp, Homo Sapiens
ggagctggaggcgggcaaaaccggagcggccgggggcggccacggtgatgagccgggcctggcggacgcggcgccatcgcagtcagaaggaagaggcccagcagaagggactcgctgagccaccccccgccccactccatgttggctgtgctctcaggctggcaccatgcccccccctgcagaggtgacggacccgtcccatgcccccgccgtcctgcgccagctcaatgaacagcggctccgtggcctcttctgtgacgtcaccctcatagccggagacaccaagttccctgctcaccgcagcgtcctggctgcttcaagtcccttcttcagagaggccctgctcacttcagccccactaccccttccaccagctactgggggcgccgcacccaaccctgccaccaccacagctgcctcttcctcctcctcctcttcctcgtcttcttcctcttcttcctcctctgcttcttcttcttcttcctcttcctcttcctctccccctccagcctctccccctgcttcttccccaccccgggtcctggagttgccaggagtcccagcagctgcgttttctgatgtcctcaacttcatctacagcgcccggctcgcactgcctggtggtggaggggacggggcagctgtagcagagattggagctttggggcgccgtctgggcatctcccgccttcagggcctgggggagggaggtgatgcctgggtacctcctaccccagcccccatggccacctcgcagcctgaagaggacagctttgggcccgggcccaggccagctggggagtgggagggtgacagggctgaggcccaggcccctgacttgcagtgctccctgccccggcggcccctcccctgcccccagtgtggaaaaagcttcatccatcccaaacggctgcagacccatgaggcccagtgccgacgaggggccagcacgcgggggtctacagggctgggagctgggggcgctggccctggtggtcctgcaggggtggacgcctcagccctgcctccaccagtgggcttccgagggggccccgagcacgtggtgaaggtggtgggcggccacgtgctgtatgtgtgcgcggcctgcgagcgttcctacgtgaccctgtccagtctgaagagacacagcaatgtacactcgtggcggaggaagtacccctgccgctattgtgagaaagtgtttgctctggcggagtaccgcacgaagcatgaagtgtggcacacgggggagcgcaggtaccagtgcatcttctgttgggagacctttgtcacttactataacctgaagacccaccagcgagccttccacggcattagcccgggcctccttgccagtgagaagacacccaatggaggctacaagcccaagctcaatacactcaagctctaccgcctgctccccatgcgggcagccaagcggccctacaagacctacagccagggagccccggaggctcccctttctccaaccctcaacacaccggcccctgtggcaatgccagccagcccgccgcctgggcctccacctgccccagagcctggccctccaccctctgtcatcacttttgcccacccagccccctctgtcattgtccatgggggcagtagcagtggtggaggggggagtgggacggccagcacaggagggtcccaagctgcctcggttatcacttacactgctcccccgaggccacccaagaaacgagaatacccacctcctccccctgagcctgcagccacacccaccagcccagccacagcagtcagcccagccaccgctgcagggccagccatggccaccaccacggaggaggccaagggccggaatccacgggctggaaggactctgacttacacagccaagccagtgggcgggattggtggaggtgggggtccccccacaggggctggccggggcccctctcagctgcaggctccacctccactgtgtcagatcactgtgcgaataggggaggaggccatcgtcaagcgccgcatctcagagactgacctgcgtcctggggagctgagcggagaggagatggaggagagtgaggaggacgaagaggaggaggacgaagaggaggaggaggaggatgaggaggaatcaaaggctggtggggaggaccagctctggaggccctactactcctacaagcctaagcgcaaggctggagctgctggaggtgccagtgtggggggcagtgggctgccccgaggccgccggccaccacgttggaggcagaagctggaacggaggagctgggaggaaaccccagcggccgagagcccagcgggacgtgcccgcacagagcggaggcaccgatgcggggactgtgcccagaccttcaccaccctgagaaagctgcggaagcaccaagaggcccacggtgggggctcccacagctcccgggccggacggaggccctccacccgctttacctgcccccactgcgccaaggtgtgcaagaccgcagctgccctgagccgccacgggcagaggcatgctgctgagcggcccgggggcaccccaacccctgtcattgcctattccaagggcagcgctggcaccaggcccggggatgtcaaggaggaagccccccaagagatgcaagtctcctcatccagcggtgaggcaggtggcgggagcactgctgctgaggaagcttccgagaccgcctcactccaggaccctatcatttcagggggtgaggagcccccagtagtggcaagcgggggcagctatgtatacccacctgtgcaggaatttccactggccttgattgggggcggccgggaacctggcggtggcaggggaaaatctgggagtgaagggccagtgggggctggtgagggggaccggatggaggggataggggctgccaaagtcactttctaccctgagccctacccgctcgtctatggcccccagctccttgccgcctacccttacaacttcagtaacttggccgctctcccggttgctctcaacatggtcctacctgatgagaagggtgcgggggcccttcccttcctaccaggggtctttggctacgcagtgaatcctcaagcagcaccccctgccccaccaacaccacctcccccaactcttcctccaccaattccccctaagggagaaggggaaagggcaggggttgagagaacccagaagggcgatgtggggtgaaccctggggctcaatccccctttcaccagatgccaccctccctgaaccccccaccactaccagctccctggcctccctgccccttgggagccccttcacactcttgtgcagggacttgggggcccctggagctcaggggtcaggctgctttgtgtgagatgtagttttcccatctcctgggaagggatctttcgaggttcccctctcagtcttcctccagggaatggcctccatgaggggcagggccagcttccatcccttctccagcccttggggcaactgagcaatatacttaacctgaatctctactcacagcccccaccagctctgaatgtctaacctgctcccctgattcgtaaacctaggggaaaccatctctctcacctaatgacccgccttgttctgaagctttctctaagcccttcccagttgcttcctagcacattccattctttgtggcccagggcctggaccagaccattgtgatacctgaccccgcccacctgggagtgtggctttgggtttcatccttccccagcgtgggtctctacgtccctgtttcccttgtatcaagacaccttcctcagcttccatgcctttggatcttccatgttcctccccatattcctggacttcggagatggcctctcccaagccaggtcaaggaggtttgggggagggttgcccctctgcccctctgttctgtggctgagcactttcccagtccagggcagggaaatattggccctatcttgacccccaaatccagtgagctccagattcttccaaggcaaaagaggtaagcagatcacacctctttctgcctctacatatggcctattctgggctagaccagatttgggggccaggagggaagaactccatatgggatggagaagggaatctactttctccctgttttttttttcctgatggtttctcccagactagaccaaatagccagaaaaatgataggggtcggatgggtgggtaagcccaggatttgcacatgaccttccatccttacctgtattcccatctccccagtgtcactcccctcaccaatcactccagatggttttgggggaaccattctactcttctggtgggctttggggtatccccaccaactttcccttcaaaatagcaccttacaccccatctttgactcagttccccacacccaaagatcccagcctagggatggggtacagggactttaaatagtccctaatccctaatttgcactagttaaccctggtcagggtccctgtatttccttccagtgggggagataaatgtttgctcctaattctctttgaaaactgggcctccctgctctgtgattggataaatatttcccatcccacccacctccccccaaaaaatagctcacaaggggagagccagtatgggggagcaaatttgacaaatgggaattagaggagtgcagttttaaaaggaaaagttgctgtcatcaaaatggcagccttttccccagctactgtttttggggccaagatggctgccctagcagcaatcactgccaagggcaagatcatggcttttggagggaggtgagtttagggagggccaggaccatcctcctacccctcataccctcccagcatatacaaaaggggaggttttagacaggctccctgaatgttaaccacagaggagtcactccttcattcctcctctgtctctttgcacttttcttggtcttggccacagcctgagtgacgaatttcctactgaatgtaccaagttccaatttttaagggggggaaaggtttcaaatggggaaaaacacacaaaaaaaaatcactaaaaattcccacaaatcttgtttctggcactttagaaaaactgcaaaaaaatacgtaataaagaatacatatatatatatctacacacaaattatatatctatctatctatacagcggaaccacaagagagactgaggaaggcctggaggcaggggcagaggtgacgacagtgcccctatatccttaacccatactcctctgaggcaaacaggcatgggaaaatggaagggttgaggatggaccggagaattggaacttcagaataggtcaaaattccaaaaccatggacatttttttttgggagaattgagattgtagacattttttttttcttaaatatgatcaaggaaaatagcttccagaatgtggtggttctgggcaacaaatgagattgtggcgacgtggagattaaaatatatgtatttgagctggggaatttgaatattgtgagtttcagatgttggaaatttgggattttgcagttttgtcttttgaaaatgatcaagtcttgtcagttcgtgccctctttccccatgttccctgggaagacgggtggtggcagagtgagaaggccactggttctgtgccgcagcacgcaaaatttagaattctacagactagctctatacgtagtgaggacccagatttagagaaactgaccaatatttatctccgcatttgtgtgtgtgtccaactctgtaggccaataaaccaacaagacaaatgaactgtgctccacaaaaaaaaaaaaaaaaaaaaa

SEQ ID NO: 24995 - DNA, 1692 bp, Homo Sapiens
ggtcgctgccggagctcgccggtcgcccctgcgctgcgcggaccgcagccacagccggactggtgggaacggcggcgacagacggattggctgacagtcccagccctcagaacagccccggcctcgaagcgttggcgtctgcgtccgcgtcagcgtccgcttgtcccggagccggggcaggtgcgcgcggggggcgctccagggaccgcgctgaggccgcagacgccgcccgccgagccccgccccctgctcgccgaactcagctccccgttcgccgtcggggcgtccccgggcccaggggcggcggcggagctgatgtgcgcccgctgagcgcccccggcccgccatggccgcgcgccccggaccgctctggcttctgggcctgacgttgtgcgcgctgggcgggggcggccccggcctgcgacccccgcccggctgtccccagcgacgtctgggcgcgcgcgagcgccgggacgtgcagcgcgagatcctggcggtgctcgggctacccgggcggccccggccccgcgcgccacccgccgcctcccggctgcccgcgtccgcgccgctcttcatgctggacctgtaccacgccatggctggcgacgacgacgaggacggcgcgcccgcggagcagcgcctgggccgcgccgacctggtcatgagcttcgtcaacatggtggagcgagaccgtgccctgggccaccaggagccccattggaaggagttccgctttgacctgacccagatcccggctggggaggcggtcacagctgcggagttccggatttacaaggtgcccagcatccacctgctcaacaggaccctccacgtcagcatgttccaggtggtccaggagcagtccaacagggagtctgacttgttctttttggatcttcagacgctccgagctggagacgagggctggctggtgctggatgtcacagcagccagtgactgctggttgctgaagcgtcacaaggacctgggactccgcctctatgtggagactgaggatgggcacagcgtggatcctggcctggccggcctgctgggtcaacgggccccacgctcccaacagcctttcgtggtcactttcttcagggccagtccgagtcccatccgcacccctcgggcagtgaggccactgaggaggaggcagccgaagaaaagcaacgagctgccgcaggccaaccgactcccagggatctttgatgacgtccacggctcccacggccggcaggtctgccgtcggcacgagctctacgtcagcttccaggaccttggctggctggactgggtcatcgccccccaaggctactcagcctattactgtgagggggagtgctccttcccgctggactcctgcatgaacgccaccaaccacgccatcctgcagtccctggtgcacctgatgaagccaaacgcagtccccaaggcgtgctgtgcacccaccaagctgagcgccacctctgtgctctactatgacagcagcaacaacgtcatcctgcgcaagcaccgcaacatggtggtcaaggcctgcggctgccactgagtcagcccgcccagccctactgcagccacccttctcatctggatcgggccctgcagaggcagaaaacccttaaatgctgtcacagctcaagcaggagtgtcaggggccctcactctcggtgcctacttcctgtcagg

SEQ ID NO: 24996 - DNA, 3773 bp, Homo Sapiens
actcgcgggaaccgcaccaagcgggtggctgcaggagctcgcccatcgcccctgcgctgctcggaccgcggccacagccggactggcgggtacggcggcgacagacggattggccgagagtcccagtccgcagagtagccccggcctcgaggcggtggcgtccgcgtcctctcgtccaggagccaggacaggtgtcgcgcggcgggcgctccagggaccgcgctgaggccgcggtcgccgcccgtcccgccccgccccgccgcccgccgcccgccgagcccagcctccttgccgtcggggcgtccccaggccctgggtcggccgcggagccgatgcgcgcccgctgagcgccccagctgagcgcccccggcctgccatgaccgcgctccccggcccgctctggctcctgggcctggcgctatgcgcgctgggcgggggcggccccggcctgcgacccccgcccggctgtccccagcgacgtctgggcgcgcgcgagcgccgggacgtgcagcgcgagatcctggcggtgctcgggctgcctgggcggccccggccccgcgcgccacccgccgcctcccggctgcccgcgtccgcgccgctcttcatgctggacctgtaccacgccatggccggcgacgacgacgaggacggcgcgcccgcggagcggcgcctgggccgcgccgacctggtcatgagcttcgttaacatggtggagcgagaccgtgccctgggccaccaggagccccattggaaggagttccgctttgacctgacccagatcccggctggggaggcggtcacagctgcggagttccggatttacaaggtgcccagcatccacctgctcaacaggaccctccacgtcagcatgttccaggtggtccaggagcagtccaacagggagtctgacttgttctttttggatcttcagacgctccgagctggagacgagggctggctggtgctggatgtcacagcagccagtgactgctggttgctgaagcgtcacaaggacctgggactccgcctctatgtggagactgaggatgggcacagcgtggatcctggcctggccggcctgctgggtcaacgggccccacgctcccaacagcctttcgtggtcactttcttcagggccagtccgagtcccatccgcacccctcgggcagtgaggccactgaggaggaggcagccgaagaaaagcaacgagctgccgcaggccaaccgactcccagggatctttgatgacgtccacggctcccacggccggcaggtctgccgtcggcacgagctctacgtcagcttccaggacctcggctggctggactgggtcatcgctccccaaggctactcggcctattactgtgagggggagtgctccttcccactggactcctgcatgaatgccaccaaccacgccatcctgcagtccctggtgcacctgatgatgccagacgcagtccccaaggcgtgctgtgcacccaccaagctgagcgccacctctgtgctctactatgacagcagcaacaatgtcatcctgcgcaagcaccgcaacatggtggtcaaggcctgcggctgccactgagtccacccgcccggcccagctgcagccacccttctcatctggatcgggcccctcagaagcaggaaaccctcaaacccagccagaccccaggccggggcattgccagggaggaccctcacaaccacgtacatgaccctttctccttcatgccaggctcctatgctccccttgccctgccaggcatttgtgtgactgtcctgtttccagcccaggtggtctcaatcatcaggcagtgttctacccaaatgcaaacgcctctcccggaggcatgtcctggctggttctttggggttggcacagaagtcctgtctgaggtcctatccatgccccttactggctcaggtcgtgagatagatgtggaatgacctgagaggcacctggagcccactgttggccaccttgagctcttcaccatccatcacagggtgtggtgtgtgtagtcagggtctggttggctccccattgcctgcccgaggtgcaaggtggggtataaaactggataacccctgaagtattgtatattcatggatctgaagcactgatccactggtcacaggtagacatgtggagtcaactcaagaaaaagctgagtgaacagcatgatttagggctaaagccaatggcatttatcttcccttgtcttcctgctttgcatttgcctctgccatctaggaaagacatgtaagagcatggacattttactttggagaaacagaaaaatcttggggcttccaattgacccatctatctgccaccatgttgccccaccaggagctcagctctgtggagttttccctttgctgagcaagcatgtggttgcattgggtggcccaggatgacaatgcacagcacagatgccatcatttccctttcccctctgaatggcagacatcagtaatcaatctggaatgtttttcttccaaatctgagtggaattttcaaatgatcagcacagccactgccaacagatatgatgtaaagtgaaacctggttgccatcttctgccatgctgaggagcagtccatccctgcccgagcatgtatcggcaacatgggcagcctgtgaccgggtctggggcgaggccaggggccatcaaaaacaggctgatcaccaaagtcagtgtcaccctggatgcccagcagccctgtcctgtgtcttgggcctgtgagtcaaagaaaaggtccttttcagggagtgacaagtagtaattaggctgagttgggtggagaggtttgtctcagcctctgctgttctcggaaactgctgttctccttggagcagccactgggagttggagtgtttatttgatttctgacttgctaagcctgtaatttacctgctggaatagacagagtccagctgcccaaaccgtgtcattaaaagcagatcctgcgcccgccccatccacaggcacagcccggcagagtggttccacctccccatgggcccaaggatgcgcctctctggagttcacgtgctgcacccccagggaggggcctggggaaagctggtccagcagcaggggtggaggctggggccacactgcgggacagcagcccctccacctggaccagggagggcctccatgtgcaagcgcagaggaagagaccctcccatgtacgcaaagggcagccccaggctgtctggaagttggagaattccctatcagcacagggatctcagctctggcctggaggtgaagagacctgccttgtaggtggcttccttatctgcgcctccattttctatctgcactttttgatctccaaacaaccttcagccaaagaatctgtctaccaactcctcatagtgagccagaagcagcctcataaccctgaatgtggggctctggtggctgtcacgaagcagagttggcacataacatggaacctggccaggcatggtggctcacacctataaccccagcactttgggaggccaaggcaggcagatcacctgaagtcaggagttcaagaccatcctggccaacacagtgaaaccccgtctgtactaaaaatacaagattacctgggcatggtggtgcatgcctataatcccagctactcaggaggctgaggcagaattgcttgaacctgggaggtggaggttgcagtgagcagagatcacaacattgcacttcagcctggtgacatgagcaaaactgttgtctcaacaaaatgaaattatg

SEQ ID NO: 24997 - DNA, 3729 bp, Homo Sapiens
gcggccgccgcatcctcagccaccgtcgcagctgcctccgccaccaccgccgcctcctcttccttggccaccccagaactgggcagcagcctcaagaagaagaagcggctctcccagtcagatgaggatgtcattaggctaataggacagcacttgaatggcttagggctcaaccagactgttgatctcctcatgcaagagtcaggatgtcgtttagaacatccttctgctaccaaattccgaaatcatgtcatggaaggagactgggataaggcagaaaatgacctgaatgaactaaagcctttagtgcattctcctcatgctattgtggtaagaggcgcacttgaaatctctcaaacgttgttgggaataattgtgaggatgaagtttttgctgctgcagcagaagtacctagaatacctggaggatggcaaggtcctggaggcacttcaagttctacgctgtgaattgacgccgctgaaatacaatacagagcgcattcatgttcttagtgggtatctgatgtgtagccatgcagaagacctacgtgcaaaagcagaatgggaaggcaaagggacagcttcccgatctaaactattggataaacttcagacctatttaccaccatcagtgatgcttcccccacggcgtttacagactctcctgcggcaggcggtggaactacaaagggatcggtgcctatatcacaataccaaacttgataataatctagattctgtgtctctgcttatagaccatgtttgtagtaggaggcagttcccatgttatacgcagcagatacttacggagcattgtaatgaagtgtggttctgtaaattctctaatgatggcactaaactagcaacaggatcaaaagatacaacagttatcatatggcaagttgatccggatacacacctgctaaaactgcttaaaacattagaaggacatgcttatggcgtttcttatattgcatggagtccagatgacaactatcttgttgcttgtggcccagatgactgctctgagctttggctttggaatgtacaaacaggagaactaaggacaaaaatgagccagtctcatgaagacagtttgacaagtgtggcttggaatccagatgggaagcgctttgtgactggaggtcagcgtgggcagttctatcagtgtgacttagatggtaatctccttgactcctgggaaggggtaagagtgcaatgcctttggtgcttgagtgatggaaagactgttctggcatcagatacacaccagcgaattcggggctataacttcgaggaccttacagataggaacatagtacaagaagatcatcctattatgtcttttactatttcaaaaaatggccgattagctttgttaaatgtagcaactcagggagttcatttatgggacttgcaagacagagttttagtaagaaagtatcaaggtgttacacaagggttttatacaattcattcatgttttggaggccataatgaagacttcatcgctagtggcagtgaagatcacaaggtttacatctggcacaaacgtagtgaactgccaattgcggagctgacagggcacacacgtacagtaaactgtgtgagctggaacccacagattccatccatgatggccagcgcctcagatgatggcactgttagaatatggggaccagcaccttttatagaccaccagaatattgaagaggaatgcagtagcatggatagttgatggtgaatttggagcagacgacttctgtttaacttaaaattagtcgtattttaatggcttgggatttggtgcaaacaaacatgattgatagctggacagacatgctcgtcatgaaaaaagaaccatttctgaagcccgattggggccaaacatttacaccttgcttcatagtaaccagttgagatgaagcacgtcgttagaacgttgttggacaccatgttgaattattcccccatcggttgtgaagaactgtgctacattcaggcttacccattgaactcagtatatatatttttttccttcctgtcttttgtctggcaggataccattcttgttgctcttctgtgtaatgaagtttaaatgcttgtttggaaaactttatttaacagtttagaaggcttgatagaaagagtgcattagtctgaagagtatacattggataggaaagaatttccttcttttgtttctccaaatctttccgccttatttagcttgagatctttgcagcttggttcatggattctagccttgcccgttgcgcagtatatactgatccagatgataaaccagtgaactatgtcaaaagcactctcaatattacatttgacaaaaagttttgtacttttcacatagcttgttgccccgtaaaagggttaacagcacaattttttaaaaataaattaagaagtatttataggattaaagtgacttcatttgtatacatttggaatctaaaccagcttaaaaacagtttcctcaatgacttagatacacagtataactgatgctcttctggaataccacatgagacatggtcagaaacagtgcttggaaggacattacacaagaaattcagagtaatgctttgaagatttccccccttttgttttattcctgaaggaacatcagtacccgatcttgaagaaattcaagattcaaaaagaattttaaatacaccaacatgagacatcagtagtcagttggttttcagtaaagcttgttccaagttgttctcaacttaggaagtaattttggtgtgatctagcaaaagagtaggaatcagcgatacaaccactttggaagtttatagtataattgaaattattagaagaattcagcaggttacagacatacttaaactgggattaaaacctcatagtcatttttcttaattgcccttaatattttgacatatagggatacataaatttaaagaatattttttctcagttttttcagatattgccatactgaacctcattctaaactggtgctgtggatagtctttccctctcccctcctgttttagtttaaggaaaggtttccttcatggaaaagcacttttaattttgagaatttcacatttaaaataagccaaaagcctgatgttcacattgtgcttttaaactccgtaacagctgaatacaacataacatagtctcccttgaaattccctccctttttcagtagaggataaatagggtgactccagctgttggaatgagaatggggatacccccaaaataagattctggtgaagaaaaagtcttgtactaagttcccctttaggtgtagccaagtctataatataattatgatcatgaatagactccagaatccacaaagagaagagggcttggatgtcaaaaattcttccattgtggggtaggtggtcggggatgggagaaagggaaaagtcagggaaaggggagaagaaagaaaaacacatttggccttaaaatagcatgcattctcccagaagcccatagtaaagaaaatgacagatcgtggtcagcagactcttatcaaattggtatgtaaaagatttcttcaagctccattttgcagagaccaccacttagagaatcaaaaaattcctgttttgatacttctaagttaaaatatatgttacagtttatctggtacttcatttttcttaactaaaattactttttactttaagcttgaataaaaatcttcattggtaactgt

SEQ ID NO: 24998 - DNA, 10200 bp, Homo Sapiens
gaattcaaacttaggcagtttggatccagagtctgttcttaaccaccgtgatatcccctcgaactctttgcagtagtgcaataggaatcttatctttttttttatgcattagaaatatttttaatactaaccatccagtgaaacatgtagcaactgatttccctaaagcctgtgcaagcaatacagtaaatgatgaaccctaaaagagatatcatgagttgatgatagtgtcaatatttattaagcatgggagtgtgtttgacacagaaatgttgacttctcatatacctgctttggaggtctataattttgcagctgttggtcaagaatgagaagactcatgtcttgtctacctttttggtaaagctactactctttagatcagtcgtgcccactgtctaatagaaataatgggaaccacattatcattttaagctttatattagtcacatcaaactaagtataaagaaacaggtgaaagtaattttaataattttaactgaatagtcatatcaaaacattattatttaatttaacatgtaaccagtatacccccttttggggtttgttttttttactaacttttcaaaatctaatgtgtatttcatacttacctagtgtgtattttatacttacagtacatcttaatttggactagccacatttcagctgctcagcagctatatgtagctaattgctgctatatttgatagcctagccctagctaatctataggaccaatctcagttgtggcttaagtctggactagtagcgtaggatttcaggagtataataatttctcagaaaagttgtatattttgacgaaaaatgctttgcccgtatgttgtcctcactatttttacaaattagagttaaatgataccaatccccattaaaaaaatgttgaggaattttcttagaaatactaacctgctttaactccagcaacttttgtgatgcagcagttctttttttttttttctcctagatatcaacaagtttctttggatggtccggattggagggagcacagatacaggcaaacatatcaaggagaatgactattatactccaactggggagttccgtgtggaccgtgaaggttctccagtgctgctcaactgcctcatgtacaagatgtgttactatcgctttggacaggtttacacagaagccagtgagtgactcataataatattaataacagtagtaataatagtgattactaatacacagtattttccatatgccaagcactagtaagtgctttgtgtctgttaactcatttaatcctcacagcaaccccaaaggcatatactgatattattgtcatattacctttatttttgttgtttgcatatttttttgagacagggtttttgctctgacacccaggctggagtgcagtggtacaatcatggctcactgcagccttgatttcctgggctgaaggagtcctcctgcttcagcctcttgagtagctgggactaaggtgcacaccacaatgcctggctgtttttaaaactttttgtagagatgaggtctcactatgttgtctgggctggtctggaactcctgagctcaagcaatcttcttgtcatggcctcctgaagtactgggattacagacctgagctactgcacctagctattgttatttttgttttgttttgttttgttttttgagatgaagtcttgttctgttacccaggctggagtgcagtggcacgatcttggctcactgcaacctccacctccccggttcaagcgattctcctgcctcagcctcccgagtagctagaattacaggtgtgctctaccatccccagctaatttttttttttttttgtatttttagtagagacattgtttcactatgttggccaggctggtctcgaactcctgacctcaagtaatccacccacctcggcctcccaaagtgctgggattacaggcatgagccaccgcacccagcctgttattttatatatgaggaaattgaggtacaaataggttatttaactgcctagtgtcacataactaatggcagagtcaggattcaaactgacaaagagtggctccaaattctgtgcttttgaccgttactttttattgtccttaagggtattacagtgaagacaggaacaaaagggaaagaaagtgacttttcgtatcttctgatgactacattgagagttatttgattaggttaagtctctccttctgacttcaatttcttgattctgtactagggagaatttctgacatgaatgcaggtctttgacttctggtaggcttttttctctgatccatgcaagggttgctagtgtattagaggctctgaatgacaatcctcaggaatagagggccttggaagtcggctccctatgtctgtcttatcagagataagacattgactggcaagcatcatcttgcatagaacttaagctagggtaacacttgatttgcccttactacctcatgcccttttttgcaggctctactctcaacaaattgcaggctgaggaataatcatcaattagtagatggtttcctgaatccatatactgtctctctaggaaattagcactgtagaaagaagtgtgttctttttcatccctctctagagcgtcctccaggctttgaccgtgtccgaaatgctgagattgggaataaagactttgagcttgatgtcctggaggaagcatataccacagaacattggctggtcaggatatacaaggtaagcagatgctatacgtctcagaaagcaacttttatttttggagattggtttcaatgcttataaaatgggacatatatttctcaaatagggaaatttctcatgacacctgtgcttgaaaagtagcttgcaaactcactgaaaattttacttattttagattgttcttagagagtagatgatcccagtctgccatcattttggcggttgttgcagtgatacttttccagctggggcttgactaaaccagtttctgtgattatcaggctcacgggtggggagagtgcaggaaatagagaaaaagttcacatgtttatatttagctacattttcttctctctctgaagaacttaaggtatatagagtcatatagaaccacataggagtatatctctcatataagaaaagattgagaacccttgatctatgtggagggtagatcagtaatattggtcctcacagaggtattccaaaaggctaagcagagagaatctagtctctagtcagtgcttgtgtattcacagccctaaaccaggctgcagaacccaacataatcctgcccactctgggtgaatccattttagtagaaaatttctccaaagttgatctgattgtaaatattaaactgacatctttatgttgcaggtaaaggacctggataaatcgaggcttgtcaaggacataaatgtcacgtccagctctgatatgcttcgcactgagcacatcacatttaggacgttgaagatttttttttttttttttttttaatatgcagtttgtaagaacaaaactggatggcatcagaattgtctggaagttttgtcttgggcagtatgggctgggccaaatgaaatgatttttataattctaaacaggttaccaaatgaaatgtcatggctttactttggtcaattaaaggggggaatttttttaaaaaatgtgccttatttgttttgacttataactgatttgagggaggcaaaagctatgctaggctgccagaaggacataagcagaccttgtccattctcttagctccctaaattagccaaatagagacttctttctcaaatcaggaaaactatcaaagaccaattcagatcctacatttacagacagttttgtcataaccctttgcattgcagcacctagtacaattccttggaaacagcgtggctcaataaatttttattgaatgaataaatgtgggaccagaagagtgctagaagagtgcctttctgggctactatgtctctgttctcaatgtcttttatccttagacgctctttgactttataaatcagcagttttgaagactcaagacaaacagtgaaattattggtttatcaatggagaggaagaaactcttccagcattacatatagagcttgatggtcagtaggtgtttttgaatcagcttaaatataatcatacatatcaatttgaaatggagcttttcagtactctcacttattcatgacacaggaatgaccctttactcaaaactcttgtggttgttcaaaggtgagcttctttttcccttagtcttagcctatgtgtggctgtggtatatggttaccaagttcacctacctaattttgaagctctttccaaatacaatccaaattaaaaggggaagcttttgccagtaacaggtcctttaaagagcagtgccagcctgcctgaaaaaaaaaaggaaaaacttcttaaaaagttttaagcctgggcaccataaggagattgtttttatgaaaaataaaaattagccaggtatggtgttgtacacttgtagtcccaagctactcgggaaagatgagattggaggatcacttgggcctggaaggttgagggtacagtgaactgtgattgtgcccctgtactccagtttgggcgacagtgaaatcttgtctaaacaaaaacaatttaactgggaagcacagtggtccttgaggacatttaatatcaggacaaagagcctatgaatatatcactgatgtatataaaccctaaggcgttaataaaagctaactgtttagtgttatccatttaagggaacaggaggaattgcataacttttagattagtcatagtggtgctcctaagggatatgctgttgtatatttgtatagccagggcacttagccttccaaaccaatttatataccatgttcttcaactgtgggtgagatttagcctcaagatttgatttactatatgtaagtacattacttgatttctataaagaatctttagtggaagaggttattctgaattatttatcaatatgattaataccagttagaaattattaatgatcttcctttatactatacataggataacttttaacttgtcgctacagttgttgctctgaggatcttaattttgttactttctaggctacatgaagctatctttttaaaaagtgtactcttcattttcactgttattgtgtacttagcataaaaaactcaaatctaggccaggtgcagtggctcatgcctgtaatcccagcactttgggaggctgaagcatgcggatcacttgagcccaggagttcaagaccagcctgggcaacatggctaatgaacactaagcatagttttgatgtctttcatattaaagactttctcaaattcttgctagtctgctcctctttaagagtgggaccctaggcagggcgcagtggatcatgcctgtaatcccagcactttgggaggccgaggcaggcagatcacttgaggccaggagtttgagaccggcctggcaacgtgggaaaactctgtctctactaaaaatacaaaaattagctgggtgtggggtacacaccctgtaatctcagctactggggaggctgaggcatgagaattgcccaggaggtggaggttgcagtgagcagacatcatgccactgcactccaacctgggagacagagcaagactgtctcaaaaaaaaaaaaaaaaaaaaaaagagtgggacccaaaaaagctgattgaaaggtctgtttgtagggggtgtaaatggggattaataatgtgggtttcaatctactgggaatctggctggggctgttacattgggaaatccatgatactgatttttagatttttatcttttgcataggtaagattcccttgagaaggcttgcatattctcttactcaaggatgtaagccaagcagtcagctttctgggagtagagtagggaaagaagttgtaacaggctcaaccttcagtggataaaacttaaacttaatccctccgttttcagtaaggtgcccaagcttttaactgtgcctaatggtctccagttcacatactgtgcatttaccctcttaaatctcgtaccagctttggggagggacagttccttggttacatagaaagggaagggatacggggatctatttgttttttatgtagcctttaaacctaccccttttagccccatttttacctccaccttcagttacctggtgtcaccagttcaacttgagctttttcagagttctgtgatgttaattctgctttccattgctagctttgggattcatcttcattacctttcatctaaaggctttctgctttccaaaatgtgtctcatactctgttcttatgggttcttttaaatattggtatcctttactattaaaatattttagtgggctttcagaagagaatagaggctatttctatgtattctgtctttaactggtattctgctggagtctgtatatctttttttttttttttttcaggctaaaaagactccatcagacacacaggaaatttgcaggtcttcctcttcgtattctttgttttcagcacacagtgaggaaacaagagaaaatgggataaatgatacaaaaacttgcttttatttttataccaggccctgtggctcgcttctgtaatcccagtgacttgggatgctgaggtaggaggatcacttgagctcaggagttccaggctgcagtgagctaagactgcccaattgcactccagcctgggtgacagagcaacacaccctgtctccaaaaacaacaaactgtaaaaagattacatgaagcctaatctgtgatgtcatgattcaaaactatacacataagcattttaagagttttttccttgatttttgttcctgactttgcttctttaaaagaaatgtgtgtttttgttgttggttgtttgtttttgagacggagtcttgctctgttgcccaggctggagtgcagtggcacaatctctgctcactgcagcctctgcctcctgggtagctgggattacaggcactcgccatcgtgcccggctaatttttgtatttttagtagagacgggggtttcaccatgttggccaggctggtcttgaactgctgacctcaggtgatccatacgcctcagcttcccaaagtgttgggattacacgtgtgagccaccaggccccggccttgagtaacattttatacttgtttcactttactattatcataatagccagttatgcttagtgtttgtatgtggcccagtcttaaggactaagaaaatatatatgtatatatataaaatatatacatataaaaaaatatgtttttttcctacggaatcatgctgttgcccaggctggagtgcagtagtgctcactaacctctaactcctggactcaaacgattgttctgcttaggcctcccaagtagctagggctacagggacacaccaccaagcccgactaattcctaaatttttttatttgtagagatggggtctccctatgttccccaggctggtcctgaactcctggcctcaagccattctcctgccctcgccttcccaaagtgctggaattacaggcaggagccactgcgcccggccagtgctggagaatgtaatggagatgatcctgcctatccctgagttccagtctagtttactgtcagagaatacttatttccatttttcctattttgttcttgagtctctttcctcagaatttacttttccacttaaatgacgtacgcagcttttaaatttgcgttgtaagatttattttggctctccccgcctgttctttgcacattaaaaatgaaaaagtttgtagaactaagctaagcagatggtcttcctgcaaaaagaccgggctgaagtaaagcattgttttggagctggttcacagaaaaaaggcaaaactggttatcctgacttcaagctccaacataaactgctcgctttctccgggaaacttgccccgccacatacacttgactgcgtggccagttctttcgaagcctctcgctcccaacacggagttcctcccatttcttcacagtcggctctcagcagctgctgctggtttctcggctccagcaccacgagtaccgcactctgaggtttacaaagcactctgcttcaccgactgtgatcctcacagtcctgtccggtggcctcacgcaggtggcggtgcagcctttcaggcccagagcggccaggagcgaagcccgcagccccgcctggaagcgcagcgcggtcggtcgcgcgcccctgaggcttggaggcctgggcttcccccagcagcgctcgagcaccgcccagtcgagcctcacaccggatgccacttcatatttgggcccagagctcaattcgcgccgatgcggtccgccgtccttaaatctcttcagccaggatctctccccgactgcaaagcagccctgggcgggagcggcaacatctccacgtcacccttttggagccgccgacattcagaggggcaggacacgggaacgcgcgctgtcttgctttacggcgcgggtgcgcgagtttgcggcagcgtgacgccctcaagttttggcgggaaaagcgctgcatttggattcctgcagtggtgggcaaaggacagtccggtgaggaagggcggccggtagagtagggaaggtttctaaagaaggagttcggggtctagattagtgagggagggcatggtgggagaaagttagcattgactagcgcaggggattggagagactcctgcggaggggcggtttcggagggtggaggaatggtaccaggaggttcccgttgtgggggcgggggcaggagggactaacccgctgctagctaagaaccccaaggaagagtcccagcccttcctttcgcctctgggggcagtttggccccgccccggcctttgggacgggtggggctgtggatggggatgggaattggaattgagcaattgggaggaggcgctgccgcaggcgttttctgccccataccgctccctatatcctcttcctctcttccccagacccccacctctccctcctccttccccagtcgttcgccggaaagcatttgtctcccacctcttcataacaacaattaatttcctctggggcctgaggagggcagaatttcaaccttcggtgtgcttgggagtggcgattgtgatttacacgacaaaatggtcaggtttagaatagttgttcgtggttgaaagacttggataaatgtggatgagatagaaggggaaggcaagagctgttaattttcgtgggcaatcctggggagaggcggggctcagtggcttcactggtgatcttacactctacatcttttctggattcctgccttttacagccgaggtgctcggtggagtcatggcagtgccctttgtggaagactgggacttggtgcaaaccctgggagaaggtgcctatggagagtgagttcttttaagcttgccttcgttttctgagtgcatattcattgttttggagtctcacactctggtgatttagaaagtagatgtttgagatccaagggttttggcaactgaagttacacagccttttgctaggattaaaaattttttccttccctttaaaaaaaaaagttttctttgtagagagctggaagggacacgaagttattgtttccatgcccacaaattgcttctcagggtttaagcattgcggttaatgagcaaatgagcagactctggagattgcctgcctggtttcagatccttgctctatcacatactggtcattgttttgtgatcttaggcaagcttcttaatgtcattgtgtacctctccttcactacctttagggtggcaataatcgcatctaccccataagagcttaggacagtcagttacacaagcacatatagtatgggattaatgctcttaaaagtatatgagtagaacatgtatatatgtgatgtggcttagaattatctcaatctattttatgaagcgtttattaaatgacttgtgtgacagcataatgacgtctttggagggttagctattgtatttcacattttagaaaagagtagtgtgtgttgagaacatagcagaaaccacttccttggtttctcctttgtggaaaaagtaatagaggtaaaatcgttttggatgagtcatgtttaatctttggaagttttagaagaaatggaattc

SEQ ID NO: 24999 - DNA, 5032 bp, Homo Sapiens
taacttttccgtctgcaacctttaataattgagagggtatgcgcaactcagaaaagtgcgcccgctgaggttgggtgcagagtggactggaggaaaggcgacacccatttacggtgcggccccggacggggtccccagacacggccttcccggcgtgccacgcgcggaggggactcttaacgtgaagcgctgggtgactcagccgcgtggccgcgcggtccggggcggggggcgcgcgccgctgcggcacagccggtcccggctgcggcttctggctgcgcggcctgcgcgcgcctcccgggcggattccagccccgagcgggacagcgcggcggggagcgacgagatttctctctgatcaaacggacagttcaggactcagaatctaaggatgaatgttcaccgtggcagtgacagtgacaggttattgcggcaggaggccagctgcttagtggatgatactttagctgtagcccaagaaaaagaagcaaacagcctggcttcatctggtcctcataatcttacttatcctctaggtcccaggaatgaagacctctcacttgactatgcctctcagccagcaaatcttcagttccctcacataatgccccttgctgaagacatcaaaggttcttgcttccaaagtgggaataaacggaaccatgaaccttttattgctccagaaagatttggaaacagtagtgtgggctttggcagtaattcccattcccaagcaccagagaaagtgacgcttcttgtagatggcacacgttttgttgtgaatccacagattttcactgctcatccggataccatgctgggaaggatgtttggaccaggaagagagtacaacttcactcggcccaatgagaagggagagtatgagattgctgaaggcatcagtgcaactgtatttcgcacagtgctggattattacaaaaccggtatcatcaattgtcctgatggcatctctatcccagatcttagagatacttgtgattatctctgcattaattttgacttcaacactatccgatgtcaagatctgagtgctttactccatgaactgtctaatgacggtgctcataagcagtttgatcactacctcgaagagctcatcttgcccatcatggtgggctgtgccaagaaaggagaacgagagtgccacattgttgtgctgacggatgaggattctgtggactgggatgaagaccaccctccaccaatgggggaggaatattcccaaattctttatagctccaagctctacagattcttcaaatatattgagaatagggatgttgcaaaaacagtgttaaaggaacggggcctaaaaaacattcgcattggaattgaaggttaccctacctgtaaagaaaaaattaagagaaggcctggcggccggtctgaagtcatctataattatgtacaacgccccttcatccagatgtcatgggaaaaggaagaagggaagagtcgccatgtggatttccagtgtgttcgaagcaaatccctcacgaatctggtagctgctggagatgatgtcttggaggaccaggagatattaatgcatcacccaccccaagtggatgaacttgaccggctaaatgccccactttctcagatggcttctaacgactttcaggattagggccagctgtgggtctactccttgttggagcccatctcacctgggatgcctgcagccagccctccctcgtgatttgtctcaccttgagtaggagacatgcttctcccctaaccttttcctttctgccataattaacatatgtccttttcagtaagtccatgcctctggcaggggatgaagaagtactcactggtaattagctaccatctttgcagcagccctggtaacttgaaaaatttgggtctggtgctgttcattgagtctttgtgtaactgcaaaagcaggaaaggaagtcaagactcctgttgcctcgtgcttagcaaagcagtccttatcctttatactctgttcttgggttttgtttttgtcttgttttataccaggcaaattgcttagtagcaaagggaccaaactgaaaaggtgacaatctctaacttctaaaagcagacaccaatcggatgctcattagaggttaatgaagatgccattcttggtggcctctgcacccaaattgcatctggaaagaactagggtctcattcagaatgtccaaaaggaaattcttaagagcttaaattcagatttgtgtctcattaatgcagtgaacaattcaaaaccacacagattccttggcaggaaggataatggaataacagtgttgatgagacctttttagcttcaaggtttcggagtctaaacaaatggatgattcatttggaatgaaactcacaatgcaagtagaaggacctctccaaatcaggccagttgggttatcctggcttggaatctggtgtgaaaccataggtcttaacactctggagcagcacattgctgtggatatgtccaggagaccttagatatggcttaaaggctttcaagatgaggacagaaattgcttacaattgctcagtttctcaacagaaagactcataagagtgccagcatggggtacatggagtgaagctgggtgggaagcatcatctgcacagtccctgtcctagtgcaggacttttctctgtatgttttcataccatgggatttttggatatcagtgtattttggttcttgaaatagcctaatagctgctcacacattgggtaggaatattataccaatgtcatccccaaaggaagggtgagctgaatggaaattaagcccagtcattttatttgatctattagctctgttatcagtgcatgatcacccagatcaccctcctcagcccacacagtgctgaaccatcttccctcctgttctccatggctattaatagtatagctaaatttagagtgcagagccagatataagtattttggaattatctcccagcttgtggtagaagctgactggaatacaggttgagtatctcttatccaaaatgctagggaccagaaaggtttcagattttttcagattttggaatacttaacagttgagcaccccaaatctgaaaggcttctgaacgtcatgtcagcactcaaaaaagtggattttggagcacttcaaatttcggatttttggatttgggatgctcatcctgtgtaggagaggctactcgattccatttaatgactgtcctagtcataatcatccaaagataaaagccaggtagatgttgaaagctctttccagggctgaaaaagtgttcttacgttctctgcatgtgactagcatcactgtggaaattaatgctctgttcttcactagaatgtagtaagtggttaaactgagctatcccccacctgatgactattggcatccatttgcaaggccaatggcctggattaagggttaggattatttgtagctagaaggtaattttatttctgtgaaactaattggctcatatttgaggttaggtgtggccttgaccttaccagtacatttatacccactaccagttgactagcccagataattgttaaatggtgcttcttttctgcttctcagtagacttccatgccattacaaaggaaatttgaattacctagtgtttgtatattccatgataactatgtataacttctgttacacagcttatgtattgttaacatttaagtgtaaaccatgccacagctaacacttaaaaatgaaaactaattagttcttgcttagggaaaatgccaggtatgaagtatggcatatacttgacactgtcctgtgtaaccctttactttgctcaggctttcaagattgagtcttttttcccccaaattaggttaacatgcatttgaccccaacctgtggggtttgagtaagctggaaatctgtgacggtaggctttctagtgtcacgaggtggtggtgactgaaggaaaagctgggatcacaggttccttctgatggagaggaaggtttatttctatgcccctcccaccaccctccacctagagctcacccaagcctgctccagtcccaggggcaggccattctgcaaaagcaggacctcacagaaacaagggctgggttgaggtcacccccttcagagttggttcctggccagatgggtaagaggcatttgtaattttaaaaatgtgaaacttgggtttggtgttttcttctaagtgcctaaataagcaagccaggctgttgatattttagccagagaaatcggcaagccaagattaacccgaatctgaagtttagaatcttgagtttgcatctgcatcatatcatgctgttttgatgaggaaacatttgccactgaggagttggagggagggcaagacgacagtgttaagtcagatcatttaatggtttcccctaagccctggaaaaatatttgaaagaatggcagcaaaaaggttaagaaagcaagccagatttactgcacaatatgcagtacccagtactactttaaatcccaagagaacagtgtgatgtctaatatatacaggtctatgaaaatactgtggaataagcccaggaaggttagatgtgtttgcaaataagttgcccaaagggtccccctctaagtaaaacaaatattcagaccacaggctttaatgtaaactgtcaaaaagtgggatgtggaggatttttgttaagtgtcaatcgaagttaaaaagcaagggtttttggccaggcgtggtggctcacgcctgtaatcccagcactttgggaggccgaggccggcaaatcacctaaggtcaggagttcgagaccagcctggccaacatggtgaaaccccgtctctactaaaaatacaaaaaaattagcccggtgtggtggcaagtgcctgtagtcccagctacttgggaggctgaggcaggagaactgcttgaacccgggaggtagaggttgcagtgagccacgatcatgccactgcactccagcctgggcaacagagcaagactccatctcaaaaaaaaaaaaaaaaaaaa

SEQ ID NO: 25000 - DNA, 2792 bp, Homo Sapiens
ggcacgaggtggggaagctgctaacccgacccggattggcgctgaggtggcccgtggggcagggcagatgattctggaccagatgaagcctgaggagccttccagctctaagatagcaggataggagacttctaagattggagctgcagaagacttgccagcccaccagcacaatgtcaggaagccatacacctgcctgtggccctttctcagccctgactccgagcatatggccccaggagatcttggccaagtacacgcagaaggaagagtcagcagagcaaccagagttctactacgatgagtttggtttccgtgtgtacaaggaagaaggtgatgagcctggctccagtctgctggcgaactcccctctgatggaggatgctccacagaggctgcggtggcaggcccacctggagttcacccataaccacgatgtgggggatctcacctgggacaagattgccgtctccctaccccgctctgagaagctccgctccctggtgctggccggcatcccacatggcatgaggccacagctgtggatgcggctctctggggccctgcagaagaagaggaactctgagctgtcctaccgcgagattgtgaagaacagctccaacgatgagaccatcgctgccaagcagatcgagaaggacctgctccgcaccatgcccagcaacgcctgcttcgccagcatgggtagcatcggggtgccccgcctgcgcagggtgctccgggccctggcctggctctacccagagatcggctactgccagggcaccggcatggtggccgcctgcctcctgctgttcctggaggaggaggacgccttctggatgatgtctgccatcatcgaggacctgctccccgcctcctacttcagcaccaccctgctgggtgtccagactgaccagcgggtcctgcgccacctcattgtccagtacctgcctcgcctggacaagctgctccaggagcatgacattgagctgtccctgatcacactgcactggttcctcacggccttcgccagcgtggtggacatcaagctgctcctgcgcatctgggacctgtttttctacgagggctcccgggtgctgttccagctcacgctgggcatgctgcacctcaaggaggaagagctgatccagtcagagaactcggcctccatcttcaacacgctatcggatatcccgtcgcagatggaggacgcggagctgcttctgggggtggccatgcggctggccggctccctcaccgatgtggccgtggagactcagcgccgcaagcacctggcctatctcattgcagaccagggccagctcctgggggccggcaccctcaccaacctctctcaggttgttcgccgcaggacccagcggaggaagtccaccatcactgctctgctcttcggggaggatgacctggaggcactcaaggccaagaacatcaagcagacggaactggtggctgacctccgggaagccatcctgcgcgtggcacgccacttccagtgcacagaccccaaaaactgcagcgtggagctgactccagactatagcatggagagccaccagcgggaccacgagaactacgtggcgtgctcacgcagccaccggcgccgagccaaggccctgctggactttgagcggcacgacgacgacgagctgggcttccgcaagaacgacatcatcacaatcgtgtctcagaaggacgagcactgctgggtgggggagctcaacggcctgcgaggctggtttccagccaagttcgtggaagtcctggatgagcgcagcaaagagtactccatcgcgggggatgactcggtgacggagggggtcacagacctcgtgcgagggaccctctgcccggcccttaaggccctgttcgaacatggactgaagaagccatccctgcttgggggcgcctgccacccctggctgtttatcgaggaggctgcaggccgggaggtcgagagagactttgcctccgtgtattcccgtctggtgctctgtaagaccttcaggttggatgaagatggcaaagtcctgaccccggaggagctgctctaccgggctgtgcagtctgtgaacgtgacccacgatgcagtgcatgcacaaatggatgtgaagctccgctcactgatctgcgtggggctcaatgagcaggtgctgcacctgtggctggaggtgctctgctccagcctgcccaccgtggagaagtggtaccagccctggtccttcctgcgcagcccgggctgggtccagatcaagtgtgagctccgagtcctctgctgctttgccttcagcctctcccaggactgggagctccctgcgaagagagaggcgcagcagcccctgaaggagggcgtccgggacatgctggtgaagcaccacctcttcagctgggatgtggacgggtgaccccctcctccccagcccaacctcgggcctgcgtctgaggtggcccaggaccccaagctgcagagcccagggaagagcagctccagagccctggccggggccgcgggatatcaatatcaggctgccccactccacgttccccagcacatcccaggtggtgggagcagagggtaccctgccccaccagggtccttagggatgctctaggccaaaccacagtttgtaccaaaaaccttgtgaggaggtgggggagccatgtctgtgctcaggaagagggaaggggatgggggtggctagtaggctcctggcctctttggtttataaataaactgtgtctgtctttgaaaaaaaaaaaaaaaaaaaaaaaaa

SEQ ID NO: 25001 - DNA, 31602 bp, Homo Sapiens
aataacttgacggatgacagtgcccattcgtcatcggccctcgacgttggatttgctacctgggcttgttgtctgcgagttaaggtcctgcaaaaagcccctggcttgtcacctcaactaacctatctcctccagcaattctctcaatacatcctcgggttgtattgtaattcattttccatagcagaaatgtggagggctctagagaaggtacaaggcaaattttttttttaaattttatttttggttggccgcggtggctcacgcctgtaatcccagccctttgggaggctgaggcggacgaatcacctgatatcgggagtttgagaccagcctgaccaacatggagaaaccccatctctactaaaaatacaaaattagccgggcgtggtggcgcatgcctgtaatcccagctactcgggaggctgaggcaggagaatcgcttgaaccagggaggcggaggttgtggtgagcccagatcgctccattgcaccccagcctgggcaacaagaacgaaactcagtctcaaaaatttttttgttttattttattttttaaatttgagacaaggcctcgctctgtcgcccaggctggagtgccatggcgcaatcatagctcacggcagactcgaactgctgggctcaagggatccccctacctcagcttccgaggagctaggatgacacgcgtgagccaccatgcctggctaatttttagattttttgtagagacggggtagctatgttgcccaggctggtctccaactcctgacctcaagtgatcctcccgcctcggcctccaaagcgctgggattacaggcgtgcgcaaccgcgcggaggcaatctagaaactgcagagggagcacggacctgggcactgggaagaatagggcgtggacttggagtgtgaccgcgtttgaatctgggttgtgcctgggacaccccacctcctgggccgtaggtggggggggagagagagagagagagagagagagagagaggatgtcgaccttacatggctcctagctctccgcgctctagccgaatgcctggttcctagtgggtgcttgatacgtgggaaatgtagggggagggggtggcggggcattgggaatgtcccgcagagtggatttcgggagagtggcgcttttctctagaactctcttccggttacacctggagtaaaagcttgacactctagaaggaaaaccccagatgagcagctaggactgagggttagcggtaggcgggagcggggagatagtacaagtacgcttcctaatgaggcggtgccgcaaaataaccaattttaataaagactgcagagaagaaaaccaggttctgctggcggagtgcacaggctcccagccgagcgcccaacaaccaggttccgggcccaccctgccgcagcctcttggaaatctctaagttggaatgtgtgcgtgcgcaccacgggtcactgccctctttgtgtgtgaatttgaagcgaaatctgggcgaggcggggccgtgctactagcaatcggacccacagtcgcggttccaagaagccccgaagcttccccggcttcccgcagcactgctgggagggcacacggcgcctctgtccccaccccagagcgtggggcgcgcggaaaaaggtctggtgactgccctccccgccgccccccgggagcgtgccctcccgccggaccctgggactccagagaagcgccgagggcgcgagtacactaagatatacgaccttccctggggaccgggaagggcacaaccacctcttgcaactccgccactaagacgccttgggtcaccaggcccgggggaaaactcgtccccgtcccaggctctcgattcgggccgcagctcacgtcccgcgctcctccctgcgcgccgctctgctcctccctagtcccgcctccagctccgcccgggcgcccagagggcaaatgaggggcggcggggtggcgggtgggggggagacgcggaatttcccagcgcgggggctctggcttaccctgcaaccgggcagtctctttctgtttacggagagaaaggggaaatggaaaagtcggggaggcggtggctggcgtccgctgcgccgcccctgggcaggctcagacgccgtgagtcaggggcagagcagggcggtctgagcgtgcgggcgacgcgggtctcactcgtccgctccgctctggactgcgcgccacgctctggggtccggcgccctggttcctgcttctgccgctgccgccgccggatcccagtggcccggcgtgctcggctcccacaggcctgcagccagcatcgcaccgaaccttcggggggccgcggctggagcgctcggccggcgtgggagcgccaaggccgcaggtaatccagggttgggggtctccggcgtgtctttcgggtcgcgtcccgcctgggtgccccggggattcccatgcagaaatggagggtgcccccagcagaggggaaaactctggcgtgggaagaggtgggggcgtgcccacagctgcgctcgcgggtcgccggctgcaccaggcacagctggaaagcaccttgcgcaagggtctcacggggtgcagactcgcgactcctcccccttcctcctccttcccgtatccgcagcgccagggcagtgctggtctgggcagtacgcggggaagcggggacccgctgtcactgcgcctcccgctgccgacgccgcctggacggccgcactctccctgcccgagacccggtgagtgcagctcggaggctggaggacccgatcctcccaaatgctgggtgctttgataatttataagccttttaggctcccttgacttagagaaccaggaggaaaggagtgggagtgtgggttggcggagcccagagacttgtgaatggctggaactaaattcaagtttgtaacccggactctatcccatgactaaagaggtcatagcagaacacgaaggctgggcttttggtctaagaaagaatactaggagaaaaaaaaagttattttcacggaagttgttttcgagcgatagtgcatgatcaggactctgaaatttttctagctctgggcggagaaggacgcctagggattgtctccatagttaacaggggaaggccaccggctgcctgtaagagagaaacgttgcgatgcttgtctatttcacttttgggaagacaagattaaaggctgctcttgataaaaaacagggacagaaaggctcttgcagttgctttacatacctgtggcctgagtcgtttgtgccaaggagagtgtaatccacttccagctgacgcccccagctctctgcgacggattgaggtttgtgtgcaggacgtctggcatacggcccatgaggactttgtcgtgtaaagcaaatgggaacgttgaggcatgtagaggttttgaagcagagtgtcggtccttccttccatacgcctgaaacgcataatccggggctttttgagagcaaaaacatagtcagaaatgtgccctgagggagaatgtactattttggcacacatatgtatatatgtatatataatttttaaattttttttgagagggggtttcactcttgtcgcccaggctggagcgcaatggcgcgatctcggctcactgcaacctccacctcccgggttcaagcgattctcttgcctcagcctcccgagtagctgggattacaggcgcccgccgccacgcccggctaatttttgtagagacagggtttcaccatgttggccaggctggtcttgaactcctgacctcaggtgatgcaccctccttggcctcccaaagtgctgagattacaggcatgagccactgtgcccggcctaaaaaaatattttaaatgagaaataacacaagtaatagtcattctttgttaggcagaagcatatgctgttatgctggccattttcattcacacttgccaggaaacactcacattttgtttctgtatatggaggcagccaagagtattatgttaatgtttaggaagagaatttcctcgtgattttattgctgatttctgaaataattcagtgtaactaattttgactgtatttgcacatctctccaattccaaaagctggcataattttctgtttggttaggaagtaggaattttatgaggacttttattgtaaactgtgtcaagggaaaaatcatcttatactaaacgtctttattgccaaactagaataccttcacaatctgaactttctctagatgggcacagatcatgaataactcagaaaccattagcatattgtgtgcttaattaaggctggaaagtgctgaggctttttgcaggcgcagttagcaggcgaactggtcagcagggtttctggggaacgtagatttgcgtgacaggggccctgtgttgctaaggaattaatgcaggcactgagaaaagtctcagcgtcagacactcctccacctcccgggtcctgcttccctccctctcccctttccaggcaactcacagtttaggggtgtggttgtgtgtgttcaagctcttgggttttacatataaatgcctgagacttttctgcagggtttaaaaactaacatcttgtcttacagctcttttaggatttgtcttttagaatctccagtcctcacaggaaaaccccccaattaaaaaaataaaagaataaagaataaaaagaataccactactactataaaaaaaaaaaaaatcctctaaaatttgtcttcccagatcagcagagtgaatttgaactgtgtggacttttttcctctttctttcttgagtcatgttagtactgagaactttttttttttctgtcaaatcatctgtttgataaataagtccaggagacttggatcctttcaacccctgaggccctaaattaggctgttttttttttaacctctgtgtttccagtaaattcgacaagcagaaactgcaactaaacggctcagtaaaaccgaagtcaaatgttcctccattaatctaagaagttgctctcctaactcagcagactccaagaacctgaatcacaatctccctcgaagatgtacaagatctcaggaggggaagctgccccctcactctagatttcacggtggtgataacagccatgaaagcatttcataggtttctgccttttttttctctctctttatgtcttgttttagatgcaatcttcttaccgcgaagaagccaggggaataggtagccacatcttgtttgcagataagaaaggaagctaacgcagtatctgcaaagccaggagtctgactcagtacttttctcactcatgcatacaaagcagctaaaaatgacacagcttatttaccatgcccctgacactgcactgagcactttatgagcttgaactctgttaatcctcacgaccacctcatgaggtaggtgctgttattacttccattttacagatggggaaaattgaggtcgagagaggttacgttacttgctcaacgtcatgcaagcagtaaatgggagtgtggggggaggcaatgagatttgactccaagcagtctgagaccagaggaatgttggattgcaggatgctaaactgctttcctcagacacaattcatacgtcagaaaatgaccatcaagtaagtgaatgatgacactaaattgcatggttcttttgtcaaatgaaattcactgagaggcagatggctgggtcatgcgtgcaggtggctctgcagtggagcatttcctggagctttgaaatgaagctccagattgatcagacgtgcgtggctttagccctgagtgtcctgtgtgttaaaggcttgtgcttctcagaacttgaaatacctttcagaaagaggctatgcttttgggagtgcaatcggtgatttaagtaaaccaatgtgccttgaaattctcttagatctcttaggaccttttgtcttttctccttcagaacagagttgttctaaaatcctgagtaacaacgtcagtttttacccttgctttactttctttttctcatctacagatctccaagtgtggcagctgatttgtatataagagctgaaatgcaattttggttaatatagtcacttggacttgcttatgataaatttgactttcctggcttctttctactactcacagcttctagaaggccatttatttagatattaatcttctgggaccctcaagatgtttgctttgcactattaaagaattctggtcctaagggaggacagctgaatcataggttaaatgtatcatcatctttctcatactcatcactgggagaacaaggtttcctgtcatccttccaattagctgtttaactcatttgcataagaatcattcctgaaacttgacctattgccatcaaatttgtgtagattgaaatccatttttccagcttctggctttcagggcctgagttttatttgccaagttagctcctgcatttagtgaagaggttatttttctttaaagtcaccagaggcataaaaaagccatagcgattcttgcagggagggtgccacttcgggggaatagctgggttgtgtaaggttggaagccctaaagagccggtagcctaaggtcttcaaagatttctgagctgctcttgattcgtgtgtatgtttagtgaaagtttgttttcagtgcctgtagctgataccactgactctgtgagtaagagtaagctctctggatctcaggtttccctctgcaaagtgagctggactaaaggttatcttaggtccctttcaactctgcactgtcaacttgaattcatacacacagttgacacagaaccctcgttttctgaacaaaagcatataaaatcctgttgccaatccttgtatgtcagtttcccatgggtcttgaatgcaaatacaaatatcgtaaactaaatatttgtgttttctttcctagactctccagaaagagcaacagtaatggagtacatgagcactggaagtgacaataaagaagagattgatttattaattaaacatttaaatgtgtctgatgtaatagacattatggaaaatctttatgcaagtgaagagccagcagtttatgaacccagtctaatgaccatgtgtcaagacagtaatcaaaacgatgagcgttctaagtctctgctgcttagtggccaagaggtaccatggttgtcatcagtcagatatggaactgtggaggatttgcttgcttttgcaaaccatatatccaacactgcaaagcatttttatggacaacgaccacaggaatctggaattttattaaacatggtacgtttctttccgatcagttgggtgctatgtgctcagctttcctactgcagcttcatttaatgcagagtggtgtttgaatttggcttagatgggctggcaggcatgattttaaaaaatgtaatcatcagtaagaagtacttccatgttaaagatgcaaaaaaaaaagtcttcattaaaatttctatttaaagattcttgatcatattttagtagtatttctacaaataggtaattaagaagaatgtattttggccgggtgcaggggctcacgcctgtaatccgcgcacttggagaggccgaggtgggtggatcacttgaggtcagcaattagagaccagtctggccaacatggtgaaaccccgtctctactaaaaatacaaaattagcctggcatggtggcgggcgcctgtaattccagctacctgggaggctgaggcacgagaatcccttgaacctgggaggtggaggttgtgatgagccgagatcacaccactgcactccagcctgtgtgactgagtgagactctgtctcaacaacaacaaagaagaatgtattttaatttaacagttcactaaaaagtttattcatcagttatgcagaaaagaaaggcttaatgagactccttcgtctgagaggggaataaacactttgtcactaattaatcttgaaggctgaattatttgttcctttcttgtcacatcttgaaatgttattaattcatttcttgcaaaaatgtagtatgtaggcagtaaatagctatccacagattcactctctttcattggcaaagtatgaatggcaagtgatatatttgcttaatcatcgcaagtatgcaaatcatgcaaaatattgtggcaacattttgttgccataatagtagatcaggtgatgtgtttaggtgtgcctgggattctgtcaggcttttagtatgtcagaggtgaacgtaggtgctggctaaaggtaacctaatatttttaaaaagaataatttgcaaaggagtaggtggtagcttgcaaaacatgcttattgatgaaagtgacgccctttcttttggtgtatctaaatggcaaaatggctaatgttgggggaaagtcggtgctgaatgagtgcggagtccagaaaaagtacttaattattttgtttttttgcataccacattcatttaattaaaaacaacagagtaatttaggtcaggtatgtagtgaattgttttgtcagaagccagtcatactcaaccatagctcacaatggagcaagataatattttgcattgttgtgtgactgctttggtctggctctatcaagctctatttaatagtcgactaagtactttaccttcagaatatttcttccttttataaatgagaaataatcatttgaactagaagccatatctgattttcccaaataaaggatagttggagaactcgggttcaaagttatatatatgtctataccgagaaatataattgtttgtgtatttctctcatttttaacgtatttatttgttaaaatgggaattaaattttttttaaaatcctgctccttctataaaaatgagtattttaaatgaaaatatgcagaaaaaaaaccaaagtattcttgcttgtaaatatgcaaagacttaggtatgtttgcttattccgtggcctatctgggaatgtacagaaagaaattcaggaaatttagaagaaatacaaagaaacaacattctgaagtcttttaggaatgggaccagaaaagttaatcctaaaaagaagagagactaagacattaagatgaggataaaattgtatcagcaaagggtttgagtaaaatgttgtcattacctgctgtgggtcctgtgctctttaaaagaacaagtacataattaaggagaattcttttttttttttttgagacagagtctcgctctgtcacccaggctggagtgccgtggcgcaatcttggctcactgcaatctccgcctcatgggttcaagcaattcctctgcctctgcctcccgagttgctgggattacaggcctctgccaccatacccggctaatttttgtatgtttagtagagatgggttttcaccatgttggccaggctggtttcgaactcctgacctcaggtgatccacctgccttggcctttcaaagtgtggggattataggcgtgagccaccgcacctggccaggaaaaattttaagaataaacaaatacataagtaaaggcagggatcttgaaaaactttaaaaagatttttattttaaaatgatcaagaatataacatataaaacaagaagactaaaaaacagaagagaataagaggaggaccttaaaatctattggatcttagatatggcctcgctaggcaaatcgacccagtggtcgatggctctggggggctgcggttgactttcctgccactcacattaaagatggactacattgctgtgcctgctaggtaacccatcagagctccatgcttcataaatgatagcctaggaattgggactgtcatctctgattgtagtcacttcaagacagtagtgagggaggcaaggcttgctttcggctccctttcatcctcacgtggaacattggaaccacccaatgttcaagatctttctattcccatcatcttccacccactaccctatcagaactttactcactgggcttcatttgctgctctctaactctcagctttaggaaaatagcagctgattggttcctaggtaaaatccatctatatgatgtatctacatagggatggggaaactttcattcaagtatttacctattcatttgctagacacagcttggacatctgcagtgcgtcgggtgctagagatagtatggaacagtctgtgcctctgggagcttgctgcctggtgcatgcaggatgcagttgaataggcagttatagcagagtatgctgcttcccagcacgtgtgcatgctgtttgctctggcagtgcacaggcaggatactttacatagccatgagtgtggtagaaggaaggagaatgtcagcacagccttccaagaaggatttatgcctaagccgaggtctgaagtgttgagttggagtcagctagatgaagtggacagggtccaggtggagaaaacagcatgtgcagaggtccagagacatggagacctgatgtattcaggcagccaacaaccacaacaccattgagttatttagacagggtagagaaccaggaattacaaaagcatcctgaagaacaggcatgttcagtgattgtgtgtgtgatttgactaaaaataatatctgttaaagatcccaccaacatccagcaagatctggggaagaagctttgggagactaacctgggaattgctttgggtaagagtgctgcatgttatttatcatctacgctgattcataacctggcccgggaacaaataatctaaaatgagttccaaacactcaactctttggtggttttatggggactgaaggaccccaaaaccttcaccccttttttacaactttatatctataagtgtgagagctgaagatgttccttagggcttagtcatggagtcatggcttctcagagttgaaaaagcctttaagatacttgagtccagccctccgtctagtactcaaatcaccctgttcatcatctccaataattggtagaacattttggtatgttcttgaaaatctactgtgacaaggagctcattacacactgggacacaaagtttcctatttgtccagtcctgactgtaagaaagttctcttccttatatagaaccaaaattcatctctgaccgtttagtgcaagccctacttattggccattaaaaaaagtgcatatgatgagcagtggtgaagacgatgggtcctgaattaaagtacctgggttatgtagttcagctctgaaatggattggctgtgtgaccctgggctggtcatttcacctgtctgtgcctcagtttactcattcataaaatggataacatcatgacactccatagagttgatatttggagcaattaatgaatacatgtgacctggttacacatagtgagtgttaaatgaactcgaggcattgtgggagttactgttgtatacaattgttacaccccttccttatgacagtccttccaaaattttttaaattgcatgttccccagatcttgtctcttctttcacatgcatttccaactgtgtgcatgacttctcatgaattgtactattaactctctcatcatctgggcaggaccctgtgaactcaagcttgtattagtgtctatcttagagccatattttgaatgtgaggatccatttgttgtgatcagcagagtgggacagagctagcttggcctttgtgctagataatatgcctgcatgaatatagatcgataccatgtctgtttcatagtagcatatcacaccagtcacttgtggaatctattcttactataatacttaaagagttttctcaatatgctgcttcttggcccagtgttgtttcgtataaatgacagtgatctggatgaggagataggaagtgtgcttataatgcctgcccttacaggtgattttggtaagttgaagaactggcagagataagcagcatagagttccctaagatggtttgatagcgctgggtgtggtggctcatgcctgtaatcccagcactttgggaggctgaggccagaggatcacttgagcccgagtttgggaccagcctgggcaacatagtgagacccccatctccacaaaaaaataaaaaagtcagccaggtgaggtggcacacacgtgtagtcccagctacttgggaggccgagatgggaggatcacttgagtctgggaggttgaagctgcagtgagctgtgatggggccactgcactccagcctaggtgacagagcaagaccctgtcttaaaaaaaaaaaaaatttatacgggcccctagaaagaagaaaaatacccatctaaaatttaaatacagggttcgagaccagcctgaccaacatggagaaaccccatctctactaaaaatacaaaattagctgggcgtggtggcacatgcctgtaatcccagcaccttgggaggctgagacaggagaatcgcttgaactcaggaggcagaggttgcgatgagctgagatcgccccattgcactccagcctgggcaacaagaacgaaactccatcacaataaaataaaataaaattaaattaaattaaatacaggggatctggggctaggggaagaaccaggcatttgcagaactgcaaactggtcaggacttgcacgttacactagaaattcagggcccatcatgaaaagagcctaggagaactcataggcattgaaagctggtccccagaatctgggaagttataaaataggggtgaatgggggtgaaggaacttgcattatttgatctacagaggagaaggctaaggtatgctcagaaaatatgtaaacacataaataactgagttatttttataacccggcatttaataactgggttttcatcttagctcagctttaattatggccttctggaatatacaaggctcttacccagactaggaggtatgctttggagtcagacagatctgagttcaaatcctaatgccagcactaactagcatgttccttaacctcttgaagtcagtttcctcatctgtgaaatggagataaaaatagtagttaagctcagactattgtagacttcgatgagataatgtattgaagtactgagcacattgctgtacttagaactcaacaaatggctgaaattatcttttgtcctcttggacagaataagaggacactggttcgaggtgggttataggccaggcacaggtggctcacacctgtaatcccagcattttgggaggccgaggcgggtggatcacttgaggtcaggagtttcagaccagcctggccaacatggtgaaaccccatttctactaaaaatacaaaaattagctgggtgtggtagcacgtgcctgtaatcccagctacttgggaggctgaggcacaagaatggcttgagcctgggaggcagaggttgcagtgagccaagatctgccactccactccagccactgcactcaagcctgggtgacagggcgagactccgtctccaaataaaaacaaaaacaaacaaaaaaacctaaactgggttataacaaatttaggttggtaaaactttcatgaagatgagttaaacacagagatggttcactggagggtgaggtgaaatcaggcctgtaaatatttaatgacaagaaacggaaaatcagcaagtgctcttgagtgttgtgagtagggttctgtctaaatgtgaaaagggactaaatctatcatgttctcagcatgctgcaaaagaggcctccagcaaccagaggcgacatacaggttatctttcaaacaaggcaagaccgccatctgcacttattcatgttagctctagggccctgcacagggtctcacacagcagaaacactcagtaaatagtttctaaatttaatgacttcatatttctaagcattagagttagtctctgctttattccctgactaatagtgaacacatctgtttgtgggatgtgtagctaaaattagcagtggtggagctgactgaatggcccttacagttactagaactatttctgtagccgtgtccctagtaagaagtcccatgcatctgcagatgaatcaagagttcattctcttcccatgtggtagatctggggatttgtcacattcccttcagcggctgctgctgcctcttttaagttttaaacaaaatagaaatggagtctcactgtgtcacccagactggtcttgaactcctggcctcaagtagtcttcccaccttagcctcccaaagtgctgggattataggcgtgagccaccgcacctagttgttcagcttcttctgttacttgaaataagttaaggtcctttaatagtttcacaattcctgagccaggcgccgtggctcacgcctgtaatcccagaactataggaggctggggcaggtggctcacttgaggtcaggagtttgagaccagcctggccaacatggtaaaaccccatctctactaaaaatacaaaatttagccaggcgtggtggtgcgtacctataatcccagctactcaggaggctgagatgagagaatcccttgaacccaggaggcagaggttgcattgagccaagatcgtgccattgcactccagcctaggcaacagagcaagactccatctcaaaaaaaaaaaaaaaaagaagaagaagaagtttcataactcctgaattcagaatcagaagccataatattactgattacattgaggagaaactggtactgaggcgatttatcccttgaaagaacactctggacatgttacaggcatgcgttccagattgcatttcccatgaactaccatattattttgttttaattttaattattttctcttctaattttttcctctttaaaaattgaaatatattttatatatagtcaaatacacagatgttaaatgtccaattttacgagttttgacaaatgcatgtgcccttgaaacccacattgctgtcagaatagacctcttaattcttgttttattattttaaaatttatattgtgtttttatttttttctgtagaaatgaagtctcgctatgttgcctaggctggtcttgaactcctggcctcaagatatcctcctgcctcagtctcccagtatgctagtattacaggcgttatccactgctcccagctgtctctcaatttttgaatcaactagtttcaaaacttctagttctaagagttggcttgctcatgaaccctgggaggtcagggatcagccatctcgtttgtggctgcctccgcagcaccaaacacagtgcctagcacctattttgcaagcaatagataacaatgcatgcgatagatattaagtgagcaagtagatgcaaagtaattctgccctcacttaatttacatagcattgtcaactcatagctctgacatacgctgtggttttccaaaatcttccatgatcatcagttaattttgatgttctttctctgtatgcgtcatgtgtgagtaatagctatgtggactaacaggttcgcacattgtaatagaaacaagtcaacctgcaggcacggtttatatttacgcaatctttattttcagccttttggttgccgtagtcatgcttttttagataaataatttttaaagttctatttggcaattaattactcatgagtaggtggaaatatgaccaggtctgaccaggcacctgcatctgttacatgctctctctgacttcctcaagctctaaatatagtctctgtacagttggtaggattaagcacagtgacattaatttcataactgtgtatcagaatgctgctaaaataaccagcttcctaataggtgggtcttagaaaaagccagcttgactgaagttctcaccgtctcacatttttattttgttgtaggtcatcactccccaaaatggacgttaccaaatagattccgatgttctcctgatcccctggaagctgacttacaggaatattggttctgattttattcctcggggcgcctttggaaaggtatacttggcacaagatataaagacgaagaaaagaatggcgtgtaaactggtatgtgttttctacctagataacccacactgtgtgtttggcattctggcttttgtttttttgtccatttgcattaaccaaaggtttttatcgtttgattgggtcttatctgagggtgcactgcctcaaagcatttgtttttctgaatttattggctacttggggccattcagccctaaaatctctgtttaggtgcatagttgattttaatctagatgattaaaaggataagtgctggtttttaaagcactgatttggataaataacatcatcactcttggagagaagtagagaagagccatcctgcaaagtaggagcaattctctgtgcttctcctttcattccgcccactgcagagggggccaggcagaggcagaaactgggaaggaggtagccttttcaggaaggcagatttaaagggctgaatttaaatacatcaatgattgaaaagaccctatcccaaattttttattattattattattattattattattattattattatttgaaacagagtcttgctctgttgtccaggctggagtgcagtgtcggggtctcggctcactgcaacctctacctcctgggttcaaacgattctcctgcatcagcctcccaagtaactgggattacaggcacctgccaccatgcccagctaatttttttgtattttcagtagagacgggtttcaccatgttggccaggctggtctcgaactcctgactacaagtgatccacctgcctagccttccaaagtgctgggattacaggcataagccaccgcgccctgcccttatcccttcttattaaacaataactgccaaggtgccactactttggaaaactgtatctacataaggtgagcattcacaccccctatgactcaacaattcctctcctgtaggtgcactcactccacagagacctgtccacgtggccaccaaaaactaaaagctatgtggtagcatgttcatatctgcactatttgtaagggtcccaaactagaaacttccaaaatgctgaaatgggatatatttacttagtgaaattctggatagtaaaaagaataaatgatttacaactataataatgtggattaatctcataaccattatgttgagcccaaatagccagacacgaaatgagatctactgtatgagattctatttatataaaggaccaaaacaggcaaaacaaaatctgtgctactggatgtcaggatggtgggtacccttggagagtagcgactggaaggggccaagaggggggcttcttgaatgctagtagacatctgtgtgttttttctggtttgtttttctttttgagacggagtctagctctgtcgcccaggctggagtgtagtggcgcaatcttggctcacctcaacctctgtctcccgggttcaagcgattcttctgcctcagcctcccaagtacctgggattacaggcactcacccccacgcctggcctgacatggtttttcattttgatttagatgggggttacatttgtacgttcagttgataattcattgagttggacccatcatttttacacttttttgtatgtctgttttactttaattaaattttcaaaagtataacaaaataaaatacactcacttttgatttaacaaaaaataaaataaataattgccaaatattatgtcttggtttctcttattgtaataagagagtagctgggattacaggcatgcacaaccaatgcctggcaaatttttgtattttttgtagtaacggggtttcgacatgttggccaggctggtctcgaactcctagcctcaagtgatctgcctgtgttggcctcccaaagtgttgggattacaggcatgagccaccgcccagcctcagtgcttattttaaatacattgctataatagagtatgaactgtggcaacaaacacttcatattatctcacaaccaactgaaatattgaaaatacaacctaaactcaaggtaccatagatactgttgtctaataggtgggaaattatctcttttttgattcattcataattttaaaactttggatagatttctgacttctaaatgaaaagagtaactcattattttgttttttattttcttgttctgaattttatacttaaagctgactaacatagttaaaggcagatctgaggtgaacattattgtaactgggcagtccattttcacacagggcagagtattcttgagggcatttatttgccttttgttttttgcattgacctatattttatatttttaagatgactttggggttatttagaatctcgcttgtatttttgtgttctagatcccagtagatcaatttaagccatctgatgtggaaatccaggcttgcttccggcacgagaacatcgcagagctgtatggcgcagtcctgtggggtgaaactgtccatctctttatggaagcaggcgagggagggtctgttctggagaaactggagagctgtggaccaatgagagaatttgaaattatttgggtgacaaagcatgttctcaagggacttgattttctacactcaaagaaagtgatccatcatgatattaaacgtaagtatctttggacatatacctttttggctcaaagagactagttattcaggagacaaacaagctccttcctgtaatctgaagaccctccatggagggtggaaagctccctcagagcaccgtccgtcttccttctccagagacatatcttagaatcatgcggggttactagagctttcaaagtcataaggaaagattactttcaacagttgttgaaaggttatagctacatacctattaggtactgctctgttaaaaaggcttttaaaattgcaatttaggctgggcacggtggctcacgcctgtaatctcagcactttgggatgctgtggcaagttgatcacctgaagtcaggaattggagaccagcctggccaatgtggtgaaaccccgtctctactaaaaatacaaaaaaaaaaaaaaaatagctgggcatggtggtgggtgctggtaatcccagctacttgggaggctgaggcaggggaatcatttgaatctgggaggcggaggttgcagtgagctgagatggcgccattgctctcccagcctgggtgacaagagcaaaactccgtctcaaaaaaaaaaaaaaaaagcaatttacttaaaaacatacaaacacagagacaagtatttttgagaaacaaatacctttttcattttttataccaatgtaacaataatccattaaacacacctttactaactgttttctaggagtctgatatgatgaggaaataggtaaacctttaatagccagtactaaattagagtggcacaactttcactgggaaaaaagatgggtattttacttttctgttttagaaaagtggcttgacaacagtatgcttatgtcttagagtttgaaattcaagttcttgaacattattaatggctacaatcattcatacccacattggctgtattcttgatggatccaaagtgattttcacctcaactctgaatttcattctcctcttttgaatataatacaaccatctcactagaggaagcatttcagtcttttctgattggagattcattattgttttagataatgttttcatttgacttatgggtatataaaaaattttatcttaaaaatatttcctctcattttagctagcaacattgttttcatgtccacaaaagctgttttggtggattttggcctaagtgttcaaatgaccgaagatgtctattttcctaaggacctccgaggaacagaggtaattatgttcacatgaaaagggttactattttattaagaataaaaaggaaaaaatgttctagaattattgtgggaacgaaggacaaagaaggggaagaaacccactgcattaaatcattattttccttggaacacatttaatgagcacttgctctgtgtcaagtactaagtttagcacttgattttttattgtattttttgctatgttatttataatacataatagtatttgtaatataatatacatgttgatatatataatatagaacatttgtacacaatgtcatgtcaaaatagatcacattggccaggtgtggtggctaatgcctgtaatcccagtgctttgggaggctggggtgggaggatcaattgagcccaggactttgagacaagcttaggcatcatagcaagaccccatctctataaaaaaaaaactggtttaggctgggcacggtggctcaaacctgtcatcccagcactttgggaggctgagatgggcggatcacctgaggtcgggagtttgagacaagcctgaccaacatggagaaaccccgtctctactaaaaatacaaaattaaccaggcgtggtggcgggcacctgtaatcccagctactcgggaggctgagggaggagaatcatctgaactcaggaggcagaggttgaggtgagccgagatcgtgccattgcactccagcctgggcaacaagagtgaaactccatctcaaaaaaaaaaaaaattagctcagtgtggtggtacacgcctgtagtctcagctagttgggaggctgaggtaggaggattgcttgagcccaggagttcaaggctgcagtgagccatgggcattccagcctggatgacagaacgagatgttgcttcaaaaaaaaaaaaagccccccaaaatagatcatatccacagttcggctttattttgtgtgtttttgtttttgtttttgagacagagtcttgctccatcgcccaggctgtaggacagtggcgcatgatctcagctcactgtaatctccacctcctgggttcaagcgcttcttagtctcctgagtagttgagattacaggcatgtgccaccacatccagctaattttttttttttttcagtagagatgcaggtttcactatgttggccaggctggtcatgaactgttggcctcaagtgatcctcccacctcagcctcccaaagtgctgggactacaggtttgagcccccgtgtctggcccacagttcagctttaataataattatagaattagagttaactttataataagtttagcacttaaaaagcagtatgttatttaatccttacaacaacccagttgttgctattgttattcttattttacaatcaaggaaataagtttgcagagattaaaataaagtgtccagagtcactcagtgacagaccctggacttgaacccagttctttctaagtctaaccctaaggtctaactgctacataactttaaaaaattataatattacatacattattaaaatatattagtgatataactaatatcactgagttttggctcaatgacagtcttaactatggtcattaatatttatgaggactctaaaggcctctctttgagcctaggaattctataataaacctcaagtagtgagcataaatgtatcttatttaaagatgtaaaacagcactcatgtttaactcatctgtgaagcaaaaaatgacccagaaaagcctttctttcctgactctaaatgagattctgaaaaatgcgttcgcgggcttccaagtaatgtatttaacattcacatcattaggctgactgggtgattcaattagccagtgtccactgggcatctgctatgtggcaggttcttgtgagcaccaacgaggaagcatgacacaaggcagtgaggagcaagccttagtggtactccagcgatcctcactctttggtgggaggacttactttaaattacctgaattattaaaagagcaaccgtttagggatgggcgtggtgttctcacacctgtaatcccaaccgttcgaaaggccaaggaggtgggggtggtttgcttgagcctgggggttcgagaccagcctgagcaatagagtcagacctcatctcttttgaaaaaaaaaaagaaaaaaagaaggaagggagggagggagagagagaaggaaggaaggaaggaaggaaggaaggaaggaaggaaggagaaagaaaaaggaaggaaggaaagaaaaagaaggaaagaaagaaagaaagcatgcacaacagtttagttcacagttgattgtgatgggcacaaggttggatgcaagcaggaaggtaaatgggtgtaaaagctgcctccttggcccctcaccactaccgggggaagctgcactgcctgagccactcagccccatgcccttctctttgctggaagtgcccataggaaatagagagagggtctttggctgcacctctatgtcaggattaccaggtcagtcttggtgttcaatcagatgacaacccttagtctagtctagctagtatacgtgttgcactgaactggattgcagccacaaaaaaattgtcttcctttcaaaccagattcttccagcctgggcaacatagtgagaccccatcgctacaaaaagtaaacaaacaaacaaacaaaaactttactttttgtaaaaatggcatggtggtgcatgtctgtagtcccagctactcaagagactgaggtgggaggattgcttgagcccaggatgaggctgcagtgagctgtgattatgccactgcacccatagcctggaaaatagaacaagaccttgtcctaaaaaaaaaaaaaacgccaagattctgtaagtcctttctcaactctctcaaagccagcactctcccgggcagcagaagaaatccttgcttttgtgaatattactgaagttattattgaaaatgctcgagcgaggattcttgacggttgtctttgagcagaacaatattcagaagggaagctgtaatttttttttttttttaagaatgcttagtccccagatcttaagaatactttaccaaagtgtgaggtctaataagacttaatgcttacgacatgttttctttggaaaatgtttcagcatatttggcattagtcaggagttcagatatgtaatattccaccaccctttttcctggaaccagtttgaaaaacaaactatttatggtattaaagatggaaaatacttttctcttcctggcaatgtggtgaagttgaacattttgcaacattggagaaagaagtgttctttctggggctgtctagcggaatgcatggatatgagataataacatattttactcctgagtagtatttggatcaggttttttttggcaaatgcaaattgctttttgtgaagtgcaaaactgagccttggtgtttataaatataaactctcttctaatcagcctgcatttaatatctgcctagtacacacgagttgaagtttgataatgaacaaagttgtgaagtgaccagtgaaacctttcaacaagcttgcttttacccttcctacttaaagagccaggagatctaattagtcaactgtgcagactggctgatgttagaatttgatcatgtggctactgcacagtcatagacaatttctgatttctgcagtatagctcccaaatgcaaaccctggttacccctgtttgattgctctctctaagcattggtattcagagcattctattgtaaccatgtaatacacatccagggttaatccagcatatacagaatagactgtttttgagttgcaaggtacagagagagaatacatagtgaatgcgaataacaaatcagaattacttttagaacttggtcctttttgaaaaatccttctaagtctgcttggttttacctttgtaagttaacatatagtcatcacatgcacatatacgcacacacacggtctctttccctttctaataaacatattgaaaggtgaagggttcgatcgctgacatcaaggttttctcttgctccagtgccctgccccgagggtgcagaactctcagagagccctgtgttggtcccaccagggctgtttcatgccttctaatcagccagagtgctcgaacattatgccctgctgctccctgatctaactggtagttggtagagcttgaggaacaagagctccgagccaggaagctctggggtttctacctgagtggcagcacccaggccaccaggcttacagatgttccatccccccaggctgcctaggcgtgcagtcacatagaacctgcagagccacctctgcacaacccctgtgggctacaccagcagtgggcactccgcccaatccttgctttattggcagggaggagggggtacaggagagaagataggcatcctctatggacagttaataatacccattgcatttctttttcttttttatttgattgtggtaagaacacttagcatgaactctaccctctcaacacatttttaagtatacaatacactattgttgactataggtacaatgttgtgcattaattttttaagtttgtgatatatttagtagcaaagtccttctggaaagtcctctggctctgctgcagggaaagcttgagaacgggagctcagtttcacctgtttgctgagagcaaaaggaagctggcccggaagtggcttgcaggaaggagttgagcagggttagggtggggagactgggcagtttctctggtttttgtaagctagttctctaattacttaccctgaaatgtgttccggaaacactgacctccattctcttattcacatggcagacagtgtacaagctgtttcaagcgaaatactgataatcaggatattaactactatatgtctgcaccagccatgaatacaaatcactggtcaccagtgtttgctctgttcctttttaaaaaaatgtttaattaaattaggtaactaattaatttgtaaagatggggggtctccatcttgtccagactagtctcaaactcctgggctcaagcaatcttcctgcctcggccttccaaagtgctgagattcagtggctcacgcctgtaatccccacactttgggaggccgaggcaggtggatcacgaggtcaggagttcgagaccagcctggccaacatggtgaaaccccatctctactaaaaatacaaaaattagccaggcgtggtagcacatgcctgtaatcccagctagttgggaggccgaagcaggagaatagcttgaacccgggaggcagaggttgcagtgaaccgagatcgcaccattgcattccagcctgggtgacagagggagaccccatctcgaaaaaaaaaaaaagccaaagtgctgagattatagacatgagccaccatgccccacctctctttgtttctttcttaagtttagaaataaatgctcgttagagaaactatttataaaaccagccctgtttattcagcatggactcatgagaccaaatataacttatacaatgttaatatggctgcatttaatatttagtcactgggctacatagtaggtaaaaataacagatagtttgtaaaaatgactctttagaatcacttctacaatattacactttattttttaagtttttccctttcaagaaatttgtgttaataccctatagacttctatcaccttttatcattgcagatatttagaaggttagcagtgtaatgacaaacagataaagaagtctgtttgtagttcatttaaatataaaaggaattggcgttttagttgaaaacttagctacacctgatcagtgtactgcagaactttgatgagtgggagtccctgatagattcctggttctaggctctttgccaccagatcaaccagaaaaaggtggtgttttgttttgttttgttttgttttttgagactgagtctcgctctgtctcccaggctggagtgcagtggtgcgatctcggctcacagcagcctccgccttccgagctcaagcgattctccttgcctcagcctcccaagtagatgggattacaggtgcccatcaccatgcccagctgatttttgtatttttagtagagaccaggctggttttgaactcctgatccgcccacctcagctgggattataggtgtgagccaccgcgcccggccaggtgttcttcatcagactgcagggacacctccagcaattgctgcatggttcctggggaatgcctgcattattctcctagtttaaggcaaatgagccaatttccagaactggattagggaaatggaaacccacacaaaggaggggaatgaagctgaatgtttcccacttctttttcagatttacatgagcccagaggtcatcctgtgcaggggccattcaaccaaagcagacatctacagcctgggggccacgctcatccacatgcagacgggcaccccaccctgggtgaagcgctaccctcgctcagcctatccctcctacctgtacatagtaagtggggttcaaccagggctgggggcggcgggggggggcgttgagttatgcatcccgcaggcttgggagggactgctctgccttctataccacccccatctgaatgaggcaatggtgaaatgacaggtagctacaagttcttcccatgtagaagcaagctccattcttgcaaagaaaacatagctattttagtgggagcttactaaaatgtgcattgggcataatttatgctattccattgtatgtgtaataatgcaacactacttagtagcatcagagtagcataaatatttcagcaaaggaagttgtatgtgttctttgaacagttaaaacattttttattattaatgttcacaccagtgtggcttgtagtggaacatgcaattcccattttactgttgataaattcaggagcagacacttccctgttactgcacagtgacttttgggacactgatttgaagctgtcactgacattcaaacctatcacttatcttttgtaacattaaatcagaagatgggtttaacctggtatcctttagaaattaaagtgggccaagcacggtggctcacgcctgtaatctcagcactttagaaagccaaaacaaaaggatctcttgagcccagaaattcaagaccagcctgggcaacaaagcaagaccccatcgctacaaaaaattaaaaaaattagctaggtgtggtggtgtatgccctgtggtcccagttgcatgggaggctgaggtgagaggatcacttgagcccaggagttcgaggctacggtgagttgtgttggtgccactgtactccagcctggatgacagagcaaagaccctgtctcaaaaggaaaagaaaaaagaaattaaagggaagcttgcttgcttaagggctgaactgcattcgttgcagggcatgtggtggaaaacggattactttctaggtcctggtactagcatgcttttgctgttgagggtgtatcaccatacctttgatgctaagagagctggtttgttgatagatccacaagcaagcacctccactggaagacattgcagatgactgcagtccagggatgagagagctgatagaagcttccctggagagaaaccccaatcaccgcccaagagccgcagacctactaaaacatgaggccctgaacccgcccagagaggatcagccacgctgtcagagtctggactctgccctcttggagcgcaagaggctgctgagtaggaaggagctggaacttcctgagaacattgctggtagggacaccctgctgtgtgccgcacacttacttcccttctctttctgtccacatcaaacctctgatgtagttcatgaaagcacttggaaaaaaaggaaatgacttcttgagtaccataccttgcttgagaaatttcagcaagattagcagaagcatgtttttttttttaaattggctaatttagcaccaaattataacagattttcagtgcaagtgtaggtagcacagtcactggaaaatgcttctgacttgcttttttgcaacttgcttttttacaacttttgtctttgaaaacagattgagcatgacagctttgcagttggttcttcttaactcactttttttttctttttttttgagatggagtcttgctctgttgccgaggctggagtgcagtggcatgatcttgggtcactgcaacctctgcctcccgggttcaagtgattctcatgcctcagcctcctgagtagctgggattacaggtgcccaccaccacgtctggctaatttttgtatttttagtagagatggggtttcaccgtgttggccaggctggtctcgaactcctgacctcaggcaatccacctgccttggcctcccaaagtgtggggattacaggcgtgagcaaccatgcccagcctaactcatttatattaagccaccccagtccttggtgggggaacatcatggcactgccctgcacagataaaatactcagtttgaagtcaacttgcatttccatcttccttggcttaaaatcttgccagttgtaaatttttcccacttaggaaagtcagtatgctttccaggagcattgaatatgcataaagagggatttccatttttattaaaagtctgtggcattcttaatccatttaggtccaaaccgagatgtcaagcctggtgcgcttgtttatatttctttgctgcttgtctaacttttgtgtatttaaagagagcaatctggctgttggaaaaatatgccaggatttctaactaatttcttgtctccattgactcctgtttgaactttttgttctatgtcatattatgtgaacttagccatagtgttcaaagacccatctttcacgcttaagacactgttttattaggccccaaagatttatttcactgcagaaggaacaggtatttatcatttgacacgttttcttgttacttactttgtaatgttttccttttcagattcttcgtgcacaggaagcaccgaggaatctgagatgctcaagaggcaacgctctctctacatcgacctcggcgctctggctggctacttcaatcttgttcggggaccaccaacgcttgaatatggctgaaggatgccatgtttgctctaaattaagacagcattgatctcctggaggctggttctgctgcctctacacaggggccctgtacagtgaatggtgccattttcgaaggagcagtgtgacctcctgtgacccatgaatgtgcctccaagcggccctgtgtgtttgacatgtgaagctatttgatatgcaccaggtctcaaggttctcatttctcaggtgacgtgattctaaggcaggaatttgagagttcacagaaggatcgtgtctgctgactgtttcattcactgtgcactttgctcaaaattttaaaaataccaatcacaaggataatagagtagcctaaaattactattcttggttcttatttaagtatggaatattcattttactcagaatagctgttttgtgtatattggtgtatattatataactctttgagcctttattggtaaattctggtatacattgaattcattataatttgggtgactagaacaacttgaagattgtagcaataagctggactagtgtcctaaaaatggctaactgatgaattagaagccatctgacagcaggccactagtgacagtttcttttgtgttcctatggaaacattttatactgtacatgctatgctgaagacattcaaaacgtgatgttttgaatgtggataaaactgtgtaaaccacataatttttgtacatcccaaaggatgagaatgtgacctttaagaaaaatgaaaacttttgtaaattattgatgattttgtaattcttatgactaaattttcttttaagcatttgtatattaaaatagcatactgtgtatgttttatatcaaatgccttcatgaatctttcatacatatatatatttgtaacattgtaaagtatgtgagtagtcttatgtaaagtatgtttttacattatgcaaataaaacccaatacttttgtccaatgtggttggtcaaatcaactgaataaattcagtattttgccttagttgttgtgaagcctgtgattctcagctgggactgaggatgggctataggagttgagttatagattggaaggaaatgtgtatcataagaaggcaaaaaataccaggagctttgcaaattgtattaatacactccttttctattgctcttgtatgaagctattgtcagctggaatggtttgcatcccctggtacattgaggtagaaaaaacaattgtggttgtgccctgtaatcccagcactttgggatgctgaagcgggaaaactggttgagcccaagagttcaagaccagcctggccaacatgatgaaatcccatctctacaaaaaatacaaaaatttgccaggtgtgatggtgcatgcctgtagtcccagctactcaggtggctgagatgtgaggatcacttaagcctgggaggcgaaggttgcagtgagccaagatcatgccacactacactccagcctggataacagagggaggccttgtccctgctaaaaataaaataataattgtgtgccactggtttagggttatgtggttctattttgcaccctgtttttatatatttatactatccttgaatacacgcttgcatactctttgcccattgttatgtggcaagctaataactagccattgtagaaggtggctttaactcacatacatcaactctagtgaaaactgttgaatggaagtctgtcatctacatagcaaatagtattaaacacttttacatgtgttgtgtaaaacatgccatcccttgtaatccatgtaaacacacatgaaatatgcattgctacctcttttttctcagagaaggaaattgaggcatagtgagggtaagtaacgttatcctcaagaccgcaaagcaagtgaagaaacagctggtatttaaacccagtcctttctggctccagtacacatgttctccctcgtacgttgctgcttgtaagtgagagatcaacactgcagaggaaacaatttccttttctgcccctctggtaagggcagaggcagactgaccatgaagctaatgaagcttcagcctcagggctcctcacttgcatgggcccctccatagccctgtgcctgattttttttaatgtattttttatttcagtgacttttggagtagaaggggtttttggttacatgaatgagttatgtagtggtgaattataaaacttcaatggacccatcacctgagtagtgtatgttacactcaatgtgtagtttttcaccccacacacctccccccctttattttattttttttgagaaggagtctcactctgtcacccaggctagagtgcggtggcatgatcttggctcactgcaacctccgtctcccaggttcaagcaattatcatgcctcagcctcgataatcccagtagctgggattacaggcatgcaccaccatgcccagctaatttttgtacttttagtagagacggggtttcgccatgttggccaggctggtctggaactcctgacctcaaatgatctgcccaccttggcctcccaaagtgctgggattacaggtgtgagccactgtgctcagccccaccctcccccattatttcactctgtatgcctttgcgtattcatagcttagctgcctgtgcctaatttcatatcaccctagatcaggcccaacaaaacttggacctgctcttggttaaaggtatacagcttttgataattttcatgagatactcacatagtcaatatgaattgagttctagttaacaaattccatttggagaa

SEQ ID NO: 25002 - DNA, 1497 bp, Homo Sapiens
atggctcaaggatccggggatcaaagagcagtgggggttgctgacccagaggagagttctccaaacatgatcgtttactgcaaaattgaagacatcattacaaagatgcaagatgacaagacagggggtgtgcccatcagaacagtcaagagctttctctccaaaatccccagtgtcgtcacaggtactgacattgtgcagtggcttatgaagaacctttccattgaggacccagttgaagcaatacacttggggagccttatcgctgcccagggctacatctttccaatctcagaccatgttctcaccatgaaggatgatggcaccttttatcgtttccaggctccgtacttctggccttcgaactgctgggaacctgaaaacactgactatgccatctatctctgtaagaggacaatgcaaaataaagcaaggctggaactggcagattatgaagcagaaaacttagcaagactccagagggcctttgcgaggaagtgggaattcatctttatgcaagcagaagcacaagtaaagattgaccggaaaaaagacaagacagaaaggaaaattttggatagtcaagaacgagccttttgggatgtccacaggcctgtgccaggctgtgtgaacacaacagaaatggatatccgaaaatgtcgacgtttgaagaatccacaaaaggttaaaaagtccgtgtatggcgtgactgaagagtcccaggcacagagcccggtgcatgtactcagccaaccaatcaggaaaacaacaaaagaggacatccggaaacagataacatttttgaacgcacagatcgacagacattgtctgaaaatgtccaaagtggctgaaagtttaattgcctacacggaacaatatgtggaatatgaccctttgataacaccagctgagccatccaacccttggatcagcgatgacgttgctttgtgggacatagagatgagcaaagagcccagccaacagcgagtaaaaagatggggcttctctttcgatgagatattgaaggaccaggtggggcgggaccagtttctacgattcctggagtccgaattcagttcagaaaacctcaggttctggctggctgtccaagatcttaagaaacaacccctacaggatgtggccaagagggtagaagaaatctggcaagagtttctggctccaggggctccaagtgcaatcaacctggattctcacagctatgagataaccagtcaaaatgtcaaagatggagggagatatacatttgaagacgcccaggagcacatctacaagctgatgaagagtgacagctatgcccgcttcctccggtcaaatgcttaccaggatttgctgctggccaagaagaagccagaaagtgagcaaggtcgtagaacttccctagaaaagttcactcgcagtgtgtgtctgcagcttctcttctagggatgaaaatgcaaaaaagagcaagcggctccctctgcagaaggtgcaccctgg

SEQ ID NO: 25003 - DNA, 4448 bp, Homo Sapiens
cctccttccccaccgactttcttgttttgattaactccgtggactcctgactctttcttcgcccggaacatcaatatgtgtcatgtcattgtcacctgtcgctcgatgctctggaccttgctgagtattgtggtggcttttgccgagctcattgccttcatgagtgcagactggctgatcgggaaagcgaggagccgcggcggcgtggagccggcgggcccgggcgggggctccccggagccctaccaccccaccctgggcatctacgcccgctgcatccggaacccaggggtgcagcacttccagcgggacacgctgtgcgggccctacgccgagagcttcggcgagatcgccagcggcttctggcaggccacagctattttcctggctgtgggaatctttattctctgcatggtggccttggtgtccgtcttcaccatgtgtgtacagagcatcatgaagaaaagcatcttcaatgtctgtgggctgttgcaaggaattgcaggtctattccttatcctcggtttgatactctaccctgctggctggggttgccagaaggccatagactactgtggacattatgcatctgcctacaaacctggagactgctccttgggctgggccttttataccgccattgggggcacagtcctcactttcatctgtgctgtcttctctgcacaagcagaaattgcaacctctagtgacaaagtacaggaagaaattgaagaggggaaaaatctgatctgcctcctttagtttggaagagacaatgccattttctcccttgagtaatcttgtgaaacagtccacagtttcatcatttgagtcaagtggagaactaacctttacctaccaaagccacgttccacggcccgaggcttaaacaggaccaatgagaggccacatccagctacgcaaagttactggacatgcggtctgcagtgcacattataaggaatggaacatgaaaatagtatataatcctagacctggagttgccaagttctgtcagactccatctcccccaggttcaatgaaggataataatctaaatcattagggcagcagtttctctggtaacggaagagaccgtccgccagatctgcaggctgtttctgctccaacactgcttgcttgtgagcatctctgcctcagaatggggttttgggttggagttcttgttttcctctgttctttcaagttgtctccaacgaacagaaaactataaacttactggggacaggatgtgtgctaaagggcacagcaagacactgtcttttgcttagctgaccaaaggggtcagcagggatggcgtggagtcatgctgtggaacttattctaggctgaatcctagggtaaggtggatcaactgaactgtcactccagagattttagaaatttgagtaaagaaacaataaggacctatacaatcatatgagaacaaaaatatgaaatcttgctagtgaagacgtattttttcttcttcccagcagccaggctagcaccagttctggcccagtctcctcttcttctggagatcacatgtttttcttctaaggttaggattgtgctttgactgcgaaaggaaacctcactgtttcctccttccagggactgaggtctccaagctagctgtggcttatgcagatgttcactgggaggacctgccagaatctcggcacttggggggagacctttactcccagtttggtgaccatgctgtagtcagctctatttccaatcccgacagtagcagaatggcattctacaacaaaaagaagctagttatgggagttaagtttttgtagttactggtgttgatcctgaaagcagactgagataacattaaattgctgcaactgaagaactgcagccaagaccttaattccaggaaagcacagaggacaaagttaattcaaaaagaggcgctagatcaaggtcacagcactgcctacacctgtttacaaaaagaatcaaataccactatgaataaggattcaggggtttttaatctactttccataaattaccaatatcactgattcaggaagatagtatctcagaatgaccagagcagcacagaaacaagctactctgacattatgggagcttcaaaattgtatcatgatacagaaacactccttagcactttaagaaagtgagatggaactgccagatttctggaaggagaaaaagtgtaggtatttgggttcattaatctgctcacttgaggactttgttttgaaaaagtaccttctgtggacaaggtattgtgctaccagctatacaaccctgacttcagagtttgcaaccttgccctgagtgaatcatgttaaagctgtctgagtctaaagcaccgtatcttggtgcagaacagataattatacagagatggaatgggacaaccgcagttttactacattctggtgtttggcctatatgagaaaccatcttctcacagattaagggctaagggcaaaaggggtgggaggtgtggaactagccttaatgagtttcccattcctgaaccaaaattcaaagtgagtgagatgtaaatcctgtgattttggtgaagaaaaaaacgggtatcttcatagcagcctaggaaaccttaaccatatctctaacaccacacagaaagaggctggaggagccactggacaaagcttctgtctctgtgtgtacatttataatgttctaaccaagtctcaaaccttgatgaaaaacacaaaatttttccataaacttatcagaagactcacttttctttctttcttggatagagaaaccattttctgacactaggtttacaatctcagtgtccttacaagttaagtcctaagctcacaggatcctccgagcatgtccatcacctgctctttggctaaggtggcagtgtacctctagatcaacctgggaacagtcacaagggagtgtgacttcttggccataataaactcactcgatagtgtttatgttattaatctgaatgcaacagaagacaaaagcacaggcatgcacacacacagaaccccaaaccactaaaaactacctaaacactgacttagtaaatagtaaaaaggtaatgttgggacttttaaaccttgaatccattagccaggcttgggatgaaaggaccatctaaaatcatgctagtctaaaccatgctcttccacacagctgtttaaaaaccactgggtatgaggaatatgctagaaagaaatgttaaaaatagattgttggctcacacttatttttctaataaataggaccattattactaccaggaaagtcttatttattttgcctgaaattggcttaaagaaagtctcatgacgggatgggatgggctgcgcttctcaatgaactctgaggcagaaatatttgccttggattctgtggattctttaaacctgtgtgctaataattcaaacaatgttgcattaattgtataagggtttttgtatagttttcaaacatctgtggtgtaatgatctttgttaaacatatattctgtaaagtgccatagtctttttttatgtgtagcatatttaaaaatatatatgtatattatacatacacaagtttgtgtgaaagatgtgcaataacaaaggtgtatgtatgttttgttgttttgttttggaaactggacaggagtcaaaacagggatgtttgtttctgttttggcaaggagagttccacatttttgccttcatggcttattcagtaacccataattttaatgctacacaaatcttatgtgaagaaaagactggtatgaaatcattttttcctgggtctaaaataatcgctagtgttatgtcaaagttaagcccgcacgccaggcccagttaatgctagtctttcatgtgaaatgtgaagctgccatgttgccttttctcttagtaggataactagtagctggtacataatcactgaggagctatttcttaacatgcttttatagaccatgctaatgctagaccagtatttaagggctaatctcacacctccttagctgtaagagtctggcttagaacagacctctctgtgcaataacttgtggccactggaaatccctgggccggcatttgtattggggttgcaatgactcccaagggccaaaagagttaaaggcacgactgggatttcttctgagactgtggtgaaactccttccaaggctgagggggtcagtaggtgctctggagggactcggcaccacttgatattcaacagccacttgagccaaatataaaattgtatttacagctgatggactcaatttgagccttcaaacttgtagttatcctattatattgtaaactaatacattgtctagcattgatttggttcctgtgcatatgtattttcactatgtgctcccctccccagatcttaattaaaccagattttgcaattcaaaaaaaaaaaaaaaaaaaa

SEQ ID NO: 25004 - DNA, 4760 bp, Homo Sapiens
ggggcagcagcaggcctgccgggcccagcgcgagctcctctccactgtgcaccatggtccagcggtggctgctgctgtcctgctgcggagccctgctcagcgctggtctggctaacacctcctacaccagcccaggcctccagaggctgaaggactctccacagacagccccggacaaaggccagtgctccacgtggggggctggtcacttctccaccttcgaccaccacgtgtacgacttctcggggacgtgcaactacatcttcgcggccacctgcaaggacgccttccccagcttcagtgtccagctgcggcgaggcccagacgggagcatctcgcggatcatcgtggagctgggggcctccgtcgtcactgtgagcgaagccatcatctcagtcaaggacatcggggtcatcagcctgccctataccagcaatggactccagatcacacccttcggccagagcgtgcggctggtggccaagcagctggagctggagctggaagtcgtgtggggtcctgacagccacctcatggttctggtggagcggaagtacatgggtcagatgtgcgggctctgcgggaactttgacgggaaggtgaccaacgagtttgtcagtgaggagggcaagttcctggaaccccacaagtttgctgccctccagaagctggacgaccccggcgagatctgcaccttccaggacatccccagcacccacgtacggcaggcccagcacgcccggggctgcacccagctgctgaccctggtggcccctgagtgcagcgtgtccaaggagcccttcgtgctaagctgccaggcggacgtggccgcagccccccagccaggcccacagaacagcagttatgccaccctgtcggagtactcccgccagtgcagcatggtgggccagccggtcgcgctgcggagccccggcctgtgctccgtgggtcagtgcccggccaaccaggtgtaccaggagtgcggctcggcctgcgtgaagacctgctccaactccgagcacagctgctccagctcctgcaccttcgggtgcttctgcccggaaggtacggacctgaatgacctctccaataaccacacctgcgtgcccgtcacccagtgcccctgtgtgctccacggcgccatgtatgcccccggggaggtcacaatagctgcctgccaaacctgccggtgcaccctgggccgctgggtgtgcacggagcggccgtgccccggacactgctccctggaaggtggatcctttgttaccacatttgacgccaggccctaccgcttccacggcacctgcacctacatcctcctccagagcccccagcttcccgaggacggtgccctcatggctgtgtacgacaagtccggcgtctcacactccgagacctccctggtggctgtggtctacctctccaggcaggacaaaattgtgatctctcaggacgaggtggtcaccaacaacggagaagccaagtggctgccatacaagactcgcaacatcacggtcttcaggcagacgtccacccacctccagatggccaccagcttcgggctggagctcgtggtccagctgcgccccatcttccaggcctatgtcactgttgggccccagttcagaggtcagaccagagggctctgcggcaacttcaacggggacacaacggatgacttcaccactagcatgggtatcgccgagggcaccgcctcgctgtttgtggactcctggcgggcggggaactgtccggacgctctggagcgtgagactgacccctgctccatgagccagctcaacaaggtgtgtgcagagacccactgctccatgctgctgaggacaggcacggtgttcgagaggtgccacgccacagtgaaccctgcacccatctacaagaggtgcatgtaccaggcctgcaactacgaggagacctttccccacatctgtgccgccctgggcgactacgtacacgcctgctccttgcggggcgtcctgctctggggctggagaagcagtgtggacaactgcaccatcccctgcacgggtaacaccaccttcagctacaacagccaagcctgtgagcgcacctgcctgtcgctgtcggaccgtgccaccgagtgccaccacagcgccgtgcccgtggacggttgcaactgccccgatggcacctacctgaaccaaaagggcgagtgtgtgcgcaaggcccagtgcccgtgcatactggagggttacaagttcatcctggccgagcagtccactgtcatcaacggcatcacctgccactgcatcaacgggcggctgagttgcccgcagcggctacagatgttcctggcctcctgccaggcccctaagaccttcaagtcctgcagccagtcctccgagaacaagtttggggcagcctgtgcccctacatgccagatgctggccaccggtgttgcctgcgtgcccaccaagtgtgagcctggctgtgtctgcgccgagggcctctacgagaatgcctacgggcagtgtgtgccccccgaggagtgcccatgtgagttctcgggggtctcctaccctggaggtgctgagctccacactgactgcaggacctgctcctgctcaagggggaggtgggcctgtcagcagggcacccactgcccatccacctgcaccctctacggggagggccacgtcatcaccttcgacggccagcgcttcgtattcgacggcaactgcgagtacatcctggctacggacgtctgtggtgtcaactactcacagcccaccttcaagatcctgacagagaacgtcatctgtgggaactccggggtcacatgctcacgggccatcaagatcttcctggggggcctgtccgtggtgctggcggacagaaactacacggtcaccggggaggagccccacgtgcagctcggggtgacgccgggtgcgctgagccttgtcgtggacatcagcatccccgggaggtacaacctgacgctcatctggaacaggcacatgaccatcctcatcaggatcgcccgtgcctcccaggatcccctctgcggcttgtgtggcaacttcaacgggaacatgaaggacgacttcgagacgcgcagcaggtacgtggcatccagcgagctggagttggtgaactcgtggaaggagagcccgctgtgcggggacgtgagcttcgtgacagacccctgcagtctcaatgccttccggcgctcctgggccgagcgcaagtgcagcgtcatcaacagccagacctttgccacctgccacagcaaggtataccacctgccctactacgaggcctgcgtgcgcgacgcatgtgggtgtgacagtggcggggactgtgagtgtctgtgcgatgccgtggctgcctacgcccaagcctgtctggacaagggtgtgtgcgtggactggaggaccccggccttctgccccatctactgcggcttctacaacacgcacacgcaggacggccatggcgagtaccagtacacacaggaggccaactgcacgtggcactaccagccctgcctctgccccagccagccacagagcgtcccaggcagcaacatcgaaggctgctacaactgctcccaggatgagtacttcgaccacgaggagggggtgtgcgtgccctgcatgccgcccaccacgccgcagccacccaccacgccgcagctgcccaccacaggctcacggcccacgcaagtctggcccatgacgggaacctccaccaccatcgggcttctcagctccaccggaccctcacccagctctaatcacacccctgccagccccacccagacacccctccttccagccacgctcacatcctccaagcccacagcctcctcgggagaaccacctagaccaaccacggccgtcaccccacaagccacatcagggctgcctcccacagccacactgagatcgacagccacaaaacccacagtgacccaggccacaaccagggccacggcatcgaccgccagcccagccacgacgtccacagctcagtccacaacacggaccacaatgacactaccaaccccagccacatcagggacaagccccacgctgccaaaatcgaccaatcaggaactgccaggaacaacggccacccagacgacaggcccacgtccaaccccagcaagcaccacaggcccaaccaccccacagccaggacaacccacgaggcccacagccacagagaccactcaaacaagaacgactactgaatacacaacgccccaaaccccacacaccacacactccccgcctacggcggggagtcccgtcccttccacaggtcctgtcactgcaacatctttccatgccaccactacctatccaaccccatcacaccctgagaccacacttcccactcacgttccacctttctccacctccttggtgactccaagtactcacacagtcatcacccctacccacgcacagatggcctcatctgcctccaaccactcagcgccaacaggtaccattcctccaccaacaacgctcaaggccacagggtccacccacacagccccaccaataacgccgaccaccagtgggaccagccaagcccacagctcattcagcacaaacaaaactcctacctcgctacattcacacacttcctccacacaccatcctgaagtcaccccaacttctactacctcgattactcccaaccccactagtacacgcaccagaacccctatggcccacaccaactcagccaccagcagcaggccacca

SEQ ID NO: 25005 - DNA, 1536 bp, Homo Sapiens
gccctgaccatcttgccaaacaagtctctgctcatgaggccccacaggatgaacgagccgaggcaggacagtgtcctgccctgtcggaacagtgactgctgacctgccaagagagagctggggactgcctgctgtctgccagtacaatgaaggaagtggtttattggtcacccaagaaggtggcagactggctgctggagaatgctatgccagaatactgtgagcctctggagcatttcacaggccaggacttgatcaacctaacccaagaggatttcaaaaaaccccccttgtgccgagtctcctctgacaacgggcagcggctcctggacatgatagaaaccctgaaaatggagcaccatttggaagcacacaagaacggccatgccaatgggcacctcaacattggcgtagacatccccacccccgacggcagcttcagcatcaagattaaacccaacgggatgccaaatgggtataggaaagagatgataaagatccccatgccagaactggagcgctctcagtaccccatggagtggggcaagacttttctggcctttctttatgcactttcctgtttcgttctcaccacagtgatgatctcggtcgtccacgaacgagtacctcttaaggaggtgcagcctccactaccggacacattttttgaccattttaaccgggtgcagtgggccttttctatttgtgaaattaatggcatgatccttgtaggactctggttaattcagtggctgctcttaaaatacaagtctattattagcagaagatttttctgcatagttggcacgctgtacctgtatcggtgtattacaatgtatgtaactacactcccagtacctggtatgcatttcaactgttctccgaagcttttcggagactgggaagcccaactgcgaagaataatgaagctcattgctggaggtggcttgtctatcactggctctcacaacatgtgtggggactatctgtacagcggccacacggtcatgctaacacttacctacttatttatcaaagagtattcccctcggcgactctggtggtatcactggatttgctggcttctcagcgtagttggaatcttctgtattctcttagcgcatgaccactacactgtggacgtggtggtggcatattacatcaccacgagactcttctggtggtatcacactatggccaatcagcaagtgctaaaggaagcttcccagatgaacctcctggccagggtgtggtggtacaggccatttcagtactttgaaaagaatgtccaaggaattgtacctcgatcttaccattggcctttcccctggccagtagtccacctcagtaggcaagttaaatacagccggctggtgaatgacacataacagctgtacaaagtggggaaaagacaaattgtccgaagtgctaagaactccatgagagaagatgccataaaataaacacctccctaatcctattatctttcaatggttaccttgacttaacctattgagttacctggtcagcactgtg

SEQ ID NO: 25006 - DNA, 3559 bp, Homo Sapiens
gggaaagaaagaaagagaaaaaggagggcgagtggcgagcaggggcctcggccgccacccacacgccccgaagcgtgctcgtcccccgcgcggggctcccggccgccgccctcggccatcggctgctccccggtggcccaggcctcggactccgcggccggcccggcgcggcccagcgccctcagggatcatggcccaggtagcagtgtccaccctgcctgttgaagaagagtcctcctcagagaccaggatggtggtgacattcctcgtgtctgccctcgaatccatgtgtaaagaactggccaagtccaaggcagaagtggcctgcatcgcagtgtacgaaacagacgtgtttgtcgtcggaaccgagagaggatgcgcttttgttaatgccaggacggattttcagaaagattttgcaaaatactgcgttgcagagggactgtgtgaggtgaaacctccctgccctgtgaacgggatgcaggtccactcgggcgaaacggaaatactcaggaaggcagtggaggactatttctgcttttgttatggtaaagccttagggacaacagtgatggtgcctgttccctatgagaagatgctgcgagaccagtcggctgtggtagtgcaggggcttccggaaggcgttgcctttcaacaccctgagaattacgaccttgcaaccctgaaatggattttggagaacaaagcagggatttcattcatcataaatagacccttcctaggaccagagagtcagctgggtggccctgggatggtaacagatgcggagagatccatagtatcaccaagtgaaagctgcggccccatcaatgtgaaaactgaacccatggaagattctggcatttcactgaaagcagaagctgtctcagtcaagaaagaatcagaagatcctaattactatcaatataatatgcaaggaagccacccttcttccacaagcaatgaagtaatagaaatggaattaccaatggaagattccactccgctggtcccttcagaagaaccaaatgaggaccctgaagccgaggtgaaaatcgaaggaaacacaaattcatccagtgttacaaattctgcagcaggtgttgaagatcttaacatcgttcaagtgactgttccagataatgagaaggaaagattatcaagcattgaaaagattaaacagctaagagaacaagttaatgacctctttagccgaaaatttggtgaagcaattggcgtggatttccctgtgaaagttccctacaggaagatcacattcaaccctggctgtgtggtgattgatggcatgcccccgggggtggtattcaaggcccccggctatctggaaatcagttccatgaggaggatcttggaggcagctgagtttatcaaattcacagtcatcaggccgcttccagggcttgagctcagtaatgtgggaaaacgcaagatagaccaggagggccgtgtgtttcaagaaaagtgggagagagcgtatttcttcgtggaagtacagaatattccaacatgtctcatatgcaaacaaagcatgtctgtgtccaaagaatataacctaagacgccactatcaaaccaatcacagcaagcattatgaccagtatacggaaagaatgcgtgacgagaagcttcacgagctgaaaaaagggctcaggaagtatctcttaggctcgtcagacaccgagtgtcccgagcaaaaacaagtgtttgcaaacccaagtccaacccagaaatcccccgtgcagcctgtagaggacctagctgggaacttatgggagaagttacgtgaaaaaatcaggtcttttgtggcatattctatcgcaatcgatgagatcacggatataaataataccacccagttggccatattcatccgtggtgtcgatgagaatttcgatgtgtccgaagaacttctggacacggtgcccatgacgggtacaaaatctggcaacgagatctttttgcgtgttgagaagagcctgaaaaagttctgtatcaactggtcgagattagtaagcgtggcctccactggcaccccagcgatggtggatgccaataacgggcttgtcacaaaactgaagtccagggtggcgacgttctgcaagggtgcggaactgaagtccatctgttgtataattcatccggaatcactctgtgctcagaagttgaagatggaccacgtcatggacgtggtagtgaagtccgtgaactggatatgctcccggggactgaaccacagcgagttcacaaccttgctctatgagctggacagccagtatggtagcctcctgtactacacggagattaagtggctcagtcgcgggctcgtgctaaagagatttttcgaatccttggaagaaatcgactccttcatgtcatccagagggaaacccctgcctcaactgagctccatagattggatccgagacctggccttcttggttgacatgacgatgcatctgaacgctttgaacatctctctccaaggacactcccaaatcgtcacgcagatgtatgacctgatccgggcgttcctagcaaaactgtgcctctgggagactcatttgacgaggaataatctggcccactttcccaccctgaaattggtttccagaaatgaaagcgatggcctgaactacattcccaaaatcgcggaactcaagaccgaattccagaaaaggctgtctgatttcaaactctacgaaagcgaactgactctgttcagctccccgttctccacgaagatcgacagtgtgcacgaggagctccagatggaggttatcgacctgcaatgcaacacggtcctgaagacgaaatacgacaaggtgggaataccagaattctacaagtacctctggggtagctacccgaaatacaagcaccattgcgcaaagattctttccatgttcgggagcacctacatctgcgaacagctgttctccattatgaaactgagcaaaacaaaatactgctcccagttaaaggattcccagtgggattctgtactccacatcgcaacgtgatggagagaaaactcctggcagggccctatggtgggaaaggctggagtcttctagtcccaagggattgggagatgacaaaatgaattttttttttcttttttgagatggagtcttgctctgtcgcccaggttggagtgcagtggcgtgatctcggcttactgcaacttccagctcctgggttcgaacgattctcctgcctcagcctcccgagcagctgggactacaggcatgcgccaccatgcccggctaatttttgtattagtagagatgaggtttcaccatgttggccaggctggtctccaactcctgacctcaggtgatccacctgcctcgacctcacaaagtgctgggattacaggcatgaaccactgtgcccagctgacaaaatgagttcttaaacttttttttttttcagttttttttccactttgaatcagaaatataatctgcagtatcatacttgtttatattacattgtatgcctcactattcattaaaaatcaagaaagttttattgta

SEQ ID NO: 25007 - DNA, 3477 bp, Homo Sapiens
acatccaagatggcgtccccaggagctgggagcgggtgaccggcggcggggaagcggcctgggttggccctcagattgcggggtctgggggcatctcgccgggcaaacccttggcccgcctacaaggacttcccccggccagagcaatggccgctgagaacagcaagcagttttggaagaggagcgctaagctgccggggagcattcagcctgtatatggagcacagcatcctcctcttgacccacggctcaccaaaaatttcattaaagaacgatcaaaagtcaacacagttcctctgaagaataagaaggcctccagttttcatgagtttgcacggaataccagtgatgcttgggacattggcgatgatgaggaagaggacttttcctcaccttctttccaaactctgaactcaaaagttgctttggcaactgcagcccaagttctagaaaaccacagcaagctgagagtaaaaccagaacggtcccagtcaacgacatcggacgtccctgccaactacaaggtcataaagtccagcagtgatgcccagctgtccagaaactctagtgatacatgcctgaggaacccactccacaaacagcaatcactccctctccggcccatcatccccctcgttgcccggatctcggatcagaacgcttctggggcccccccaatgactgtccgggagaaaacccgcctagaaaaattccgtcagcttctctccagccagaacactgacttagatgaactgaggaagtgtagctggccaggggttcccagggaggttcgacctataacctggagactcctgtcgggctatctcccagcaaacactgagaggaggaagttgaccctgcagcggaagcgggaggaatattttggcttcattgaacagtattatgactctcgaaacgaggaacatcaccaggatacctacagacagattcacattgacattccaaggacgaatcctctcattccgttgttccagcaaccacttgtacaggagatctttgaaagaattctatttatttgggccatccgccaccctgccagtgggtatgtccagggaattaatgacctggtcactccattctttgtcgtcttcctctcagaatatgtggaagaggatgtggagaactttgacgtgaccaacttgtctcaagacatgctgcgaagcattgaggctgacagcttttggtgcatgagcaagctgctggatggaatccaggataactacacctttgcacaaccaggaatccagaagaaggtgaaggcactggaagagcttgtcagccggattgatgagcaggtacataatcacttcaggaggtacgaggtagaatacctgcagtttgccttccgctggatgaacaacctgcttatgcgggagcttcctcttcgctgcaccatccgcctgtgggacacatatcagtctgaaccagaagggttctcccactttcatctctacgtgtgtgcagccttcttgatcaagtggaggaaagagatcttggatgaggaggattttcagggtctcctcatgctgctacagaacctacctacaatacactggggcaacgaagaaattgggctgcttctcgccgaggcatacagactcaagtacatgtttgccgatgccccaaatcactaccgccgataggtgctgtctcctccggggacccagactgccttcatctctgatggcagtctgatcactgtggccactgtgcgagccgtggaccccggccaggaaccactcctgttgtacaaagctcacacccaccgcccaggtcttaactttctggcatccaccactccatgtctctggatgtgtcacttggaccactgtcagtattccatgccgcatggatgggcccagttctgggagaggacagaaaaggtggtacagggttgtctgcccctttaaaagaaactggacaaagaaggggaaggctcagggtctcacctcacattgtccctacaaggacaggccccaactgataaccgttgcttttttttttttgtgaacatagtttgatttgatcacaggtcaaaaacgccttatattttcgaaagactcctggcccctcttccctcttcctggtttcctagccgttccccttctgccccagtctgagccagtgaggggtagctttttaaaaccattattctagatggaggaggcactgatgcttgtaactctggaaagaggcctacacccaagggctaggaattttatttttccttttctcaccaggtgtctgcatgtgtgtgtgggtgtgaatgtgtatacatgcccatcagcatttagtcacatgtctgaatttctgtgtccagacgagccccatcaaactagttgggaagggccccagtgaccaagtgtataagcatcccttgaagagggattggggcaggggaggcagaaggggctctccagaccccttttccatgatgacccactccaagatattatgtgtaaattgtgttattatgtatatgggtaaagatgtacaaatatatgtcctctttgtagcagatatgattttatatttataatgtgcatcaacatgtgaaagcaatctaggtcactagcacagaggaagttgccaggaaggtggcttcagcacctccaggttggttctgggtgtcctgctgtgaggggtagaatgggaggctgctgaagtgagtagctgagcagctggagccatcccaagcatcagtgtctcagagtcctcctcgcccctttcttcaccccgccccccaacccccagactttcctggagcatctgccctttgctcctagcagcctccccaggaagggactgcagaggcgggcaagccctctctatgtgtttttatccccaccttccccggaatctggggagggcttttgtttttacgttttcaagttcagcattgtattcggacagaagctgtgactgaagactcagtgccaaggaaaggggcttcttgtgtgtccctcgggtttggggctcttctcagagagcagcactccatatcccttactgtcaccttcactccccacacagctcatgagatgtgtgacccctgtttgagttttggtatttggtagtggagggtggggggatgggggccagcagctgtcatcctcctgggaagccgagcagtgtccctggtgggtaacaccctcaagtctctttgccagtgaggccccaccacatcggtgtgagttaggtttctcatctggagctgtttctcaggcattcttcccaaccctcttccttttccccttcggtgtgcctcagtggtctccttcatagagtgagagggcttgagaccctccctcaaccggactaattaaagaaagacacttgtgttcccaagtggtggttttatttttttagtttttatgtttgtatgggaaattgtggataaagtgaaaagaattgtaaataaatggtgtatttcctcctccaaaaaaaaaaaaaaaa

SEQ ID NO: 25008 - DNA, 5454 bp, Homo Sapiens
atgaggacaggctgggcgacccctcgccgcccggcggggctcctcatgctgctcttctggttcttcgatctcgcggagccctctggccgcgcagctaatgaccccttcaccatcgtccatggaaatacgggcaagtgcatcaagccagtgtatggctggatagtagcagacgactgtgatgaaactgaggacaagttatggaagtgggtgtcccagcatcggctctttcatttgcactcccaaaagtgccttggcctcgatattaccaaatcggtaaatgagctgagaatgttcagctgtgactccagtgccatgctgtggtggaaatgtgagcaccactctctgtacggagctgcccggtaccggctggctctgaaggatggacatggcacagcaatctcaaatgcatctgatgtctggaagaaaggaggctcagaggaaagcctttgtgaccagccttatcatgagatctataccagagatgggaactcttatgggagaccttgtgaatttccattcttaattgatgggacctggcatcatgattgcattcttgatgaagatcatagtgggccatggtgtgccaccaccttaaattatgaatatgaccgaaagtggggcatctgcttaaagcctgaaaacggttgtgaagataattgggaaaagaacgagcagtttggaagttgctaccaatttaatactcagacggctctttcttggaaagaagcttatgtttcatgtcagaatcaaggagctgatttactgagcatcaacagtgctgctgaattaacttaccttaaagaaaaagaaggcattgctaagattttctggattggtttaaatcagctatactctgctagaggctgggaatggtcagaccacaaaccattaaactttctcaactgggatccagacaggcccagtgcacctactataggtggctccagctgtgcaagaatggatgctgagtctggtctgtggcagagcttttcctgtgaagctcaactgccctatgtctgcaggaaaccattaaataatacagtggagttaacagatgtctggacatactcagatacccgctgtgatgcaggctggctgccaaataatggattttgctatctgctggtaaatgaaagtaattcctgggataaggcacatgcgaaatgcaaagccttcagtagtgacctaatcagcattcattctctagcagatgtggaggtggttgtcacaaaactccataatgaggatatcaaagaagaagtgtggataggccttaagaacataaacataccaactttatttcagtggtcagatggtactgaagttactctaacatattgggatgagaatgagccaaatgttccctacaataagacgcccaactgtgtttcctacttaggagagctaggtcagtggaaagtccaatcatgtgaggagaaactaaaatatgtatgcaagagaaagggagaaaaactgaatgacgcaagttctgataagatgtgtcctccagatgagggctggaagagacatggagaaacctgttacaagatttatgaggatgaggtcccttttggaacaaactgcaatctgactatcactagcagatttgagcaagaatacctaaatgatttgatgaaaaagtatgataaatctctaagaaaatacttctggactggcctgagagatgtagattcttgtggagagtataactgggcaactgttggtggaagaaggcgggctgtaaccttttccaactggaattttcttgagccagcttccccgggcggctgcgtggctatgtctactggaaagtctgttggaaagtgggaggtgaaggactgcagaagcttcaaagcactttcaatttgcaagaaaatgagtggaccccttgggcctgaagaagcatcccctaagcctgatgacccctgtcctgaaggctggcagagtttccccgcaagtctttcttgttataaggtattccatgcagaaagaattgtaagaaagaggaactgggaagaagctgaacgattctgccaagcccttggagcacacctttctagcttcagccatgtggatgaaataaaggaatttcttcactttttaacggaccagttcagtggccagcattggctgtggattggtttgaataaaaggagcccagatttacaaggatcctggcaatggagtgatcgtacaccagtgtctactattatcatgccaaatgagtttcagcaggattatgacatcagagactgtgctgctgtcaaggtatttcataggccatggcgaagaggctggcatttctatgatgatagagaatttatttatttgaggccttttgcttgtgatacaaaacttgaatgggtgtgccaaattccaaaaggccgtactccaaaaacaccagactggtacaatccagaccgtgctggaattcatggacctccacttataattgaaggaagtgaatattggtttgttgctgatcttcacctaaactatgaagaagccgtcctgtactgtgccagcaatcacagctttcttgcgactataacatcttttgtgggactaaaagccatcaaaaacaaaatagcaaatatatctggtgatggacagaagtggtggataagaattagcgagtggccaatagatgatcattttacatactcacgatatccatggcaccgctttcctgtgacatttggagaggaatgcttgtacatgtctgccaagacttggcttatcgacttaggtaaaccaacagactgtagtaccaagttgcccttcatctgtgaaaaatataatgtttcttcgttagagaaatacagcccagattctgcagctaaagtgcaatgttctgagcaatggattccttttcagaataagtgttttctaaagatcaaacccgtgtctctcacattttctcaagcaagcgatacctgtcactcctatggtggcacccttccttcagtgttgagccagattgaacaagactttattacatccttgcttccggatatggaagctactttatggattggtttgcgctggactgcctatgaaaagataaacaaatggacagataacagagagctgacgtacagtaactttcacccattattggttagtgggaggctgagaataccagaaaatttttttgaggaagagtctcgctaccactgtgccctaatactcaacctccaaaaatcaccgtttactgggacgtggaattttacatcctgcagtgaacgccactttgtgtctctctgtcagaaatattcagaagttaaaagcagacagacgttgcagaatgcttcagaaactgtaaagtatctaaataatctgtacaaaataatcccaaagactctgacttggcacagtgctaaaagggagtgtctgaaaagtaacatgcagctggtgagcatcacggacccttaccagcaggcattcctcagtgtgcaggcgctccttcacaactcttccttatggatcggactcttcagtcaagatgatgaactcaactttggttggtcagatgggaaacgtcttcattttagtcgctgggctgaaactaatgggcaactcgaagactgtgtagtattagacactgatggattctggaaaacagttgattgcaatgacaatcaaccaggtgctatttgctactattcaggaaatgagactgaaaaagaggtcaaaccagttgacagtgttaaatgtccatctcctgttctaaatactccgtggataccatttcagaactgttgctacaatttcataataacaaagaataggcatatggcaacaacacaggatgaagttcatactaaatgccagaaactgaatccaaaatcacatattctgagtattcgagatgaaaaggagaataactttgttcttgagcaactgctgtacttcaattatatggcttcatgggtcatgttaggaataacttatagaaataattctcttatgtggtttgataagaccccactgtcatatacacattggagagcaggaagaccaactataaaaaatgagaagtttttggctggtttaagtactgacggcttctgggatattcaaacctttaaagttattgaagaagcagtttattttcaccagcacagcattcttgcttgtaaaattgaaatggttgactacaaagaagaacataatactacactgccacagtttatgccatatgaagatggtatttacagtgttattcaaaaaaaggtaacatggtatgaagcattaaacatgtgttctcaaagtggaggtcacttggcaagcgttcacaaccaaaatggccagctctttctggaagatattgtaaaacgtgatggatttccactatgggttgggctctcaagtcatgatggaagtgaatcaagttttgaatggtctgatggtagtacatttgactatatcccatggaaaggccaaacatctcctggaaattgtgttctcttggatccaaaaggaacttggaaacatgaaaaatgcaactctgttaaggatggtgctatttgttataaacctacaaaatctaaaaagctgtcccgtcttacatattcatcaagatgtccagcagcaaaagagaatgggtcacggtggatccagtacaagggtcactgttacaagtctgatcaggcattgcacagtttttcagaggccaaaaaattgtgttcaaaacatgatcactctgcaactatcgtttccataaaagatgaagatgagaataaatttgtgagcagactgatgagggaaaataataacattaccatgagagtttggcttggattatctcaacattctgttgactgtccttcatctacttggattcagttccaagacagttgttacatttttctccaagaagccatcaaagtagaaagcatagaggatgtcagaaatcagtgtactgaccatggagcggacatgataagcatacataatgaagaagaaaatgcttttatactggatactttgaaaaagcaatggaaaggcccagatgatatcctactaggcatgttttatgacacagatgatgcgagtttcaagtggtttgataattcaaatatgacatttgataagtggacagaccaagatgatgatgaggatttagttgacacctgtgcttttctgcacatcaagacaggtgaatggaaaaaaggaaattgtgaagtttcttctgtggaaggaacactatgcaaaacagctatcccatacaaaaggaaatatttatcagataaccacattttaatatcagcattggtgattgctagcacggtaattttgacagttttgggagcaatcatttggttcctgtacaaaaaacattctgattctcgtttcaccacagttttttcaaccgcaccccaatcaccttataatgaagactgtgttttggtagttggagaagaaaatgaatatcctgttcaatttgactaa

SEQ ID NO: 25009 - DNA, 1730 bp, Homo Sapiens
gcagagagggagcgcgccttggctcgctggccttggcggcggctcctcaggagagctggggcgcccacgagaggatccctcacccgggtctctcctcagggatgacatcatccgtccacctccttgtcttcaaggaccacctcctctccatgctgagctgctgccaaggggcctgctgcccatctacacctcacgagggcactaggagcacggtttcctggatcccaccaacatacaaagcagccactcactgacccccaggaccaggatggcaaaggatgaagaggaccggaactgaccagccagctgtccctcttacctaaagacttaaaccaatgccctagtgagggggcattgggcattaagccctgacctttgctatgctcatactttgactctatgagtactttcctataagtctttgcttgtgttcacctgctagcaaactggagtgtttccctccccaagggggtgtcagtctttgtcgactgactctgtcatcacccttatgatgtcctgaatggaaggatccctttgggaaattctcaggagggggacctgggccaagggcttggccagcatcctgctggcaactccaaggccctgggtgggcttctggaatgagcatgctactgaatcaccaaaggcacgcccgacctctctgaagatcttcctatccttttctgggggaatggggtcgatgagagcaacctcctagggttgttgtgagaattaaatgagataaaagaggcctcaggcaggatctggcatagaggaggtgatcagcaaatgtttgttgaaaaggtttgacaggtcagtcccttcccacccctcttgcttgtcttacttgtcttatttattctccaacagcactccaggcagcccttgtccacgggctctccttgcacagccaagcttcttgaaaggcctgtctacacttgctgtcttccttcctcacctccaatttcctcttcaacccactgcttcctgactcgctctactccgtggaagcacgctcacaaaggttcccagtgcccccgacaagcccctgctggtgtctccatctcctgccaagcatcctccagtgcctcctcctgtgggcctggcctcagggctatggacagactcctgtcccatcccagagacccctcgtgatcgtgccctggcacgtgggccgtggcccggctgggtcggctgaagaactgcggatggaagctgcggaagaggccctgatggggcccaccatcccggacccaagtcttcttcctggcgggcctctcgtctccttcctggtttgggcggaagccatcacctggatgcctacgtgggaagggacctcgaatgtgggaccccagcccctctccagctcgaaatccctccacagccacggggacaccctgcacctattcccacgggacaggctggacccagagactctggacccggggcctccccttgagtagagacccgccctctgactgatggacgccgctgacctggggtcagacccgtgggctggacccctgcccaccccgcaggaaccctgaggcctaggggagctgttgagccttcagtgtctgcatgtgggaagtgggctccttcacctacctcacagggctgttgtgaggggcgctgtgatgcggttccaaagcacagggcttggcgcaccccactgtgctctcaataaatgtgtttcctgtcttaacaaaaaaaaaaaaaaaaaaaaaaaa

SEQ ID NO: 25010 - DNA, 3831 bp, Homo Sapiens
aataaacagcagcaggagaaggaggggaagggtgttggaggggagagagggcatgcatgcacatacatagatgattcagacggcttcagaaaagaaccacaaggaatgcttagaggagttttgtatttaatctaaatatttttacttttttgtgtgtgagctcttagttcattgttcaaacccatctttccaaataaattcttctggtgatatccagaaaaatctgaagtctattgtgacttccccacacccaggggcctccagtagcaaatcttcattgtcagaactctcagaaaagacttctagtacctgtttgattcctttttctcactgataaagaaaggaaaagctaccaccattacatcagtcttaccgaagccagcactagttgcatctcgggttgaggtttccaaagtccttattctaggatcaggaggtctgtccattggtcaggctggagaatttgattactcaggatctcaagctgtaaaagccatgaaggaagaaaatgtcaaaactgttctgatgaacccaaacattgcatcagtccagaccaatgaggtgggcttaaagcaagcggatactgtctactttcttcccatcacccctcagtttgtcacagaggtcatcaaggcagaacagccagatgggttaattctgggcatgggtggccagacagctctgaactgtggagtggaactattcaagagaggtgtgctcaaggaatatggtgtgaaagtcctgggaacttcagttgagtccattatggctacggaagacaggcagctgttttcagataaactaaatgagatcaatgaaaagattgctccaagttttgcagtggaatcgattgaggatgcactgaaggcagcagacaccattggctacccagtgatgatccgttccgcctatgcactgggtgggttaggctcaggcatctgtcccaacagagagactttgatggacctcagcacaaaggcctttgctatgaccaaccaaattctggtggagaagtcagtgacaggttggaaagaaatagaatatgaagtggttcgagatgctgatgacaattgtgtcactgtctgtaacatggaaaatgttgatgccatgggtgttcacacaggtgactcagttgttgtggctcctgcccagacactctccaatgccgagtttcagatgttgagacgtacttcaatcaatgttgttcgccacttgggcattgtgggtgaatgcaacattcagtttgcccttcatcctacctcaatggaatactgcatcattgaagtgaatgccagactgtcccgaagctctgctctggcctcaaaagccactggctacccattggcattcattgctgcaaagattgccctaggaatcccacttccagaaattaagaacgtcgtatccgggaagacatcagcctgttttgaacctagcctggattacatggtcaccaagattccccgctgggatcttgaccgttttcatggaacatctagccgaattggtagctctatgaaaagtgtaggagaggtcatggctattggtcgtacctttgaggagagtttccagaaagctttacggatgtgccacccatctatagaaggtttcactccccgtctcccaatgaacaaagaatggccatctaatttagatcttagaaaagagttgtctgaaccaagcagcacgcgtatctatgccattgccaaggccattgatgacaacatgtcccttgatgagattgagaagctcacatacattgacaagtggtttttgtataagatgcgtgatattttaaacatggaaaagacactgaaaggcctcaacagtgagtccatgacagaagaaaccctgaaaagggcaaaggagattgggttctcagataagcagatttcaaaatgccttgggctcactgaggcccagacaagggagctgaggttaaagaaaaacatccacccttgggttaaacagattgatacactggctgcagaatacccatcagtaacaaactatctctatgttacctacaatggtcaggagcatgatgtcaattttgatgaccatggaatgatggtgctaggctgtggtccatatcacattggcagcagtgtggaatttgattggtgtgctgtctctagtatccgcacactgcgtcaacttggcaagaagacggtggtggtgaattgcaatcctgagactgtgagcacagactttgatgagtgtgacaaactgtactttgaagagttgtccttggagagaatcctagacatctaccatcaggaggcatgtggtggctgcatcatatcagttggaggccagattccaaacaacctggcagttcctctatacaagaatggtgtcaagatcatgggcacaagccccctgcagatcgacagggctgaggatcgctccatcttctcagctgtcttggatgagctgaaggtggctcaggcaccttggaaagctgttaatactttgaatgaagcactggaatttgcaaagtctgtggactacccctgcttgttgaggccttcctatgttttgagtgggtctgctatgaatgtggtattctctgaggatgagatgaaaaaattcctagaagaggcgactagagtttctcaggagcacccagtggtgctgacaaaatttgttgaaggggcccgagaagtagaaatggacgctgttggcaaagatggaagggttatctctcatgccatctctgaacatgttgaagatgcaggtgtccactcgggagatgccactctgatgctgcccacacaaaccatcagccaaggggccattgaaaaggtgaaggatgctacccggaagattgcaaaggcttttgccatctctggtccattcaacgtccaatttcttgtcaaaggaaatgatgtcttggtgattgagtgtaacttgagagcttctcgatccttcccctttgtttccaagactcttggggttgacttcattgatgtggccaccaaggtgatgattggagagaatgttgatgagaaacatcttccaacattggaccatcccataattcctgctgactatgttgcaattaaggctcccatgttttcctggccccggttgagggatgctgaccccattctgagatgtgagatggcttccactggagaggtggcttgctttggtgaaggtattcatacagccttcctaaaggcaatgctttccacaggatttaagataccccagaaaggcatcctgataggcatccagcaatcattccggccaagattccttggtgtggctgaacaattacacaatgaaggtttcaagctgtttgccacggaagccacatcagactggctcaacgccaacaatgtccctgccaccccagtggcatggccgtctcaagaaggacagaatcccagcctctcttccatcagaaaattgattagagatggcagcattgacctagtgattaaccttcccaacaacaacactaaatttgtccatgataattatgtgattcggaggacagctgttgatagtggaatccctctcctcactaattttcaggtgaccaaactttttgctgaagctgtgcagaaatctcgcaaggtggactccaagagtcttttccactacaggcagtacagtgctggaaaagcagcatagagatgcagacaccccagccccattattaaatcaacctgagccacatgttatctaaaggaactgattcacaactttctcagagatgaatattgataactaaacttcatttcagtttactttgttatgccttaatattctgtgtcttttgcaattaaattgtcagtcactctcataaaaaaaaaaaaa

SEQ ID NO: 25011 - DNA, 1527 bp, Homo Sapiens
atgaaaagccttgtacaagaggcttcgtgccatgttcagcctgccccttagccttccactgtgtgaggacacagcattccttccttccaagtgctgcagctctcacaagacaatcaaacaagcccgcaccttgatcatgatcttcctagcctccggaacgcactttcagaccatgctgaagtctaaattgaatgtcttaacactgaaaaaggaacctctcccagcggtcatcttccatgagccggaggccattgagctgtgcacgaccacaccgctgatgaagacaaggactcacagtggctgcaaggttacctacctgggcaaagtctccaccactggcatgcagtttttgtcaggctgcacagaaaagccagtcattgagctctggaagaagcacacgctagcccgagaggatgtctttccggccaatgccctcctggaaatccggccattccaagtttggctccatcatctcgaccacaaaggggaggccacagtgcacatggataccttccaggtggcccgcatcgcctactgcaccgccgaccacaacgtgagccccaacatcttcgcctgggtctacagggagatcaatgatgacctgtcctaccagatggactgccacgccgtggagtgcgagagcaagctcgaggccaagaaactggcccacgccatgatggaggccttcaggaagactttccacagtatgaagagcgacgggcggatccacagcaacagctcctccgaagaggtttcccaggaattggaatccgatgatggctgaatgaacttgagacgcttcagcaaaggcagcattggtcacggagttcaagggaatagatgagtaagcaacgtttcaaatttgggatgaaaagactgccaaactattggctgaccaaggtttttaaattcagaagagcaattctaaatctaaagaaatgtatcattaaagtaattacgttacattgaaacctgctgctgctgtgactgtgaggagggtgggagtgtggatggggaggaaggttctaggctctcttcttatttttctcatttcccaatgcctctctgtgggagagcttcatgccagttttcaccacgctcaggcaaatactctgcagctgttattggatgggccattccgatctgccttatgaaattccacaagaatgttaggggcaccctctttccccttctaacatccttagagggatgaaatctcagcatatgttgcaggacaccaaaaggaagaaaacaatcaagcaaataaaataaacagtcaaacaaaccaggagtttaaaacaacaaccccaacaacagaagccttggcaaagaggaataagtgatcagcaagtgaacacactctatgtcaactctccttttatccagctgagatttatggtaacttatttaattaatggtcctgtctgatgcatccttgatggcaagcttcaaatctgatttggtatcaccgaggaaaccttgcccccatcactcagcattgcacttagatacagaatgagttagata

SEQ ID NO: 25012 - DNA, 333 bp, Homo Sapiens
ggccattacggccgggggaggcatggagctgacaaccatgaggcctcggcagccaccgccaccaccgccgccgccaccaccgtagcagcagcagcagcagcagcagcagcagcagcagcagcaagagtaactctgacttaggaatagagacagccagagagaaatgtgatcaatgaaggagacatctggagtgtgcgtgcttcttcagagggacgggtgatgggcagattggaaaaagcaccgcagatgggaaccttaatctttcttttctaaaattgatgctatgaaaatttgcgttttctgtaacttgtaaaaactaaaagttgcttgtct

SEQ ID NO: 25013 - DNA, 3960 bp, Homo Sapiens
ggtcgtggagattgcttgcgctggggtgccacacttaggctgagctgcaggttttcgcacagtcgcgagttaacctctgcttgctccagaggcctcgtcctaatccacctcggctgacggcgcgggatccctggctccgcgagcctcagcctcaccatgtgtgtcaggagctgtttccagtccccccgtctccagtgggtgtggagaacagccttcctgaaacacacccagcgcaggcaccaggggtcccaccgatggacacaccttggaggcagcacctacagagcggtgattttcgacatgggcggagttctcattccttctccagggagagtcgctgcagaatgggaggtacagaatcgtatcccttctggaactatattaaaggccttgatggaaggtggtgaaaatgggccctggatgagatttatgagagcagaaataacagcagagggttttttacgagaatttgggagactttgctctgaaatgttaaagacctccgtgcctgtggactcatttttctctctgttgaccagtgagcgagtggcaaagcagttcccagtgatgactgaggccataactcaaattcgggcaaaaggtcttcagactgcagtcttgagcaataatttttatcttcccaaccagaaaagctttttgcccctggaccggaaacagtttgatgtgattgtggagtcctgcatggaagggatctgtaagccagaccctaggatctacaagctgtgcttggagcagctcggcctgcagccctctgagtccatctttcttgatgaccttggaacaaatctaaaagaagctgccagacttggtattcacaccattaaggttaatgacccagagactgcagtaaaggaattagaagctctcttgggttttacattgagagtaggtgttccaaacactcggcctgtgaaaaagacgatggaaattccgaaagattccttgcagaagtacctcaaagacttactgggtatccagaccacaggcccattggaactacttcagtttgatcacgggcagtcaaatccaacttactacatcaggctggctaatcgtgatctagttctgaggaagaagcccccagggacactccttccatctgcccatgccatagagagggagttcaggattatgaaagcccttgcaaatgctggagtacctgtccctaacgttcttgatctctgtgaagattcaagtgtcattggcacccccttctatgtgatggagtactgcccaggtctcatctacaaagacccttccctgccaggcttggagcccagccacagacgagccatatacactgccatgaacacagtcctgtgcaaaattcacagtgtggatctgcaggctgtgggacttgaagactatgggaagcaaggggactatattccacgccaggtacgaacctgggttaagcagtatcgagcttccgaaactagcaccatcccagccatggagaggctgatcgaatggctgcccctccatcttccccgtcagcagaggaccacagtggtgcacggggacttcaggctcgacaacctggtgtttcatccagaagagccagaggtgcttgctgtccttgactgggaactttctaccttgggcgacccccttgctgatgtggcctacagctgcctggctcattacctgccatccagttttcccgtgctgagaggtattaatgactgtgacttgacacagctgggaatccctgctgcagaggagtatttcaggatgtactgtctccaaatggggctccctcccactgagaactggaacttctatatggctttttcctttttccgtgtggctgcaatcctacagggagtctacaagcgatcactcacagggcaagcaagctccacatatgcggaacaaactggaaagctgaccgaatttgtgtctaacctggcgtgggatttcgcagtcaaagaagggttccgggttttcaaagagatgcccttcacaaatccgttaacaaggtcctaccacacgtgggccaggccccagtcccagtggtgccccacaggcagcaggagttatagctccgttccagaagcttccccagctcatacctcaaggggaggtctggttatctctccagagagcctctctccacctgtcagagagctgtatcaccggctgaagcacttcatggagcaacgtgtgtaccctgcagagccagagctgcagagtcaccaggcctcagcagccaggtggagcccctccccactgatcgaagacctcaaggagaaagccaaagctgaaggactttggaaccttttcctacccttagaggctgatcccgagaaaaaatacggagcaggactgaccaatgtggaatatgcacatctgtgtgagctcatgggcacgtccctgtatgcccccgaggtatgtaactgctctgcgcctgacacgggcaacatggagctgctggtgaggtatggcaccgaagcgcagaaggctcgctggctgattcctctgctggaggggaaagcccgctcctgttttgctatgaccgagccccaggttgcctcttcagatgccaccaacattgaggcttccatcagagaggaggacagcttctatgtcataaacggtcacaaatggtggatcacaggcatcctggatcctcgttgccaactctgtgtgtttatgggaaaaacagacccacatgcaccaagacaccggcagcagtctgtgctcttggttcccatggataccccagggataaaaatcatccggcctctgacggtgtatggactggaagatgcaccaggtggccatggtgaagtccgatttgagcacgtgcgtgtgcccaaagagaacatggtcctgggccctggccgaggctttgagatcgcccagggcagactgggccccggcaggatccatcactgcatgaggctgatcgggttctcagagagggccctggcactcatgaaggcccgcgtgaagtcccgcttggcttttgggaagcccctggtggagcagggcacagtgctggcggacatcgcgcagtcgcgcgtggagattgagcaggcacggctgctggtgctgagagctgcccacctcatggacctggcaggaaacaaggctgcagccttggatatagccatgattaaaatggtcgccccgtccatggcctcccgagtgattgatcgtgcgattcaggcctttggagcagcaggcctgagcagcgactacccactggctcagttcttcacctgggcccgagccctgcgctttgccgacggccctgacgaggtgcaccgggccacggtggccaagctagagctgaagcaccgcatttagagccttggggctgcagtggctcaatgtcctggctggtccagctgtgcccagatctgtcactgatgtgcctcgaaagatccggtgtttgtggctccagcaccctgctcagcagctctgtcccgggacagtcagggtggactcaatctttctggttctccacagaagacgtctctgcaagaagcctggagtctgtttcaggccaggaggaggggatttgctgagggccaagggggttctgggacagagtctggaaagctggtcttcaggctctcagtcccaggctgggcaggcacggtcacttcacttcagcctttcagtccctctctctctgcctgtgggaatctggacacattttgggaggcctcccaaggctgtgggacgtgcttgctctggcagctgcagggttcctgtctggcctccctggtgagcagaggggcggccacggcgggcggtggcctagagacccaggacctgggcgcctgggaaaatggaatgcaacccacattgtaaagccactggcatctgattatctccatttgaacacacagcacagaacaatcatttaaatgttattttggaaaggggttttggggacacagaagaataagtaaacacatctcggag

SEQ ID NO: 25014 - DNA, 48600 bp, Homo Sapiens
gctttaagttgaatctttaaacttatctttatttttgagacacagtctcactctgtcgcccaggctggagtgcagtggtacaaccacagctcagtgcagcgttgacctcctgggctcaagccatcctcccgcctcagcctcccgagtagctgggactacaggcgcacacaaccatgtccagcttatttttgtattttttgtagagacagggtcccactgtgttgccctggcttgttctgaactcctaggctcaagtgatccccccgcctcaccctcccaaagtgctgggattacaggcatgagccaccacatccagacttcacttttttgtttaatgtcgcaaatggcataaggaatgggattcaatggggacacatttataaacgttgcagcagctcctagaacttgcctatccttgtaaacttctctaggtgattgctaattacttctttttttttttttttttttgagacggagtctcactctgtcgcccaggctggagtacagtggcgcaatctcgtctcactgcaaactccacctcccgggttcacgccattctcctgcctcagcctcccgagtagctgggactacaggcacccgccaccacgcccggctaattttttgtatttttttttagtagaggtggggtttcactgtgttatccaggatggtcttgatctcctgacctcgtgatccacctgcctcagcctcccaaagtgctgggattacaggcgtgagccaccatgcccagcccgctaattatttcaatttgaccttgacactgagcctgccaagtaggttcaagcattttgatggcccctttacaggttgggaaagctaatttatctgtccaaggccgaattctgaaactgagtcttaactgccaaaaattcttatcatcaatttcttcttctgggttgggcacagtggctcatgcctgtaaagccagcaatttgagaggcatcatgatgcaagaggaagaggattgagtgaagctaggagtttgggaccagcctgggcaacatagtgagaccccatctataaaaaaaaattaaaaattagttgggcatggtggtgcactcctgtggtcctagctattcaggaggctgaggtgggaggattccttgagcccagggttgacgctgcagagagctgtgatcacgccactgcagtccagcctgagtgacagctggaaataatgataaataaataataaataattatttaaaaaattataataaaaataattaaaaaattattttccctgattaatctttttttttgtccttctgagagttcaatttgtcccttttctgcctggtctcctaggtttccctaaaatcctgctgagaggttagcactgcctgccaaagtcagtttgcaaaatcccagagaaatccagcttattcctgggggaaccgccaagactgcccagccctgtgtggggttcaggcaagtttctcacatgtgcctttttggcaagaggcctctggcaaccccatgagtccccaaagagactcaattctaaaagttggtctccaccagctctctgtggcttaggggttcaagttcaactgtgaaagccctgttttgttttgattttgctttgagggagaggaaaccgcccttctgtttgttcaactccttctcctaaggggagaaatcaatatttacgtccagactccaggtatccgtacaattgatttttcagatgtttatactcagccaaaggcgggatcccacaaaacaaaaaatatttttttggctgtacttttgtgaagattttatttaaattcctgattgatcagtgtctattaggtgatttggaataacaatgtaaaaacaatatacaacgaaaggaagctaaaaatctatacacaattcctagaaaggaaaaggcaaatatagaaagtggcggaagttcccaacatttttagtgttttccttttgaggcagagaggacaatggcattaggctattggaggatcttgaaaggctgttgttatccttctgtggacaacaacagcaaaatgttaacagttaaacatcgagaaatttcaggaggatctttcagaagatgcgtttccaattttgagggggcgtcagctcttcaccggagacccaaatacaacaaatcaagtcgcctgccctggcgacactttcgaaggactggagtgggaatcagagcttcacgggttaaaaagccgatgtcacatcggccgttcgaaactcctcctcttgcagtgaggtgaagacatttgaaaatcaccccactgcaaactcctccccctgctagaaacctcacattgaaatgctgtaaatgacgtgggccccgagtgcaatcgcgggaagccagggtttccagctaggacacagcaggtcgtgatccgggtcgggacactgcctggcagaggctgcgagcatggggccctggggctggaaattgcgctggaccgtcgccttgctcctcgccgcggcggggactgcaggtaaggcttgctccaggcgccagaataggttgagagggagcccccggggggcccttgggaatttatttttttgggtacaaataatcactccatccctgggagacttgtggggtaatggcacggggtccttcccaaacggctggagggggcgctggaggggggcgctgaggggagcgcgagggtcgggaggagtctgagggatttaagggaaacggggcaccgctgtcccccaagtctccacagggtgagggaccgcatcttctttgagacggagtctagctctgtcgcccaggatggagtgcagtggcacgatctcagctcactgcaacctccgcctcccgggtttaagcgagtctcctctctcagcctcccgaatagctgggattacaggcgcccaaccaccacgcccgcctaatttttgtatttttagtagagacgggttttcaccattttggccaggctggtctcgaaccccgacctcaggtgatctgcccaaaagtgctgggattacaggcgtcagccaccgcgcccggccgggaccctctcttctaactcggagctgggtgtggggacctccagtcctaaaacaagggatcactcccacccccgccttaagtccttctgggggcgagggcgactggagacccggatgtccagcctggaggtcaccgcgggctcaggggtcccgatccgctttgcgcgaccccagggcgccactgccatcctgagttgggtgcagtcccgggattccgccgcgtgctccgggacgggggccaccccctcccgcccctgcccccgcccctttggcccgccccccgaattccattgggtgtagtccgaacaggccaccctcgagccactccccttgtccaatgtgaggcggtggaggcggaggcgggcgtcgggaggacggggcttgtgtacgagcggggcggggctggcgcggaagtctgagcctcaccttgtccggggcgaggcggatgcaggggaggcctggcgttcctccgcggttcctgtcacaaaggcgacgacaagtcccgggtccccggagccgcctccgcgacatacacgagtcgccctccgttatcctgggccctcctggcgaagtccccggtttccgctgtgctctgtggcgacacctccgtccccaccttgtcctggggggcgccctcgccccaccagccccgatcaagttcacagagggcccccggccaccctcaaggcctcggttccttacgaggttgaaacgttgcctcagaatctccccgcccctccttggtctgcagccgagatcttcagccacggtggggcagctatcccccgggaccgaccccctggggtggcctcgcttcttcagaggctgtgaatggcttcggttcagctgtccaagcggcgatttttcctctgggtgaaatggattagattttagatttccacaagaggctggttagtgcatgatcctgagttagagctttttaggtggctttaaattagttgcagagagacagcctcgccctagacaacagctacatggccctttccctcctgagaaccagcctagcctagaaaaggattgggattgcctgatgaacacaaggattgcaggaaactttttttttaattggcaagggggttggctttgactggatggagagctttgaactgccttgaaattcacgctgtaactaacacaccagtttcctctgggaggccagagagggagggagggtgtaatgaaatacggatgattgttcttttatttttatttacttatttattttttaactttttgtagagatgaggtctcgcttggttgctcaggctggtcttgaactcctggcctcaagcgatcctcctacctcagcctcccaaagtgttgggattacaggagtgagccaccgcgccccaccggggatgatgatgattgcaaacattctgccactcagttttacaaaagaaagagaggcactggattaatgtgtatctcactcaccaatcaacctcttccttaagagaaaatgttaaggaagtcttaggcaaggccttgtttgttcatcactttagtttctctctcccgggatggctgagaatgtgatgtttcctctgttgtcaaggagactacacccctgatgttttcctccagacttctgagagctggtgtgtgtttctagcactttctagctgcaccacctcacgctgtagctggcttcaaggcatatccaggggggagtttcttgtccatttcctttacaaagggaagttgttggaatctgaaccgcaagccttcacttagaccaaaatcaggcaacagcggtgagcgcagctccaaacgtgtcaatgactcacccaaatttgagtaagggagttggctgctttaacgagccgcagggtgattcccttgtcatttccggaaatacctatcttccagggaacactgggaaaaaacagggagacctttgttgagacagaaaacctgtaggggaattctgttcctcattcctgctcttatctgtagacttcctccctgataagatccaattctagatgggtcggttgctccttgctttgatgggtgctttgatgggctttattattattattattattattattattattttgatgggctttttgatgtcccttttccttccacactctgtcccaactgtcaagcaaatagccttttgttgctaagagactgcagatgtaaccgaccagcagcaaacagtgagtcaggctctctcttccggaagcaaaatcaattgctgagatcactctggggaaaatacccaccttatttggaaagaagcactgatcaattgatgtctattttttttttttttgagttggagtctcgccctgtcacccaggctggagtgcaatggcataatctcgcctcactgcaatccccgcctcccgggttccagcaattctcctgcctcagcctcctgagtagctggaattataggcgcctgccacaacacccggctaatttttgtatttgtagtagagatggggtttcaccacgttggccaggctggtctcgaactcctgacctcgtgatccacccgcctcagcctcccaaagtccaaggattgcaggcgtgacccactgtgccagccaatcaattgatttctcattcattttcagctggctctgttcccttaagccaggggattttcgtttgtttgtttccccttcaaggaaatgattctagctacagttttgatttccttgtacaactgttttcagtagcacagggaaagaaaacatcgaaagcattcaccacctcatttgtgtgctgggggaaaaagcagaaatgtgtattctctttttttgtttcgatgaccttgttcctgacttgttactcgtgacttgagagatcagagggctagaggactagaatttatagaggtgttttttttgtttgtttatttttgttcgagttgcccaggctggagtgcagtggcgcaatctcggctcactgcaacctctgcctcccaggttcaagcgattcttcggcctcagcctcctgagtagctggaactacaggcgcccgccaccacacccagctaatttttgtatttttcagtagagatgggatttcaccatattggtcaagctggcctcgaactcctgacctcgtgatccacccgcctcagtttcccaaagtgctgggagtacaggcgtgagccgccgtgcccggcctttttgtgtttttgtgtttttgagaggagctcattgctttttaggcttccctagcgtgagaaaatctggggatccatgctctagtttacttcctttttttttttttttttgagatggagtctcgcttagattgcctaatctcagctcattgcaacttctgcctccggggttcaagggattctcgtgtctcagcctcctgggtagctaggatacgggcacccgctaccatgcctggctaattttgtacttttagtagagacagggtttcgccacgttggccaggctggtctcgaactcctgacctcaggtgagccgcctgccttggcctcccaaagtgctgagattacaggcgtgagccaccgcgcttggcctaatttgcttttcctgaaattcaaatggtctaatatgaaaaacgccaaccttgcttgaaagaataagaaagaggtgcggtttcgttgggccgttgatgtttggaacaggactggttttgtccccttgctcggaaagggcagcaactgtgaggacagctccctgacgtgctctcactcagcactgttccgttcctgagcactgtccccactagctaggccaagggagctcatttggcaggcaactgctgtctggctgcgcctgtggcagtaaaatctgcctttattttttggaggcagggtcttgccctgtcgctcaggctgaagtgtgcagttatagctcactgcagcctccagcttctgtactcaactgatcctcctctctcagcctcctgagtagctgggactatacgcacgtgttaccactcccacctcagtttgtttgtttatttatttatttatttatttattgagatggagttttgctcttgctgcccaggctggagtgcaatggcgcgatctcggctcaccgcaacctccacctcctggttcaagcgattctcctgcctcagcctcctgagtagctgggattacaggcatgcaccaccacgcccggctaattttgtatttttcgtagagatggggtttctccacattggttcaggctgttctcgaactcccaacctcaggtgatccacccgcctcagcctcccaaagtgctgggattataggcgtgagcccccgaacccggccactcccagctaagtttaaattttttgtttgtttgttcgtttgtttttattttttgagacagagtctcccgcccaggctggagcgcagatcactgcatccttgacctcccaggcttaagccatcctccccactcagcctcccaagtagctgggattacaggtgtgtgccactatgcttggctaagttgtgtattttttgtagagatggggttcaagggattctcgctttgttgcctcggttggtctcaaactcctgggctcaagcagtcctccctcctcagcctcccaaggtgctggggaaatccacttttgaaacattgtctggagagttgcccaggtggtagatcacagaaataggtcatcgtggggtccttcccatgggtgcagtcttgagccacctgtggccagcaaatatttggagaataatagtcaggggagagcttgaggtccagggaaaggttttgtttttcttcagggaaaggtttttattgttctttatccctccttaaaggaccttcaggtgttactgacattcccggtctacccagtggcacatttagtttgtaagctgggccctcgtacagaggtagggaggtgagagcattggattagtggtcaccaaagctgcggtcacctagtggggtgatcagaggctcctcccttaagatcttgattgccaacgcctctggcccaactttcctttttatttatcgcaagcctcctggaatctcaattgctttttgcccacccggtgtgtcagcacaagaaatgagtcatttcctcctttaagcacagttgaaattgagctgtgagtcagtgaggtgtgtacgatattgtcaaagcggggtgtgtacagtattgacagatctgtagttgggcaagagaattatcagagtttgtgaccacagcagattccaaagctcgactcattttcttctctcttccttcccttttttcttttctttttttttttttttttgacagagtctcgctctgttgcccaggctggagtgcagtggcacaatctgggctcactgcagcccctgcctcctgggttcaaatgattctcatgtttcagcctcccgagtagctgcaattacaggcattcgggttcaagtgattctcctgcctcagccacctgagcagctgggattacaggcgcccgccaccacgcccggctaatttttgtatttttagtagagacggggtttcaccatgttggccaggctggtctcgaactcctgaactcaggtgatccgcccacttcggcctcccaaagtgctgagattacagacgtgagtcaccgcgcccagcctgttctgttctttaattctcaaaacaccctctaggaagtagagactgccattctcccccattttacagatcaggaaactgagtcccagaaggatttagtcagttacccaagttgttctagttaaatggcctggaaagccaatgaagcccaggattgtctatctaacccccttactactctaactttcagggaatccacatgaatgtgctgggtcaaccatcaaagttgaaatggataaagggggctggatgcggtggctgatgcctgtaatcctagcactttgggaggccgagatgggtgggtggattgcttgagcccaagagtttgagaccagcctgggcaacatagtgagacacctgtctctgcaaaaaataaataaaaagttagctgagtgtgatggtgcacccctctagtcacagctgttgagttaggcttaggcaggaggatcgcatgaacctgggaggtggaggcggccgtgagcctcagtcatgccactgcactccaacctgggcaacagagtgaaagccggtgtccgaaagagaaagaaaaaaagacatagatacatcttttaaagttaggttgtatgttaattacctacaactcagtttcaactgtgcttaaaggaggaaatgactcatttcttgctacatatcaaattagcccaaaatgtagtggcttaaaacaacacatttatgatttctcagtttttgcgtgtcaggaatttggaagcagcacagctagacggttccagctcagggtctctcatgaagttgcaatcaaaatattggcaggagagaaaaacatattttcagaagctgcaggcataggaagacttggctggggttgaaggatccacttccaagatggcgcactcagtggctcttggctggaggcctcagttccctgctgcgtggagctctccctccagctgcttgagtggactcatgacatgcagctggcctcccctggagcagtcgatccaacaatgagcatggccatgaactaggctcagaagccactccctgtcgtctctacattttcctatcagaagcaagtcattaaaagtccagtgccactccaggggagacgaattaggctctgccttctgaaaggattatcacagaagatgcggtcctatattctttttttaaaattattcttttttttattttgtagagatggggtcttggtatgttgcctaggccagtctggaattcctgggctcaaacaatcctgtctctgcctcccaaagtgttgggattacaggcatgagccactgcacctggtcatgtggtcatattttctttttcttttttttttttttttgagacagagtctctgtcgcccaggctggagtatggtggcgtgatctcagttcactgcagcctccgcctcccgggttcaagcgattctcctgcctcagcctcctgagtagctgggattacaggcgcccgccaacatgcccagctaatttttttagtagagatggggtttcaccatgttagccaggatggtctcgatctcctgatttggtgatccgcccaccttggcctcccaaagtttcaaccatcgatcagaacttattgatgtacttatgtagctaggcacggtggcgcgtgcctgtaatcccagctacttggaagggttaaggcaggagaatcgcttgaacctgggaggcagaggttacagtgagtcaagatcataccattgcactccagtctgggcaacagaatgagactctgtctcaaaaacaaaaaacaaacccttgtatgtgattttcctggatagcatctgttacatcttcacaaagataaaaagtcagacttggctgggcatggtggctcacacctgtaatcccagcactgagaggctgaggcaggcagatcacttgaggtcaggaatttgagaccaggctgggcagcatggtgaaaccccgtctctacaaaaaatacaaaaattagccgggtgtggtgtcacgcacctgtattcccaagctactcaggaagctaaggcaggagaatcacttgaacccagaggtggaggtttgcagtgagttgagattgtgccattgcactccagcctgggcgacagagtgagactctgtgtcaaaaataaaataaaataaaattttaaaaaaggcagatttttttttcttcttggtattgttaccttattatagtaataataagtgcatagtgcatgctgagataagcaatcataatttgttattgcggccgggcatggtggctccagcctataatcccagcactttggtcaggagttcaaggccagcctggccaatatagtgaaatccatctctactaaaatacaagaaattacctgggcatggtggcagttgctggtgatccccagctacttgggaggctgaggcaggagaatcgcttgaacctgggaagcagaggttgcagtgagccaagattgcaccactgcactccagcctgggtgacagagtgagactctgtctgaaaataataataataataatttgttattgcttttattgccttagtttacatagggaatcaaagtttatactttgatttataaaagttgctttgattctagttcacagaaccagaatctttcatataaaggtattagagggcccagtgtggtggctcatgcctgtaatcccagcatattgggaggctgaggagggaggatcactttaggagtttgaggccagcctaggcaacatagtgagaccttgtctctacaaaaaattccaacattagctgggcatggtggcatgtgcctgtagtcccatttatttggggggctgaggcaggaggatcacttgagcccacgaggttcaatccaggttgcagtaagccatgatcctgccactgcactccagtttgggtaacagagcgaagctatgtctcaaaaaaagaaaaaaaaagtattctaaatccaaatttaatatataaaactaaatgcaggccaagtgtggtggcatatacctataatcacaacactttgggaggctgaggtgggaggattgcttgagcccaagagttcaagaccagcctaggtaacacagtaagaccccatctctacaaaaagtagaaaaattagcctggcatggtggtgagtgcttttaatcccaactacttagggggctgagatgggaagattgcttgagcctcagagtttgaggctgcagtgggccgtgatcgctccactgatcgctctaaagtgagaccctgtctcaaaaaaaaagaaaatagaagaaaactaaatacattcaataagactttgatctcttttccaaggtgtaaatatattttgggaaattttccagttactttgttctcattttaatgtaataatctaagtcttggttttctaaggaaaagttttctcttattatatcttttgttaatgtttctctcccatttcttttgatctgatcttcagatacatgattatcttcactgctaaatttgtgttctctggcctctacatttataatttctcataattctttatctaagtatttcttccctacctactgaagaaaactcaagttttcttccaccttaatgattatgctgtgtctgtgagttttcttcatgactctttacagtacaagttttttgtttttgtttttttaatggtcagatggatagaacaacacaggttttgtttgttttgttttaacttttaaaaaaattataatagataaagggtctcactacgttgtccaggctgatctcatactcctgggctcaagcaatccacccacctctgcctcccaaagtgctgggattacagtcatgagccaacatgcctgggcagtacaggttttttttgagacggagttttgttcttgttgccgaggctggagtgcaatggcacaatcttggctcaccacaaagtctgcctcccaggttcaagtgattctcctgcctcagcctcctgagtagctgggattacaggcatgtgccaccacgcccagctaattttgtatttttagtagagacggggtttcaccatgttggccaggctggtttcgaactgctgacctcaggtgatctgcccacctcggcctcccaaagtgctgggattacaggcatgagccaccatgcccagctgtagtacaggttttaatatgctaaatactcttcctttctttattaatgtgcatggaagttctaatatttttttcccataccccagagagtccatattttggaatcaacaacactagcctttgttgacaagtgtctctcttgggttccttctttgtgtcctccactgaattttggggttcataaaatttcatttgttgtgcttgcttaattccctgggaatcagactgttcctgatcggatgacatttctggttaattctttagttggcaggaaatagacacaggaaacgtggtcagtttctgattctggcgttgagagaccctttctccttttcctctctctcagtgggcgacagatgcgaaagaaacgagttccagtgccaagacgggaaatgcatctcctacaagtgggtctgcgatggcagcgctgagtgccaggatggctctgatgagtcccaggagacgtgctgtgagtcccctttgggcatgatatgcatttatttttgtaatagagacagggtctcgccatgttggccaggctggtcttgaatttctggtctcaagtgatccgctggcctcggcctcccaaagtgctgggattacaggcaccacgcctggcctgtgacacgattcttaacccctttttgatgatggcggctggaaaagtggccagtggattttgatgtattcaatcatgaattaggaggtggggagagaatgaattattggagctttccttaaagccattaaatggctctattgttttttcaattgatgtgaatttcacataacatgaaattaaccagctcagtggcattaatacatctgcaatgctgtgtggccaccacctctatcttgttccaaaactttgcataacctaatgtctttttttttttttttttttgagacggagtctcgttccatcacccaggctggagtgcagtggtgtgatctcagctcactgcaacctccgcctcccaggttcacgccatcctcctgcctcagcctcccgagtagctgggactacaggcaccctccaccacatccggctaattttttgtatctttagtagagatgggtttcaccatgttagccgggatggtctcgatctcctgacctcgtgatccacctgcctccgcctcccaaagtgctggcattacaggcgtgagccaccatgcccggcctatttttttttttaagagatggagtctaattctgttgcccaggctggagtccagtggtaccatcatacttcactgcagccttgacctcttgggctcaagtgattctcttgcctcgaactcccaaagtattgggattacaggtgtgagccaccgcactcagcctaatgtccagtttttaacaagctccatttaaatgccctccgttttgacccataaaggggtaggcttggccgggcacaatggcttgtgtctgtagtcccagctacttgggaggctgaggcagaaaggcagaaagattgctttataaagcccaggagtttgagggccacctgggtggcatagctagacctcatctctaaaaaataagtaataaataaatatttgtttttgtttttttctttttcttttcttttttttttttttttgagacggagtcttgctctgttgcccaggctggagtgcagtggcgcgatctcagctcactgcaagctgtgcctcctgggttcatgccattctcctgcctcagcctcccgagtagctgggactacaggcgcccactaccacgcccagctaattttttgtatttttagtagagatggggtttcaccacgttagccaggatggtctcaatctcctgacctcgtgatccgccagctttggcctcccaaagtgttgggattacaggcgtgagccactgagcccgccccatatgtatgtatatatatatttttttaaaatgggagaccaggcatggtggctcatgcctagaatcccagcactttgggaagctgaggtaggcggatcacttgaggccatgagtttgagaccagcctgctcaacatgatgaaacttctatctctactaaaaaaaaaagtgggattaggtcaggcacggtggctcacacctgtaatcccagcactttcagaggccgaggcaggaggatcatgaggtcaggagatcgagaccatcctggctaacacggtgaaaccccgtctctactaaaaaaatacaaaaaattagccaggcgtggtggcgggtgcctgtagtcccagctactcaggaggctgaggcaggagaatggcgtgaacccgggaggcggagcttgcagtgagccaagatcgtgccactgtactccagcctgggcgacagagcaagactctgtctcaaaaaaaaaaaaaaaagtgggattgacattctcttcaaagttctggggttttctttgcaaagacaggattggcaaggccagtgggtcttttttgtgtgtgtgtgtgtgacggagtctcactctgccacccaggctggagtgcaatggcaggatctcggctcaccgcaacctcctcctcccaggttaaagtgattctcctgcctcagcctcccgagtagctgggactacaggtgcccgccaccacacccaactaatttttgtatttttagtagagacagggtttcactatattggccaggctggtcttgaacccctgacctcacgtgatccacccgccttggcctcccaaagtgctgggattacaggcgtgagccactgtgctcggcctcagtgggtctttcctttgagtgacagttcaatcctgtctcttctgtagtgtctgtcacctgcaaatccggggacttcagctgtgggggccgtgtcaaccgctgcattcctcagttctggaggtgcgatggccaagtggactgcgacaacggctcagacgagcaaggctgtcgtaagtgtggccctgcctttgctattgagcctatctgagtcctggggagtggtctgactttgtctctacggggtcctgctcgagctgcaaggcagctgccccgaactgggctccatctcttgggggctcataccaagcctcttccgcccttcaaatccccccttgaccaggaggcattacaaagtggggatggtgctacctcttcgggtttgtcacgcacagtcagggaggctgtccctgccgagggctagccacctggcacacacactggcaagccgctgtgattcccgctggtcgtgatccccgtgatcctgtgatccccgccccgtgaggctgaacacatagtgacgcttgctagccaagcctcaatgacccacgtaacatgaagggggaaaagccagaaagttctgccaaggagcaaggccaagaatcccgaagggaaatggactttgaagctgggcgtcttcttggctgtcttaatacaagtggcacatccaaatccaaaaccccgaaattcaaagtcttgagcacccgaaattctgaaacgtcttgagcactgacctttagaaggaaatgcttattggagcattttggatttcggatttttaccactgagtgtggagtcctaattaggaaaaaaaccaggctgaccgaaccaaaggaaagcaataaaagaaggcagatagggtcaggcacggtggctcacccctgtaatcccagccttttgagaggctgaggcgggtggatcacttgaggtcaggagttcgagagcagcctggccaacacggtgaaaccccatctctactgaaaatacaaaaactagccaggtatggtggcgtctgcctgtaatcccagctactcgggaggctgagacaggagaatcacttgaacctgggaggcagaggttgcagtgagccaatatcacgccattgcactccagcctgggggacaagagcgaaattctgtctcaaaaaaaaagaagaagaaggccgacaaactatgtaactctgcctttctccatggtccagaacacacagccctcctgcgtaaataactccttatcttcctgctcccagctatcatcagacacctcggctgatagaaaattgcaagttagctcactgcaacctcggcattataagtactgcacaaagccctcttcagcgcacagcacaagcaccattctataaaatctccagcaagcggccaggtgcagtggctcatacctgtaatcccagcattttgggagactgaggcgggcggatcacctgaggtcaggagtttgagaccagcctggccaacatggtgaaaccccgtctctattaaaaatacaaaaaaattagccaggcgtggtggcaggtgcctgtaatcccagctacttggaaggctgaggcaggagaatcgcttgaacccgggaggtggaagttgcagtgagccgagatcttgccatcgcactccagcctgggggacaagagtgagacttcgtctcaaaaaaaaaaaaaaaaattcccagcaagcctttgtcttctggcagtcagctcctctcttgctgacctgctcattgctttcttgcaaggtattttcctacctactttctggaataaatctgtctttctgtacttacaactaccttttttaaaatttctttcttttttgagatggagtctcactctgtttgcccaggctggagttcagtggtgcaatctcagctcactgcaacctctacctactgggttcaagcgattctcctgcctcagcttcccgagtagctgggattacaggcgtgcaccagcacgcaggctaatttttgtatttttagtagagacggggtttcaccatgttggccaaggtggtcttgaactcctgacctcaagtgatcctcccacctcagcctcccaaagcgctaggattacggccatgagccactgaggccggctgcacctacaactgtcttgataaattcttacccccacaccactggtccagatagtcagtgctcacccacaacattaaggatattccaaatttgaaacattccaaaatcagaaaaatattccaactctgaaaatattccaaaatccaaaaaaattcaaaatccaaaacacttctggtcccaagcattttagagaagggatactcaacccaaaataaggacagcaattctataaattgtgctaccatcttgcaggtctcagtttaacagctttacacctattagcgcaccagtgctcatagcagtgctgggaaatgtgtacagatgaggaaactgaggcaccgagagggcagtggttcagagtccatggcccctgactgctccccagcccgcctttccaggggcctggcctcactgcggcagcgtccccggctatagaatgggctggtgttgggagacttcacacggtgatggtggtctcggcccatccatccctgcagcccccaagacgtgctcccaggacgagtttcgctgccacgatgggaagtgcatctctcggcagttcgtctgtgactcagaccgggactgcttggacggctcagacgaggcctcctgcccggtgctcacctgtggtcccgccagcttccagtgcaacagctccacctgcatcccccagctgtgggcctgcgacaacgaccccgactgcgaagatggctcggatgagtggccgcagcgctgtaggggtctttacgtgttccaaggggacagtagcccctgctcggccttcgagttccactgcctaagtggcgagtgcatccactccagctggcgctgtgatggtggccccgactgcaaggacaaatctgacgaggaaaactgcggtatgggcggggccagggtgggggcggggcgtcctatcacctgtccctgggctcccccaggtgtgggacatgcagtgatttaggtgccgaagtggatttccaacaacatgccaagaaagtattcccatttcatgtttgtttcttttttttcttttctttctttattttgtttttgagatggagtctcactctgtgatttttttcatctctaaatttcctacatccatatggccaccatgaggccccaggctggccgatggttgctgttagcttattgggaaatcactgtttggaaggtgctggttgttttttgttgtttgttgtttttgtttttgtttttattttgagacggagtctcgctctgtcgccagggtggagtgcagtggcgcgatcagctcactgcaacctccgcttcctgggttcaagccattctcctgcctcagcctcccaagtagcgcggattacaggcatgtgccaccacctccggctatttttttttctatttagtagagatggggtttcaccatgttagtcaggctggtcatgaactcttgacctcaggtgatccacccgcctcggcctcccaaagtgctgggattacaggcgtgcactgctgcacccagcctttttttgtttttttgagacagggtcttgctgtcacccaggttgaagtaaggtggcacgattatggctcactgcggccttgatctccttggctcaagcgatcctctcacttcagcctctcaagcagttggaaccacaggctgtaccaccaagcctggccaatttttttgtacagacacaggctggtcttgaactcctgggctcaagcaatcctcctgccttggcctcccaaagtgctgggattccaggcatgagccgctgcacccggcaaaaggccctgcttctttttctctggttgtctcttcttgagaaaatcaacacactctgtcctgttttccagctgtggccacctgtcgccctgacgaattccagtgctctgatggaaactgcatccatggcagccggcagtgtgaccgggaatatgactgcaaggacatgagcgatgaagttggctgcgttaatggtgagcgctggccatctggttttccatcccccattctctgtgccttgctgcttgcaaatgatttgtgaagccagagggcgcttccctggtcagctctgcaccagctgtgcgtctgtgggcaagtgacttgacttctcagagcctcacttccttttgttttgagacggagtctcgctctgacacccaggctggagtgctgtggcacaatcacagctcacggcagcctctgcctctgatgtccagtgattctcctgcctcagcctcccgagtagctgagattaaaggcgtataccaccacgcccggctaattttttgtatttttattagagacagggtttctccatgttggccaggctggtcttgaactcctggtctcaggtgatccacccgcctcggcctcccaaagtgctaggattacaggtgtgagccactgcgccaggcctaatttttttgtatttttagtagagatgcggttttgccatattgcccaggctggtctcgaactcctgggctcaagcgatctgcctgccttggcctcccaaagtgctgggattacaggcacaaaccaccgtgcccgacgcgttttcttaatgaatccatttgcatgcgttcttatgtgaataaactattatatgaatgagtgccaagcaaactgaggctcagacacacctgaccttcctccttcctctctctggctctcacagtgacactctgcgagggacccaacaagttcaagtgtcacagcggcgaatgcatcaccctggacaaagtctgcaacatggctagagactgccgggactggtcagatgaacccatcaaagagtgcggtgagtctcggtgcaggcggcttgcagagtttgtggggagccaggaaagggactgagacatgagtgctgtagggttttgggaactccactctgcccaccctgtgcaaagggctccttttttcattttgagacagtctcgcacggtcgcccaggctggagcgcaatggcgcgatctcggctcactgcaacctctgcctcccaggttcaagtgattctcctgcctcagcctcctgagtagctgggattacaggcgcccaccaccaagcccgggtaattttttgtatgtttagtagagatggggtttcactatgttggccaggctggtgttgaactcctgacctcatgatccgcccacctcggcctcccaaagtgctgggattacaggcgtgacccaccccatgaaaaaaaattaaaaaatgaagcgatgctgggcgcggtggatcacgcctgtaatcccagcactttgggaagctgaggcaggcagatcacgagggcaggagattgagaccatcctggctaatacggtgaaaccccatctctactaaaactacaaaaaattagccgggtgtggtggcaggcacctgtgatcccagctactcaggaggctgaggcaggagaatcgcttgaacccaggaggtggaggttgcagtgagccgggatcacaccattgcactccagcctgggtgacagagtgagactctgtctcaaaaaaaaaaaaaaaaaaaaaagcgaattctgaaatacatgaattcttttccttagatgcctgcttctgtcttgaggtttgttgttgttgttatttcgaaacagagtcttgctctgtcgctcaggctggagtgcagtggcatgatcttggctcaccacaacctccggctcccaggttcaagcgattcttctgcctcagcctcctgagtagctgggattacagctgaatgccaccttgctgggctaatttttgtatttttagtagagatggggtttcaccatgttggccaggctggcctcgaactcctgacctcgagtgatctgcccgcctcctgaagtgctgggattacaggcgtgagccacctcgtcctggtgagggtttttttttttccccaaccctctgtggtggatactgaaagaccatattaggataactgtacagtatagagaaggcagtggcaagttttctctgtcatataccagagtgggcttgggcatggtggcatactcctgtagtctcagctaatcaggaggctgaggaaggaggatcgcttgggcccaggagttggagactgtagtgagctgtgatcacaccaccacacttcaatctgggcaacagagcaagagaccctatctctaaaaaaaagtaagtatttcggacactgtgggccatacggtctctggtgcagtttctcaacatggctgttgggtgaacacaaccacgcacagaacgcaaaccaatacacgtggctgtgggcccagaaaatgttatttatggacacaaaaattggaatttcatataactgttttgtgtcatgaaaatgatttccctttttatttttatttttcttctcaagtatttaaatatgtaaaagccatttttaggcctggcaggatggttcacagctgtaatcccagcactttgggaggtcgaggcgggaggatcacgaggtcaggagatcgagaccatcctggccaacacagtgaaaccccgtctctactaaaaatacaaaaaattaaccaggcttggtggcgcgcgtctgtagtcccagctgctcaggaggctgaggcaggagaatcgcttgaatgcaggaggcggaggttgtagtgagccgaggttgcaccactgcactccagcctgagcgacagagtgagagtccgcctcaaacaaaaaaatgtttgcccatgctggtcttgaactcctgggctcaagctatctgcctgccttggtctcccaaagttctgggattacaggcatgagctacagcgcccggacttttgttgttttatatctatatatctatatataacttgttttatgtatatatataacttgttttatatatatacataaactgcagtaaaaaacatgtaacataaaatttaccttctcaaaccttattaagtgcacagttctgtgccattagcaaattcacactgttgtacaacatcacaaccaccatctccagaacttttttttttttttttattctttttgagacagagtctcactcgtcgcacgggctggagtgcagtggtgcgatctcggttcactgcaacctccacctaccaggttcaagcaattctcctgcctcagccccctcagtagctgggattacaggtgcccgtcctaccacgcccagctaatttttgtattttcagtagagactgactgggtttcaccatgttggccaggctggtctcgaactcctgacctcaagtgatcctcccacctcagcctcccaaagtgctgggaatacaggcatgagccactgcgcccggccccagaactcttttatcttcccaaactgaagctctgtccccatgaaacactcactctccatcccctccccaactcctggcacccaccattctactttctgtccctatgaatgtgatggctctagggacctcctctgagtggaatcagacagcattttccttttttgactggcttatttcactgagccaagtgcggtggcacacgcctgtaatcccaaaactttgggagaccgaggcgggcgcatcacctgaggtcaggagttcgagaccagcccggccaacatggtgaaaccccatctctagtaaaaatacaaaaaattagcctgtcatggtcgtgggtgcctgtaatcccagctaagtgggaggctgaggcaggagaatcgcttgtacccaggaggcggaggtcgcagtgagccgagatcgtgccattacactccagcctgggcaacaagagtgaaactccgtctctcctaaaaatacaaaaaaattagctgggcatggtggcacatgcctgtagtcccagctacttgggaggctgaggcaggagaatcacttgaacccgggaggtggaggttgtaatgagccaaggttggcggcgaagggatgggtaggggcccgagagtgaccagtctgcatcccctggccctgcgcagggaccaacgaatgcttggacaacaacggcggctgttcccacgtctgcaatgaccttaagatcggctacgagtgcctgtgccccgacggcttccagctggtggcccagcgaagatgcgaaggtgatttccgggtgggactgagccctgggccccctctgcgcttcctgacatggcaaccaaacccctcatgcctcagtttccccatctgttaagtgtgcttgaaagcagttaggagggtttcatgagattccacctgcatggaaaactatcattggctggccagagtttcttgcctctggggattagtaattaagaaatttcaggccgggtgcgtaatccctgtaatcccaacaccttgggacgccgaggcgggcagatcacctgaggtcgggagttccagaccagcctgaccaacatggagaaaccccgtctctactaaaaatacaaaattagccgggcttggtggtgcatgcctataatcccagctactcaggaggctgaggcaggagaatcacttgaacctgggaggtggaggttgtggtgagccaagatcgtgccattgcactccagcctgggcaacaagagtgaaactccatccaaaaaaaaaagaaaagaaaagaaaaaaaagaaaagaaatttcagctgacacagcttcacactcttggttgggttcccgtggtgaatgatgaggtcaggtgatgactggggatgacacctggctgtttccttgattacatctcccgagaggctgggctgtctcctggctgccttcgaaggtgtgggttttggcctgggccccatcgctccgtctctagccattggggaagagcctccccaccaagcctctttctctctcttccagatatcgatgagtgtcaggatcccgacacctgcagccagctctgcgtgaacctggagggtggctacaagtgccagtgtgaggaaggcttccagctggacccccacacgaaggcctgcaaggctgtgggtgagcacgggaaggcggcgggtgggggcggcctcaccccttgcaggcagcagtggtgggggagtttcatcctctgaactttgcacagactcatatcccctgaccgggaggctgtttgctcctgagggctctggcaggggagtctgccgccctgttaggacttgggcttgccagggggatgcctgcatatgtcctagtttttgggaatatccagttaacggaaccctcagccctactggtggaacaggaaccggctttcctttcagggacaacctggggagtgacttcaaggggttaaagaaaaaaaattagctgggcatggtgccacacacctgtggtcccagctactcagaaggctgaggcgggaggattgcttgagggcaggaggattggttgatcctcccacctcagcctccggagtagctgggacctcaggtgcatgccactatgcctggctaattttcttttttctttttttttttttttcgagacggagtctcgctctgttgcccaggctggagtgcagtggcaggatctcggctcactgcaagctccgcctcccgggttcacgccattctcctgcctcagcctccccagtagctgggactacaggagcccgccactgcaccaggccaatttttttgtatttttagtagagacggggtttcactgtgttagccaggatggtctcgatctcctgacttcgtgatccgcccacctcggccttccaaagtgctcggattacaggcgtgagccactgcgcccagccgctaattttcatatttttagtaaaaacagggtttcaccatgttggccaggctagtcttgaactcctgaacccaagtgatcctcctgccttggcctcccaaagtgctgggattacagacaccacacctggctattattattttttagagacagggtgctgctctatcttccagcctgtagtgcagtgcagcctccatcatagctcgctgcagccttgacctcctgggttcacgtgatcgtcccgcctaagcctctggaggagctgggagtactggcatgtgccaccatgcctggttaatttttttttttttttttttgagacagagtctcattctgtcacccaggctggagtgcggtggtgcgatcttggcttactgaaacctccacctcccaggttccagcaattctcctgcctcacccttctgagtagctgggattacaggttccggctaccaaacctggctagtttttgtatgtttagtagagacagggtttcaccatgttggtgaggctggtctcgattctcccgcctcagcctcccaaagtgctgggattacaggcttgagccaccgtgcctggcttttttttttttttttttttttgtggcaataaggtctcattgtcttgcccaggctagccttatgctcctagcctcaagtgatcctcctccctcagcctcccaaagtgctgggattacaggtgggcgccactgtgcctgttcccgttgggaggtcttttccaccctctttttctgggtgcctcctctggctcagccgcaccctgcaggatgacacaaggggatggggaggcactcttggttccatcgacgggtcccctctgaccccctgacctcgctccccggacccccaggctccatcgcctacctcttcttcaccaaccggcacgaggtcaggaagatgacgctggaccggagcgagtacaccagcctcatccccaacctgaggaacgtggtcgctctggacacggaggtggccagcaatagaatctactggtctgacctgtcccagagaatgatctgcaggtgagcgtcgcccctgcctgcagccttggcccgcaggtgagatgagggctcctggcgctgatgcccttctctcctcctgcctcagcacccagcttgacagagcccacggcgtctcttcctatgacaccgtcatcagcagggacatccaggcccccgacgggctggctgtggactggatccacagcaacatctactggaccgactctgtcctgggcactgtctctgttgcggataccaagggcgtgaagaggaaaacgttattcagggagaacggctccaagccaagggccatcgtggtggatcctgttcatgggtgcgtatccacgacgctgagggctgcagagggaatggagggagcaggaaggagcttcaggaactggttagtgggctgggcatggtggctcaaagcacctgtaatcccagcactttgggaggccaaggtgggtggatcatcaagaccagcctgaccaacatggtgaaacctcgtctctactaaaaatacaaaaattagccgggtgtggtggtgggcacctgtaatcccagctgctcgggaggctgaggcaggagaatcacttgaacctgggagatggaggttgcagtgagccaagacagccccactgcactccagcctgggtgacagagtgagactccgtctcaaaaaaaaaaaaaaaaactaaacaaaaaactggttagtggctagacaacaggatggtatcttccaagcccatggctgactcagcagctcctgggtcaagacactgtgacctgtgtcccctggcaggaagcatcgcccctgccacctgcccggtgtactctgtacctgtcaggtgacatctgctacctaagcacgtgagaggtggcatttcacagtttcagtgtggtgctgacaacccgggacgcacactgtccttgcagctacaatcaggaggtgaatgttgggtttccagcagagaacactggagaaggcacacttggtgtctggaagggaaaagcagggaagagagcatcatcagatgcctgcgggtgaaggtgggcccgctatggccagcgtccctttttatttttatttatttatttatttgagatggaatctcgctctgtcgcccagactgtagtgcagtggtgcgatcacggctcactgcaagctccgcctcacaggttcacgccattctcctgcctcagcctcccgagtagctgggactacaggcacccgccaccacgcccggttaattttttgcatttttattagagacggggtttcaccgcgttagccaggatggtctaaatctcctgaccctgtgatccacccgcctcggcctccctaagtgcttggattacaagcgtgagccaccacgcccggccccctttttattttttattttttgagacggagtctcgctctgtcgcccaggctagattgcagtggcgtgatctcggctcactgcagcctccgcctcccaggttcaagtgattctcctgcctcaacctcccaactaattaggattacaagcatgtaccaccatgcctgactaattttttgtatttttagtagagactgggtttcaccatgttggctaggctggtctcgaacccttagcctcaagtaatctgcctgcctcagcctcccaaacagcggggattacaggcatgagccactgtgcccaacccaaccctggatctcttttaaacaagacaatgctcgctgttgccacagaacaatgggtggggtacatgtggcccagtgtgtttggccacataactgccaggccagagggaaagagactctcagactgtctccactcagatacaaatgtgtgtgttgtgtgcgtgtgttctggtctcatatttgtttgttttgagacagggtgtcgctctgtcactgagtctggagtgcagtggcgcaatcagagttcactgcagcctcaaactcttgggctcagttgattctcccacttcagcctcccaagtagctggaactacaggtgaacaccactgtgcccagctaatttattttatttttagtagagatgaggtctcactatgttgcccaggctggtcttgacctcctagcctcaagcaatcctcctgccttggtctcccaaagtgctgggattacacgtgcgagccattgcgcatggcttgtgttcttgtgtttcttcctttttctttcgagatggcgtctcagtctgccacccaggctggagtgcagtggtgtgatcatagctcactgtagcctcaacttcctgggctcaagcaatcctcttgatttcagcctcccgggcctggccagcatggtgaaaccccgtctctactaaaaatacaaaaatgtagccaggcgtggtggtgggcgcctgtaatcccagctacaccagaggctgaggcaggagaatcgcttgagcctggaaggtggaggttgcagcaagccaagatcgtgccactgcactccagcctgggcaacagagacagactctgtctcaaaaaaaaaaaaaaaaaacccaaacaagccacatttggagtttggggttcccagcaggactatttcccaagcctgagcctggctgtttcttccagaattcgttgcacgcattggctgggatcctcccccgccctccagcctcacagctattctctgtcctcccaccagcttcatgtactggactgactggggaactcccgccaagatcaagaaagggggcctgaatggtgtggacatctactcgctggtgactgaaaacattcagtggcccaatggcatcaccctaggtatgttcgcaggacagccgtcccagccagggccgggcacaggctggaggacagacgggggttgccaggtggctctgggacaagcccaagctgctccctgaaggtttccctctttcttttctttgttttttctttttttgagatgaggtcttggtctgtcacccaggctggagtgcactggtgcaatcgtagctcactgcagcctccacctcccaggctcaagtgatcctcctgcctcaccctcctgagtagctgagattacagacacgtgccaccacggcagactaattttattttatttttgggaagagacaaagtcttgttatgttggcctggctggtctcaaactcagggtgcaagcgatcctcccgcctcagccttccaaactgctgggattacaggcgtgggccaccgtacccagcctccttgaagtttttctgacctgcaactcccctacctgcccattggagagggcgtcacaggggaggggttcaggctcacatgtggttggagctgcctctccaggtgcttttctgctaggtccctggcagggggtcttcctgcccggagcagcgtggccaggccctcaggcccctctgggactggcatcagcacgtgacctctccttatccacttgtgtgtctagatctcctcagtggccgcctctactgggttgactccaaacttcactccatctcaagcatcgatgtcaacgggggcaaccggaagaccatcttggaggatgaaaagaggctggcccaccccttctccttggccgtctttgaggtgtggcttacgtacgagatgcaagcacttaggtggcggatagacacagactatagatcactcaagccaagatgaacgcagaaaactggttgtgactaggaggaggtcttagacctgagttatttctattttcttctttctttttttttttttttttgagacagagttttgctctcgtttcccaggctggagggcaatggcatgatctcggctcaccgcaacctccacctcccaggttcaagtgattctcctgtctcaggctccccagtagctgggattacaggcatgcaccaccaccatgcccggctaattttgtatttttagtagagacggagtttctccatgttggtcaggctggtctcgaactcccgacctcaggtgatctgcctgcctcggcctcccaaagtgctgggattacagacttgagccaccgcgcccagctatttctgttttctttctttcttcttcttctttttttttttctaagagacaggatctcactctgtccccaggcaggagtgcagtgctgtgatcatagctcactgcagccttaacctcctgggctcaagtgatcttcccacctcagcctcccaagtagctggaactacaggtgcacaccaccatgcccagctcatttttgtattttttttttttttgagacagtctcgttctgtcaccccggctggagtgcagtggtacaatcttggctcactgcaacctctgcctcccaggttcaagcgattctcctgcctcagcctcctgagtagttgagattacaggcatgtgtgccatcatacctggctgatttttgtatttttttttagagatggggtctcagtatgttgaccaggcttgtcttaaactcccggcctcaagtgatcctcccacttcagtctcccaaagtgctgggattacaggcatgagccactgcggccggtttgttttcttttttttttcgttttttggagacggaatttcacctttgttgcccaggatggagtgcaatggcacgatatcgcctcaccacaacctctgcctcctgggttcaaaccattttcctgcctcagccttcttagtagctgggattacaagcatgtgccaccacgcccggctgattttgtatttttagtagagatggggtttctccatgttggccaggctggtctcgaactcctgacctcaggtcattcgcccacctctgcctcccaaagtgctgggattacaggcgtgagccaccgtgcccggtggtttgtattctttttactgagagtcgtgaaaggcagtgatcctctgtcacatgtgatcttggctctcaggggacatttggcaatttctagagattttttggttgtcacaagtcaatggggaagactgttggcatttagtgggtagaggctggtgacgctgctgaacacccagaacagggaagtagcaggccctagatagagccatcgtggggaaaccctgctctaaggaaatggcgctattttataaccccacgttcctggcatgattaccaacagccaaaagtggagtccccccaagtgtgttcgtccatttgcattgcagtaaaggaatagctgaggccgggtaatttataaagaaaagagatttaaactgggtatggcagtttatgcctataatcccagaactttgggaggctgaggcaggaggatcgcttgagtccaggagtgtgagaccgagaccagcctggccaacatgacgaaactctgtctctacaaaaaatacaaaaagtaggccaggcacggtggttcacgcctgtaatcccagcactttgggaggccgaggcgggcggatcacgaggtcaggagatcgagaccatcctggctaacacggtgaaaccccgtctctactaaaaatacaaaaacaaaattagccgggtgtggtggcaggcgcctgtagtcccagctactcgggaggctgaggcgggagaatggcgtgaacccgggaggcggagcttgcagtgagccaagatcgcgccactgcactccagcctgggtgaccgagttgagactccgtctcaaaaaaaaaaaaaaaaaaaaaaatacaaaaagtagccaggtgtggtggcaggcacctgtaatcctgggttctcgagaccgaggcatgagaattgcctgaccccaggaggtggaggctgcagtgagccaagatcatgccactgcactccagcctgggcgacagagtgggactctgtctcaaaaaacaacaaaaaaaaagttctggaaatggatggtggtgatggtgatacttccacaacagcgtgaatctgcttaaggccaccgaactgtgcactcacaaatagtcgagatggtacattttatgttatgtgtatttcaccacaattaaaaactagttgtgggccaggtgtggtggttcatgcctgtaatcccagcactttgggaggtcagagggaggtggatcatgaggtcagcagttcgagaccagccaggccaacatggtgaaaccccatctctactaaaaatacaaaaattagccaggcgtggtggcacatgcctgtagtcccagctacttgagaggctgaagcaggagaatcgcttgaacctgggaggctaagattgcagtgagccgagatcgtgccactgcactccagcctggacgacagagtgagacttcgtctcaaaaaaaaaaccaaaaaaaaaattagctgtgggtcaggcactgtggctcacgcctgtaatcccagcactttgggagaccgaggtaggtggatggcctgaggtcaggagttcgaatccagcctggccaacatggtgaaagcccgtctctactaaaaatacaaaaaattagtcaggtatgttggcacacctgtaatcccagctactcgggaggctgaagcaagagaatcgtttgaacccaggaggtggacgttgcagtgagccgagattgggccactgtactccagcctgggcaacaaaagtgaaactctgtctgaaacaaacaaacaaacaaacaaacagacaaacaaaaaaactagttgtggagagagggtggcctgtgtctcatcccagtgtttaacgggatttgtcatcttccttgctgcctgtttaggacaaagtattttggacagatatcatcaacgaagccattttcagtgccaaccgcctcacaggttccgatgtcaacttgttggctgaaaacctactgtccccagaggatatggttctcttccacaacctcacccagccaagaggtaagggtgggtcagccccacccccccaaccttgaaacctccttgtggaaactctggaatgttctggaaatttctggaatcttctggtatagctgatgatctcgttcctgccctgactccgcttcttctgccccaggagtgaactggtgtgagaggaccaccctgagcaatggcggctgccagtatctgtgcctccctgccccgcagatcaacccccactcgcccaagtttacctgcgcctgcccggacggcatgctgctggccagggacatgaggagctgcctcacaggtgtggcacacgccttgtttctgcgtcctgtgtcctccaactgccccctcctgagcctctctctgctcatctgtcaaatgggtacctcaaggtcgttgtaaggactcatgagtcgggataaccatacttttcttggatggacacatcagcaccgggcttgacatttacccagttcccctttgatgcctggtttcctctttcccggccccctgaagaggtgatctgatttctgacaggagccctgagggaggaaatggtcccctttgttgacttttctttttctttatttttttcttttgagatttgctgtcacccagcctggaatgcagtggtgccatcttggctcactgctacctctcccactgggttcaagcaattctcctgcctcagcctcccaagtagctgggattacaagcatgcgccaccatgcctggctaagttttgtatttttagtacagacagggtttctccatggtggccaggctggtcttgaactcctgacctcaggtgatcctcccacctctgcctcccgaagtgctacgattacaggcatgagccaccgcgcccatccccctttgttgacttttctcatcctctgagaaagtctcagttgaggccagcacctccctcaagtgaattgaatctcccttttgaacaacaacaaataacaatatgacccagacgtggtggctcacacctgtggtcccagctactcgggaggctgaggtgtgaggattgcttgagcccaggaggtcaaggctacagagagctataatcacaccacttcactccagcctgggggacaaagtgaaaccctgtctgaaaaaaacaaaaaaagaaaaaggaaaaagaaacaatacgatcacaaagtagatattcatagtgtttattttcagtactcttttttttttttttttttttttttgagacggagtcttgctctgttgcccaggctggagtgcagtggcacgatcttggctcactgcagcctctgcctcccaggttcaagcgcttggctcactgcaacctccgcctcctgggttcaagcgcttcttctgcctcagcctccccagtagctgggactataggcacgtcccactacgcccagctaattttttgtattttttagtagagatggggtttcactatgttagccaggatggtctcgatctcctgacctcgtgatctgcctgccttgggctcccaaagtgttgggattatgggcatgagccactgcacctggccttttttttttttttttttgagatggagtttcgctcttgttgcccaggctggagtgcaatggtgtgatctcggctcactgcaacctctgcctcctgggttcaagcaattctcctgcctcagcctcccgagtagctgggattacaggcacctgccaccacgcctggctaatttttgtacttttagtagagacggggtttctccatgttggtcaggctggtctcaaactcctgacctcaggtgatccacccacctcggcctcccaaagttctgggattacagacatgagccaccgcgcctggccgtgtctggccttttttagttatttcttttttttttttttttttttttgagacagagtcttactccgtcgcccaggctggagtgcagcggtgcgatgtctgcgcactgcaagctccgccccctgggttcatgccattctcctgcctcagccttctgagtagctgggactgcaggcgcctgccactacgcccggctacttttttgtatatttagtagagatggagtttcactgtgttagccaggatggtctcgatctcctgactttgtgatccgcccgcctcggcctcccaaagtgctgggattacaggcgtgagccaccatgccaggcttttttttttttttttttttttgagacggagtcttgctctgtcgcccaggctggagtgcagtgccatgatctcagctcactgcaagctccacttcccaggctcacgccattctccagcctcagcctcccaagtagctgagactacaggggcccgccaccacactcggctaatttttttgtatttttagtagagacggggtttcaccatgttagccaggctggtcttgaactcctaacctcaggcgattcacctgcctcggcctcccaaagtgctgggattaaaggtatgagccacctcgcctggtgtgagccacctcgcccagcctgagccacctcacccagcctaagccactgtgcctggcctgattttggactttttaaaaattttattaataattatttttgggtttcttttttttgagacagggtcttactctgtcatccaggccatcctgtctgtctgtcatcccagtgatgggatcataccttgctgcagcctctacctcctgggctcaagcgatcctcccccctcagcctcctgagtagctgggagtacaggtgtgcaccaccacacctggctaatttttttttttttttttgtatatagagatggtattttgccatgttgaccaggctagtcttaaactcctggactcactcaagagatcctcctgccttggcctcccaaggtcatttgagactttcgtcattaggcgcacacctatgagaagggcctgcaggcacgtggcactcagaagacgtttatttattctttcagaggctgaggctgcagtggccacccaggagacatccaccgtcaggctaaaggtcagctccacagccgtaaggacacagcacacaaccacccggcctgttcccgacacctcccggctgcctggggccacccctgggctcaccacggtggagatagtgacaatgtctcaccaaggtaaagactgggccctccctaggcccctcttcacccagagacgggtcccttcagtggccacgaacattttggtcacgagatggagtccaggtgtcgtcctcactcccttgctgaccttctctcacttgggccgtgtgtctctgggccctcagtttccctatctgtaaagtgggtctaataacagttcttgccctctttgcaaggattaaatgggccaaatcatatgaggggccaggtccttcaggctcctggttcccaaagtcagccacgcaccgtgtgggtcccaaaattttatcaaggcacattcgttgcctcagcttcaggcatctgcccaaaaaggccaggactaaggcaaggagagggagggattcctcagtactcagcttttcacagaggctccaaaaggctaaggaatccagtaacgttttaacacaattttacaatttttttttttgagacggagttttgctcttgttgcccaggctggagtgcagtggcacgatctcggctcactgcaacctctggctcccgggttcaagcgattctcctgcctcagtctcccgagtagctgggattacaggcatgcgccaccacgctcggctaattttgtatttttagtacagaaggggcttctctgttggtcaggctggtcgtgaactctcaacctcaggtgagccacccgcctgagcctcccaaagtgctgggattacaggtgtgagccaccacgcctggccttttttttgagacagagtctcgctctcgcccatgctgtactgcagtgacgcagtctgggctcactgtaacctccgcttcccaggttcaagtgattcttctgccgcagcctcccatgtagagtagctgggattacaggcacccgccaccatgcctggctaattcttgcatttttagtagagatggggtttcacagtgttggccaggctggtctcaaacttctgacctcaagtcatctgcctgccttggccctgccaaagtgctgggattatagatgtgagccaccgcgcctggcctacagtttattctttggtggctcacacctgtaatctcagcactttgggaggccaaggtgggagaatggcttgagcccaggagttcaagtccagcctgggcaacatagcaagaccctatctctactacaaaataaataataaataaactaattttttttcttttaaaacccaactattcaacatggcaatgcaatatattaaaaaaattttttttttctttgaaacggagtctctcactgtcacccgggctggagtgcagtgtcgccatcttggctcactgcaacctccgcctcccaggtccaagtgattctcctgcttcagcctcccgagtagctgggattacaggcacccaccaccatacccagctaatatttttgtatttttagtagagatggggtttcactatgttgggcaggctggtctggaactcctgacctcgtgatctgcccgaggatcggcggcctcccaaagtgctggggattgcaggcatgagccaccgtgcccagccaaaacttttttatttttatttttttgggacacggtctcactgtgtaccccagactggagtgatagagtgctgtcatggctcactgcagcctcaacctccctgggctcaggtgatcttcctgcttcagtctcccaggtagctgggactacaggcatgagccaccacacccagctaatttttgaatttttttgtagagacagggtttcaccttgtggcccagacttgtctctaactccagggctcaagcgatctgcccaccttggcctcccaaagtgctgagattaatgcaatttaaaaaattttttggccaggcctggtggctcatgcctgtattcacaacaccttgggaggcaaaggtgggcagatcacttgaggtcaggagttcgagactagcctggccaacatggtgaaaccccctgtctactaaaaaaatacaaaaattacctgggcacagtggtgggtgcctgtaatcccagctacttgggatgctgagggtggagaattgcttgaacctgggaggcagaagttgcagtaagccaagatcatgccactggactccagcctcagtgacagagcaaaactctgtctccaaaaaaattgttttttttttttttttttcaaatcatcacactacagccaaggcctggccacttacttttgtaaataaagttttattggagccagtggaccagtgaggccgaatcttgcaggtgtaagatcacagtctatccttgaaaattttgatattttgttcattgggtggtttttcattaatttaaattttaaaaaataacatattaaaggctggtgtggaggtgcacgcctgcagtcctagctactcccagaggctgaggcgggagacttgcttgagcccaagagttgaagtccagcctgggcaacatagcgagacccccatctctaaaaataaaaataatgcattagaatattattggattcctgggcagggcacagtggctcacacctgtaatcccagcactttgggaggctgaggtgggtggatcacctgaggtcaggagtttgagaccagcctggccaacatggtgaaaccccgtctctactaaaaatacaaaaattagccaggcgtggtggcaggtgcctgtaatcccagctactcgggaggctgaagcacgagaatcgcttgaatccaggaggcggaggttgcagtgagctgagattgcgccattgcactccagcctggaggacaagagtgaaactccattcccctctgcaaagaaaaggaatattatcagattcctaagctttttggctccccctttagtttgggggctggggtggtgagtgtctgacctggcctcactgtcctccctggatgtgatgagacccaggtgtgggtcaggatgtcattcgtttgtccaccagagggcgcccaaactgctttgagctgctgggaaatggtgctcctagacttttagcaaacaaacaaaaaaaaatggcacatcggcaaatttcagaccattctttttttttttttttttggttccagagtagctgaaatctttgttcagttacaagcaggataaaatggaaactgcctgggagaggctgagaaaccttcttgcttgggggaggtggggcactgctagaattaatcgcttcacagaccagcccatccaggactcctcaaatttggcaaaaaagccattcattcattcattcatttatgtagagacgagggggatctggctatattgcctagattggtctcaaattcctggcctcaagtgatcctcctgccttggtctactaatgtgctgcgattacaggcatgagccaccgtgcctagctctagtggacttgaaatgttgccttgcccagggcccttatgttgaatggcccaggtccacttgtatggttctgtaccaaggttaaccccatcccataatgcctgggacagttgatgcaggacaatcagcttctgtgccattcaacctcaggactgagcatgctgggcattgtggggtccgaaggtggctcccctgtccccttcaaaataccctctttttcttttcttcttttttttttttttttttttttgagacgaagtcttgctctgttgccccagctagagtgcagtggtgcgatctcagctccccgcaacctctgcttcccgggttcaggcgattctcctgcctcagcctcctgagtagctgggattacaggtgcccaccgccacggctggctaatttttgtatttttagtagagacagggtttcaccgtgttggccaggctggtcttgaactcctgacctcaggcaacctgcccacctcagcctcccaaagtgctgggattacaggtttgagccactgggcctaggccgtttttttttttttttgagagggagtctcactctgttgcccaggctggagtgcaatggcgcgatcttgactcactgcaactccatttcccgggttcaagtgattctcctccctcagcctcccaagtagctgggattacaggtgcatgccaccacggccagctaattttgtatttttagtagagacagggtttcactatgttgatcatgctggtctcaaactcctgaccttaggtgatctgcccgccttagcctcccaaagtgttgggattacaggtgtgagccaccgcgcccagaccaaaatatgctcattttaataaaatgcacaagtaggttgacaagaatttcacctgcaaccttgtcaaccacctagaataaaagcctctgcagccctcccctaaagactcatcaatgtgaggctcaagaaccttcttaggctgggctcggtggctcatttctgtaatccctgcactttggaaggctgaggcaggaggatctcttgaggccaggagttcaagacaagcctgggcaacatagccagacctctgtttctatcccccacaaaaagaaccttcttaaaccggaattgagtcctacaacctcgataactcacaaataagcccgtgtggcctctcgcagacttgggaagttctccaagtgtccagggagatgtgccaggcgctttcctgccgtgaccaccgtcctctgcctgctccatttcttggtggccttcctttagacctgggcctcactcttgcttctctcctgcagctctgggcgacgttgctggcagaggaaatgagaagaagcccagtagcgtgagggctctgtccattgtcctccccatcggtaagcgcgggccggtcccccagcgtcccccaggtcacagcctcccgctatgtgacctcgtgcctggctggttgggcctgttcactttttctcctggacagggaacagccccactggtgtcctttatcacccccacggcctctcctggcttggggctgacagtgacaagatcagacagctaaggggtcagatggaggatgtggagctgggtcccgtgctgtggaatagcctcaccgagatttgagtgccttctggggaactggttcccttgcagggggctgtgtggagaggcgcgctctccctgcctcacccatgctcatcctaactcggttaccatcacatctcttttttctttttttcttaaattttaagaaaaaagaaatttaatttttttgagagacagagtcttgctctgtcacccaggctggagtgcagtggcaccatcatgcctcgctgcagcctcaatgtctgggctcaagcgatcctcccacctcagcctcctgagtagctggtgcaagccactataccccacttcctatttcttaaaaagtcacagccctgtgtgtggctaatcctggacagaaatctagaagaagtcagctacttctggggcgtggctcacccagtgggcttcaggttagatatttcttatacttatgaggctgggtgtggtggcttatgcctgtaatcccagcactttgggaggctgaagtgggtggattgcttgggctcaggagttcgagaccaacctgggcaacatggcgaaaccctgtttctagaaaaggtacaaaaattagctgggcaggtggcacgtgcctgtggtaccagctacttgagggcctgaggcaggaggatcgcttgaacctgggaggtcgaggttgcagtgaactgagatcatgtcactgcactccagcctggtgacagagcaagaccccgtctcaaaaaaaaaaaaagaaagaaaaaaattcttatgcatagatttgcctcttttctgtttgtttgttttgagatggagtctcgctctgtcgcccaggctggagtacagtggctcaacctcggctcactgcaacctctgcctcccgggttcaagcaattctcctgcctcagcctcctgagtagctgggactacaggcgcccgccaccatgcccagctaatttttgtatttttagtagagactgactgggtttcatcatgttggccaggctggtctcgaactcttgacctcatgatccgcccgcctcagcctcccaaaatgctgggattacaggcgtgagccaccaggcccaggccgcaaggcgatctctaaacaaacataaaagaccaggagtcaaggttatggtacgatgcccgtgttttcactccagccacggagctgggtctctggtctcgggggcagctgtgtgacagagcgtgcctctccctacagtgctcctcgtcttcctttgcctgggggtcttccttctatggaagaactggcggcttaagaacatcaacagcatcaactttgacaaccccgtctatcagaagaccacagaggatgaggtccacatttgccacaaccaggacggctacagctacccctcggtgagtgaccctctctagaaagccagagcccatggcggccccctcccagctggaggcatatgatcctcaagggaccaggccgaggcttccccagccctccagatcgaggacagcattaggtgaatgcttctgtgcgctcattcagaatgtcagcggacaatggccttggtggtgtagaggaatgttggataagcaaatagagagctccatcagatggtgacagggcaaagaaagtcaaaaggagttcagaggccgggcgcggtggctcatgcctgtaatcccaggactttgggaggccgaggctggcggatcacctgaagtcaggagtttgagaccagcttggccatcatgacaaaaccccgtctctattaaaaatacaaaaaattagccaggcgtgggagtgggcgcctgtaatcccagctactcgggaggccgaggtagaaaaatcgcttgaacctaggaggcagaggttgcagtgagccgagatcgcgccactgcattccagcccgggaggcaagagcaaaactccatctcaaaaaaaaaaaaaaaaggagttcagaggcccggcatggtggttcacacatgtgatcccagaacttggggaggttgaggcaggagaatcacctgagctcagagttcaagaccagcctgggcagcacagcaagaccccatctctgcaaaaaataaaaatttagcccagtgtggtgatgagcgcctagttccagctactagggaggctaaggcaggaggattgcttgaggctaaggtaggagattgagactgcagtgacttgtgattgcgtcactgcgctccagcctgggtgacagagcaagcccttgtctcttaaaaaaaaaaaaaaattcaaagaagggtttccagagggccaggagggaggaagggagaggaggtgttttatttttttgcttttattttttattttgagacagagtctctctctgtcacccaggttggagtgcagtgctgtgatcttggctcactgcaacttctgcctcctgggttcaagcaattcttatgcctcagcctcagcctcctgagtagctgggattacaacactatgcccgggtaatttttgtatttttagtagagacgaggtttcgccatgttgcccagactggtctcgaactcctgacctcaagtgatccacccgccttggcctccccacgtgctgggattgcaggcgtgagccactgcgcccgccttgatctttacacaaggggtttagggtaggtagccttctctgaaccaggagaacagcctgtgcgaaggccctgaggctggaccgtgcctgttgggtttgaggccgttgtagctggagcaaacagagagaggggtaaaaaggcaggaggctaccaggcaggttgtgcagagccttgtgggccactggggaggactttggcttttgccctgagagcggtgggaagtgactgaatccggtactcaccgtctccctctggcggctcctgggggaacatgcttggggatcaggctgggggaggctgccaggcccaggaggtgagaagtaggtggcctccagccgtgtttcctgaatgctggactgatagtttccgctgtttaccatttgttggcagagacagatggtcagtctggaggatgacgtggcgtgaacatctgcctggagtcccgtccctgcccagaacccttcctgagacctcgccggccttgttttattcaaagacagagaagaccaaagcattgcctgccagagctttgttttatatatttattcatctgggaggcagaacaggcttcggacagtgcccatgcaatggcttgggttgggattttggtttcttcctttcctcgtgaaggataagagaaacaggcccggggggaccaggatgacacctccatttctctccaggaagttttgagtttctctccaccgtgacacaatcctcaaacatggaagatgaaagggcaggggatgtcaggcccagagaagcaagtggctttcaacacacaacagcagatggcaccaacgggaccccctggccctgcctcatccaccaatctctaagccaaacccctaaactcaggagtcaacgtgtttacctcttctatgcaagccttgctagacagccaggttagcctttgccctgtcacccccgaatcatgacccacccagtgtctttcgaggtgggtttgtaccttccttaagccaggaaagggattcatggcgtcggaaatgatctggctgaatccgtggtggcaccgagaccaaactcattcaccaaatgatgccacttcccagaggcagagcctgagtcaccggtcacccttaatatttattaagtgcctgagacacccggttaccttggccgtgaggacacgtggcctgcacccaggtgtggctgtcaggacaccagcctggtgcccatcctcccgacccctacccacttccattcccgtggtctccttgcactttctcagttcagagttgtacactgtgtacatttggcatttgtgttattattttgcactgttttctgtcgtgtgtgttgggatgggatcccaggccagggaaagcccgtgtcaatgaatgccggggacagagaggggcaggttgaccgggacttcaaagccgtgatcgtgaatatcgagaactgccattgtcgtctttatgtccgcccacctagtgcttccacttctatgcaaatgcctccaagccattcacttccccaatcttgtcgttgatgggtatgtgtttaaaacatgcacggtgaggccgggcgcagtggctcacgcctgtaatcccagcactttgggaggccgaggcgggtggatcatgaggtcaggagatcgagaccatcctggctaacacgtgaaaccccgtctctactaaaaatacaaaaaattagccgggcgtggtggcgggcacctgtagtcccagctactcgggaggctgaggcaggagaatggtgtgaacccgggaagcggagcttgcagtgagccgagattgcgccactgcagtccgcagtctggcctgggcgacagagcgagactccgtctcaaaaaaaaaaaacaaaaaaaaaccatgcatggtgcatcagcagcccatggcctctggccaggcatggcgaggctgaggtgggaggatggtttgagctcaggcatttgaggctgtcgtgagctatgattatgccactgctttccagcctgggcaacatagtaagaccccatctcttaaaaaatgaatttggccagacacaggtgcctcacgcctgtaatcccagcactttgggaggctgagctggatcacttgagttcaggagttggagaccaggcctgagcaacaaagcgagatcccatctctacaaaaaccaaaaagttaaaaatcagctgggtacggtggcacgtgcctgtgatcccagctacttgggaggctgaggcaggaggatcgcctgagcccaggaggtggaggttgcagtgagccatgatcgagccactgcactccagcctgggcaacagatgaagaccctatttcagaaatacaactataaaaaaataaataaatcctccagtctggatcgtttgacgggacttcaggttctttctgaaatcgccgtgttactgttgcactgatgtccggagagacagtgacagcctccgtcagactcccgcgtgaagatgtcacaagggattggcaattgtccccagggacaaaacactgtgtcccccccagtgcagggaaccgtgataagcctttctggtttcggagcacgtaaatgcgtccctgtacagatagtggggattttttgttatgtttgcactttgtatattggttgaaactgttatcacttatatatatatatatacacacatatatataaaatctatttatttttgcaaaccctggttgctgtatttgttcagtgactattctcggggccctgtgtagggggttattgcctctgaaatgcctcttctttatgtacaaagattatttgcacgaactggactgtgtgcaacgctttttgggagaatgatgtccccgttgtatgtatgagtggcttctgggagatgggtgtcactttttaaaccactgtatagaaggtttttgtagcctgaatgtcttactgtgatcaattaaatttcttaaatgaaccaatttgtctaaactcgatgcacgttcttctgttcgcgcgcttctttttgtttttttttttttcctgagatggagcctggctctgtcacccctggctggagtgcagtggcatgatctcggcttactgcaagctccgcctcccaggttcaagcaattctcctgcctcagcctccctagtagctaggattacaggtgagtgccaccacgcctggccaattttttttttttttttttttttgagacagagtctcgctctgtcacccaggctggagtgcagtggtgtgatctcggctcactgcaagctctgcctcccaggttaatgccattctcctgtctcagcctcctgagtagctggggccacaggcgcctgccaccacgcccggctaatttttttttgtacttcttttagtacagacggggtttcaccatgttagccaggatggtctcgatctcctgaccttgtgatccacctgcttcggcctcccaaagtgctgagattacaggcgtgagccaccgcgggtggccaacgctaatttttttgtttttttagatggagtcttgctctgtcgcccaggctggagtgcagtggcgtgatctctgcctactgcaagctccgcctcccgggttcatgccattctcctgcctcagcctcctgagtaactgggactacaggcacccgccaccacgcccggctaattttttgtatttttagtagagacagggtttcaccgtgttagccaggatggtcttgatctcctgaccttgtgatccacccgtctcggcctcccaaagtgctgggattagaggtgtgagccaccacacctggcctagcctggctaatttttgtatttttggtagagacggggtttcaccatgttggtcaggctggtcttgaacttctgacctcaggtaatctgcctgcctcagtctcccaaagtgctgggattacaggtgtgagccaccgcgcctggcctcacttccttctgtcatctgtttgtggattggactccccaggagaaggacccagaaggggaagactcccagaactccgggcaagatgcaatctccgtgggctgccacagtgcctggcaggtgctgtgatggctgagctggtgattgtgttctctgctgtcgcttctctgagttggagattttgtcaagtcccctgctcatccattcatacactcgacaaatatctgttgagtgctaagtgcgaaccatgctctgccgtaggcttgtgggacactacaggggatataagaaatgaaagccgggtgtggtggctcacacctgtaatcctagcagtttgggaggccgaggcgggcagatcatgaggtcaggagatcgagaccatcctagctaacacagtgaaaccccatctctactaaaaatacaaaaaattagccaggcgtggtggtgggcgcctgtagtcccagctgcttgggaggctgaggcaggagaatagcgtgaacctgggagttggagcttgcagtgagccgagatcgcaccactgcactctagcctgggcaacagagcaagactccatctacaaaaaaaaaaaaaagaaatgaagtcttgatacggtggctcatgcctgtaatcccagcactttgggaggccaaggcaggcggatcacgagctcaggagatcgagaccatcctggccaacgtggcgaaacccagtctctactaaagatacaaaaaattagccaggcatggtggcgggcgcctgtagtcccagctacttgggaggctgaggcaggagaatggcatgaacccaggaggcagagcttgcagtgagctgagatcgcgccactgcactccagcctgggcgacagagcgagactctgtctcaaaaaaaaaacaaaaaagaaatgaaaatctccctgtctgtccttaaggacctgac

SEQ ID NO: 25015 - DNA, 2327 bp, Homo Sapiens
gcgcggggcggggcttccgggcggggcaggctggcttccggcgggagcggggccgcggatggccgtatacagggcagcgctcggggcttcgctcgcggctgcccgactcttgcccctcggtcgctgttccccgtcgccggcgccccgctctacgttgtcgggcgccgccatggagcccgcgcctcgctggctggcggggctgcgcttcgacaaccgcgccctgcgcgccctgcccgtggaggcgccgccgcccggtcccgagggcgccccgtccgcgccgcggcccgtgcccggggcctgcttcacccgcgtgcagcccaccccgctgcggcagccgcgcctcgtggcgctgtcagagcccgcgctggcgttgctgggcctgggcgcgccgcccgcgcgcgaggccgaggccgaggccgcgctgttcttcagcggcaacgcgctcctgccgggcgccgagcccgccgcgcactgctactgcggccaccaattcggccagttcgccgggcagctgggcgacggcgccgccatgtacctgggcgaggtgtgcacggcgaccggcgagcgctgggagctgcagctcaagggcgccgggcccacgcccttctccagacaggccgacggtcgcaaggtcctacggtcaagcatccgggagtttctatgcagcgaagccatgttccacctgggagtccccaccacacgggccggcgcctgcgtcacgtccgagtccacggtggtgcgcgacgtgttctatgatggtaatcccaaatatgaacaatgcacggttgtgttgcgtgtagcttccactttcataaggtttggatcctttgagatttttaagtctgcagatgagcacacagggcgtgcaggccccagcgtggggaggaacgacattcgagtgcagctgctcgactatgtcatcagctccttttaccccgagatccaggctgctcatgccagcgacagcgtgcagagaaatgctgccttcttccgggaggtgacgcggcgcacggcgcggatggtggccgagtggcagtgtgtgggcttctgccacggcgtgctcaacaccgacaacatgagcatcctggggctcaccatcgactacgggccctttggcttcctggacaggtacgaccccgaccacgtgtgcaatgcctccgacaacaccggccgctacgcgtacagcaagcagcccgaggtgtgcaggtggaacctgcggaagctggccgaggccctgcagccggaactgcccctggagctgggggaggccatcctggccgaggagtttgacgccgagttccaaaggcactacctgcagaagatgcgcaggaagctgggcctcgtgcaggtggagctggaggaagacggggcgctggtgtccaagctcctggagaccatgcatctgaccggtgccgacttcacaaacaccttctacttgctgagctccttcccagtggagctagagtcgccaggcctggcggaattcctggccaggctgatggagcagtgtgcctccctggaggagctgaggctggccttccggccccagatggatccccggcagctatccatgatgctgatgctggcgcagtcaaacccgcagctgttcgcgcttatgggcacccgggcaggcatcgccagggagctggagcgtgtggagcagcagtctcggctggagcagctgagtgcggcagagctgcagagcaggaaccagggccactgggctgactggctacaggcgtacagagcccggctggacaaggacctggaaggcgctggggacgctgccgcctggcaggctgagcacgtgcgcgtgatgcacgccaacaacccgaagtacgtgctgaggaactacatcgcgcagaatgccatcgaggctgccgagcgcggggacttctcagaggtgcggcgggtgctgaaactactggagaccccttaccactgcgaggcgggggccgccacagacgccgaggccacggaagccgacggggcggacggcaggcagcgctcctacagcagtaagcccccgctctgggcagcagaactgtgcgtgacatgatcttcgtaacggcctcggcacgctccacacccctggagtctcccgaggcccccatgtgctgctgagtggccaagatgatgccaggctgccctatacactgggggattctgccctggcccatgcacacccgtctttccatgatggcagagacatccagtcaggacctgacccgtctctgtctgaggccggctcagcagtgcagcctggtccctgggggctggacccaggctcctaaataaaccagcaactccctcgaaaaaaaaaaaaa

SEQ ID NO: 25016 - DNA, 2048 bp, Homo Sapiens
ggctgctgggctggcggggcgcaggccgcgggwcccgagcccggggaagcgagagagcggaggcgccgaggatccgattcactccctggggagacctatgggccgaagccgtgtaaatgcgttttaagaggcctcggctccgcaactgccactcctcctcggggtgttgcacaagtttcgaggtcaccggcgaccccccctagcagcgcgcctggctctggcccccgcgaaggaggacggagtttgtgtgttgcatactttctaaggcggcggctgcagcagcggctccatccagcccgtcagctcctcctgcaaggcatggctggctacctgagtgaatcggactttgtgatggtggaggagggcttcagtacccgagacctgctgaaggaactcactctgggggcctcacaggccaccacggacgaggtagctgccttcttcgtggctgacctgggtgccatagtgaggaagcacttttgctttctgaagtgcctgccacgagtccggcccttttatgctgtcaagtgcaacagcagcccaggtgtgctgaaggttctggcccagctggggctgggctttagctgtgccaacaaggcagagatggagttggtccagcatattggaatccctgccagtaagatcatctgcgccaacccctgtaagcaaattgcacagatcaaatatgctgccaagcatgggatccagctgctgagctttgacaatgagatggagctggcaaaggtggtaaagagccaccccagtgccaagatggttctgtgcattgctaccgatgactcccactccctgagctgcctgagcctaaagtttggagtgtcactgaaatcctgcagacacctgcttgaaaatgcgaagaagcaccatgtggaggtggtgggtgtgagttttcacattggcagtggctgtcctgaccctcaggcctatgctcagtccatcgcagacgcccggctcgtgtttgaaatgggcaccgagctgggtcacaagatgcacgttctggaccttggtggtgscttccctggcacagaaggggccaaagtgagatttgaagagattgcttccgtgatcaactcagccttggacctgtacttcccagagggctgtggcgtggacatctttgctgagctggggcgctactacgtgacctcggccttcactgtggcagtcagcatcattgccaagaaggaggttctgctagaccagcctggcagggaggaggaaaatggttccacctccaagaccatcgtgtaccaccttgatgagggcgtgtatgggatcttcaactcagtcctgtttgacaacatctgccctacccccatcctgcagaagaaaccatccacggagcagcccctgtacagcagcagcctgtggggcccggcggttgatggctgtgattgcgtggctgagggcctgtggctgccgcaactacacgtaggggactggctggtctttgacaacatgggcgcctacactgtgggcatgggttcccccttttgggggacccaggcctgccacatcacctatgccatgtcccgggtggcctgggaagcgctgcgaaggcagctgatggctgcagaacaggaggatgacgtggagggtgtgtgcaagcctctgtcctgcggctgggagatcacagacaccctgtgcgtgggccctgtcttcaccccagcgagcatcatgtgagtgggcctcgttccccccggagaatcccagcggggcctcagagatgcatctgggagaggtggggaagatggcaggcaagggtacccttggccaggactctggtgcccaccctgccacccccgcgctccacctgcagtgtttctgccctgtaaataggaccagtcttacactcgctgtagttcaagtatgcaacataaatcctgttccttccagctgtgtctgcctcctctgcagtgcaaggggcctggtcagccaggtgtgggggtgttcttggggtctcctttggtctccttcccacctttgtaaatataatgcaaataaataaatatttaggtttttaaaaactg

SEQ ID NO: 25017 - DNA, 1228 bp, Homo Sapiens
cggcgcggcgcggctcagtagttccccgggcgcccggctccctggcgttagacgtgctgtgttgtgatcacgtgggcagctccgggcgcggcgcttgttttggtttccttctaacttgcccacggcagcttcggggtgagcgactttcctgcaccagctgccgcgcctgctcacaccctgacctcgttttcgggctctctgagcccgcagttccgcaagcccctggggcgggctcctgccatgccgctagtccgctacaggaaggtggtcatcctcggataccgctgtgtagggaagacatctttggcacatcaatttgtggaaggcgagttctcggaaggctacgatcctacagtggagaatacttacagcaagatagtgactcttggcaaagatgagtttcacctacatctggtggacacagcagggcaggatgagtacagcattctgccctattcattcatcattggggtccatggttatgtgcttgtgtattctgtcacctctctgcatagcttccaagtcattgagagtctgtaccaaaagctacatgaaggccatgggaaaacccgggtgccagtggttctagtggggaacaaggcagatctctctccagagagagaggtacaggcagttgaaggaaagaagctggcagagtcctggggtgcgacatttatggagtcatctgctcgagagaatcagctgactcaaggcatcttcaccaaagtcatccaggagattgcccgtgtggagaattcctatgggcaagagcgtcgctgccatctcatgtgagcccttgggtgtggggtaactgccttgcttctgcccccggcacttgccatgttccagtggggggcagatcctcaggacttcacgggtatggttgccagctgtgttcctggcccctggacacacagtgtggcatcctcatgtttgcacactttccccaggctccagtggcctggatgtcaatgtttacaaaggggcaaggacctctcatggacactggcctctagccctctgtttttgtttgatgaattctgttataacctatggggtcaggatatgagtcctgggcattatttatccaggacccatcctcttgggtgggttttgggtgttggctgggtaaggggagccggggacttctgaaatagagctggctccctggggtgacaatgtatatatgcaaataaattgagaaatctttaaaaaaaaaaaaaaaaaa

SEQ ID NO: 25018 - DNA, 1319 bp, Homo Sapiens
ctccacaccgccttgcaagctgagggagccggctccggcctctgccagcccaggaaggggctcccacagtgcagcggcgggctgaaggactcctcaagtgccaccaaagtgggagcccaggcagaggaggcgccgagagcgagcgagggctgcctgccagcacgctgtcacgtctcagcaatagactgctcttgaggctggagtgcaatgttgttatcatagctcactgcaacctggaacccctagtctcaagagatcctccagcctcagcctccctgggatggctatttttgttacttctgaattctactacaaaagagtgctgcaataaaaatctttgaacaagttctaatgccgttcaactggaattgaagttttcaatcgttggatatgtcaaaatttaatcagattgtatattgctcaattactttcaaattatgtacaccaagtcattcttgctctggcaaaataagaatattttcattaatatatcattcaacttgaaattgcccagcttttccttctcatttccccccagtcaaatgagttgaattaatactgtctaaaaatatatattcatttgcttacctgttagtatttgttccatgtattaagaagctttgctagtatatgaaaatatatgtattaccatgtcttgtgaattagtacttttatcattttgaaatgtttgttttcatttctgctgaccgttctaacctgggtatctattttgactggtttttaatgtaactactaacatctttttatgttcagcactttttcacaattttactttcaatgtctttatttttaaaatgtatcttctgtagacagtgtacaggtggtcttgttttattgtaaatcaagtgacaatctctatttcataattgacatatttaatccatatatatttaatttaattgttgttattttgagacttaatatccagttttactattttggcccatttatttttggtttattttagatgtcttgccttatcttagattgattgatatttttagtatttaattacatttcttttataaatgtaatttcttgaatatttgtttttattttagcaattgctctgggaatataaaaatcatctttaaaatctatttagagttaatggtactactttatgcagtaggtaaaaacatttcactagcacaatttcatttgcaggcacctaaccttctgtgatagtattgtcttatattgttatatttatgagatacaatcactacagtaaaatactattttctattcattgtgccatcttataaataaacagatgaataaacagatatttttga

SEQ ID NO: 25019 - DNA, 16004 bp, Homo Sapiens
tcacctcagatatcattgcttcaatcttggaaggcaacttggagtatttttcttgggcttcattcctagaagcagaaacatattcactttgagtctttgactctcacagatgtcaggtgcggtgaagtgtggttttatggtcttcacacagacgacatacaccagatttatcttagcaatatttgctcctctgagaaggaaatttcactgctcaagtctcaccttgaaatagattacttggagctgggcgtggtggtgtgctcctgtaacagctactggggaggctgaggcaggaggattgcttgcttgagaccaggagtttgaggctgcagtgagctatgaccacgccactgcactccagattaggccacagagcaagaccctattacacacacacagaagaaatagcttacctgctgctaagctactcctttttccttacatatagtaattgctgatgtgctggagctcaccgttcagcctgcaccatcccaggctaggggttaagatcaagaacattatttcatgtgcctggacttgagtcctggctctgccattactctgtgtgcccttgagcaaggcacattctccctctcagcttcagtttcctcatttctaaaggcagcttcgaggattatatgagctgatgtatgcaaagcacctaccacagggtctggcattgaccacaggctcaggaaacgttaagcgtttgtgttgtgaggctttgcaggtgatgaaactattcaactctgccgctgcaacgtgaaagcagccagagacaatatgtttacaccaattagtgtggctgtgtcccaagaaaactttatgaaaacggaatctcgaatttcgcacagtttttatgcatcacaaaacattttccaaccacttaaaaatgtaaccaccattcttagctcacaagctgcacaaaaccacgtggcaggctggatgtgacagacagcttgcaaccactcacctccgctaatcagagagtgacctgcaggcagtcttgggtgtgtttagagtttctcagtcccctgtccctgaaggatggctatttccaaacctgctggggaagggtgaggggcctgggttctaggggtctcacttcccctcttgtggcttcagtttccctgtccgtgccggcagggtgagcttttggctgtttccagctgcagcttcttaaggtggctgagactgtgtcatggcgaacacctgctgggtctctggttttcattttaaaacaacctgtgtgcggctgggcacggtggctcacgcctgtaatcccagcactttgggaggccgaggcaggtggatcacctgaggtcgagagttcaagaccaaccagcctgacaaacgtggagaaaccccatctctactataaatacaaaattagccggggtggtggcacatgcctgtaatcccagatactcgggaggctgaggcagaagaatagcttgaacccgggaggcggaggttgcggtgagccgagattgtgccattgcactccagcctgggcaaaaagagtgaaactccatctcaaaaaaaaaaaaaaaaaacaactttgtgcaaggcaagatatgagtatctttctgtgcatgtcctgagcccttgcctggtgcaaagccgcagggcagatcctgggagacccccctattccctcccttctggaagtgtctgggtattcttaggcctcccagcctttgcctctgctgtgctctctgcctgggatgcccacctggcttgtcatctcaagtgccacttcttggaagctcctcctgttaacctccctcccccacccaggatggaaggagaggcccctcccttgctcaccgcaggatggcactcactgcgctgtgtcattgtggcatgatgttccaccgaattgtttactcgctggcctccccattggatggagggctaccagagggccacagcccagaattgctggcctttagacctcagggcatgcagtctggagtgccagagttggtcaaatgaacaaatttaggatgaagaaataagataagcaggacttgcccttgtggtatctgtagtccagctccctagagaggctcttggttgcagctgaaagggcctgtgctgtgcatctacagagagtgttttgagtcctgcgagaagaaatacaccatatttgcaaaccctttgaaggttcatattttgtgttttttgctccctgaccacctcccacccctccccacgccccaccaatcttgggcaagaagcgagaccattctcctttttctctggtcactcctgtccttcagggggctccctctggccccgactgtccattgctgctgaagtaatgctgtggcctttctcagtttgggccccacccaaaaccgaagaacttctccccagaaagcttctacttggttctcagtgttttcacagttatgggaacccaagaacagtgtcagacctaggaggtgccccactaccaccctgtctttatcaatgttgtcaccaaagctgtcacaaacaatggggtgtgggctgtcacatggccctgcctaagtaaccacattctcgcttcctccttccacacacagccattgggggttgctcggatccgggactgccgcagggggtgccacagcagtgcctggcagcgtgggctgggaccttgtcactaaagcagagaagccacttcttctgggcccacgaggcagctgtcccatgctctgctgagcacggtggtaagtgctggcttgcaaaaccacagggagtggctggaggtccccatgggccaagggcctgccttatagctgctggcaggcccgggtaggaccgccaggcccttcttgagctgcagcacctggggagggcaaactgaggctcctccgactcaagactaaagtcttcctggagtctgtggccttattctgtgactcttctgaatcctgctcctgccaactttttttttccttctttttttgagacagggtcttactctgtcacccaggctggagtgcagtggcacaatcatggctcactgcagccttaaactcctgggcacaagtgatcctcccacctcagcctcctgagtagctgggactacaggcgcacatcgccgcatgcagctaatatttttacctttcctagagatggggtctcactttgatgccgaggctggtctcaaactcctggcctcaagcctcttgcgttggcctcccaaagtgctgaaattacaggtgtgacccaccagccccagcctcccattaacttacttccctccctggccagtttgcctgcagcgtctggcttggcggcattctgattttgaaaatcagagaaaccatgagtgtttccctagaaatgatcttatcctctcctttcctggatgggaaactgaggtcgggagaggtgaagggatttgtttaggggcagagctgagattaggtctggaagactccagaaagtagggggagtgcaggatttctcttgaagctgcatgttatggacgcataaaaaagttcttttcagagaaagatgcattcttcccactttttataagactgaggaaatgacacttgtctgtggcaaactattaaaatattagaattaagatactattgttagcaaaagggaaaacaataataataataataattagaatacttggctgggtgcagtggcttacacctgtaatcccagccctttgggaggccgaggcaggtggatggcctgagctcaggagttctagaccaacctgggcaacatggtgaaacctcgtctctaccaaaaatacaaaaacttagctaggtgtagtggtgtatgcctgtggtctcagctacttgggaggctgaggtgggaggatcacttgaacctgggagggggaggtcgcagtaagccgagattgtgccactgcactccaacccgggtggcagagtgagaccctgtctcaaaaaaaaaaaaattagaatactcttattagtttgtatttgagatactttcaggacactaaaaggaaatggtgggggccagttgtgccctgctgtacacacattcacacacacacacacacacacacacacacacacacacaccccatattgtcgatatctgggcttctgttgcctggaattctcttcctctttcctctttcttctgttttccttttttttccatctctgactttgaggcccccagagccaggcccctcagtgggccggggcctcagaaggtggctcccaggccctcagacagccccagagtctcttccgaggccgtgccctgggtggttgatgcctccctcagcaggcttggccagcagccaggggagttaaacctcagagagcggaagggctgggctgctaggctgggcccagagtggggcattcagaggagctggggaatcaatcatccgagaaccttggagggtggacagtgccccttttacagatgagaaaactgaggcttgaaggggagaagcagctgcctctggcggcatggcttctggctgcaggatgcccatggagttcgtggtgaccctaggcctgtgtctcggcttcctttgctgaacttgaacaggaagatggcagtgggggccagtggtctagaaggagataagatggctggtgtgtgtgtgttgggggtctgtgtttgttaatctgtctgtctacacaggggtgtttagaaaactgtttaaagacagttgttcaactaaccagatgtaggtctcattgaattcatttgtgccaagtaccttactgcctctggatcaggccagcaagtttgggttccaacaggtgtaacttggttcttggtggggtggagggtggggaggggggtgtaacaaaaaaatctcaactaacactgtggtttgcaagccaccaaacattaaacagatacacagcatatctgtgctattaacttttcatgaggagggctggtcaccgtggctcatgcctataaatcccagcactttgggaggctgaagcagatggattgcttgagcccaggagtttgagaccaacctgggcaacatggggaaaacccatctctacaaaaaatttaaaagtagccgggtctggtggcatgcacctgtagtcctagctacttgggaggatcgcttgagcccaggagttcaagcctgcagtgagctatgattgcaccactgtagtcgagcctgggcaacagagaaagaccctatctctaaaattaaataaataaataaacctttcataagggcgatgataagtgggaaaaaatgtctacagagactccctgatgtgagttgaggtagatgacggaaagaggttggaaagtgtcagctggcaaatgtggtgtgaaaagtgtgaagacagcacgtgctgtgcagttctgtgcacgttcccctgcctcagtcacatgtcctcttctgcagaggcatttagtgaggcccctggggatgccaggagacccaggagagctcctgccctccaaaaacttgtggtctggtgggggcagcagagcagacagccacagtggttgccagccactggggcgagtgttgcgaggggtgtgtgcctgcccatcggctgaatcctgggcctgtggcctgatcagcaagacagctgtggttcctgccttctggaagtttaggagtcaatgtgaatacatttttagaaaataaatgaacagcagaaatgatttaaacacgggaggtgactaatcgtgcctggggcaatctggaaaggcttctgggaggactcagcatttccctggccctcttcaacccacaacaaccccataaaaagcgggtgctaccattgtccttgtattccagctaaggaacccacagctcagagaggtgaggtgagttgccccaggtcacacagcttctaagggacagagctggggattgacctggtttgatgtgactcccagggcacagcagggcagggcagggcctgtcctgtctacccagacttagatctgctgcctgtgcctcagttatctggggtctttccttctcttggtgactacttgacccaaaccctgagatgctcagtcttttgaattttagcattccaagatcctgcccgctctgaccaccagtttcaggattctcagtgcaaggttcctagcggcgtggagccccacgaggatctttcctgagcagctcagggcggccacacggcggggtctctggagctggagtctgggccccctgcagcctgctcctccacacagcctagatggggcccatatggggtctagatggggcctgggccagaagcagcctggttttagggcgaaagaggcaaacgagcagtctctgacctactctgttaggcaagtgttgagacaaataggacgtggtcactggagacgcctctgtcggagccctgccctggccccacttctgtgggactgttttttggccttccaggaagaggagaggtggaaggtggggcctgggagtgatcccgccgctccgggccttgcttgctaatcagtgtgatggcaccgttagagccagtgaacacaggggtgaggaggaatgaggtcaccagatagtgagaggatgaaatcatccctccgtgggaggggcttccacatatgtcatttttattgttgtataatacatttactgtagcaaatattaaggaggtattatgctacctgccatacacggtgagaaaactcagctcctcccccttctacctgtgtggcctcagctgagacaagatctctcagagcctcgggttttcttttctttcattaaaaaaaatatgtttttttcttagagacagggtcttactctgtcacccaggctggagtgcagtggtgcgatcatagctcactgcagccttgacctgggctcaagccatcctctggcctcagcctcccgagtagctgggactacaggcatcaccagcatacctggctaatttttaatttttttgtagatatgggtctcagtatgttgcccaggctggtcttgaacccctgccttcaagtcatcctcctgccttggcctcccaaagtgctaggagtacaagctcgaggcaccgtgcctggctgagcctcagattttctttctgttagatgggctgatgcctgctcagctgtggcctggctccaggctgctgtgtcttaaagccagtgggatggcagggaccaggctggggtgaccaacaaccccccacccccagtttgcctgggagtgaggggtttctggggttgagggactttcagcactgacaccaggaacatgtaggataaggtggttgctttagacgggcccaggaaaggaggtctgggctttccgaatgtaccaggtcttatcataacaggtacggaggtctctgctttctcaaagcccaaacacccacaggggaggtagagaggccgccatctccataccctctgagtctgagacctccatttcctctgctcatctgcctgcagcgccgaagagagtcctccagataaagtacccccggctggaagccagcgtctgggaacttccatacactcattcaattctcatgatgattttttttaagcaatattgccggttttacaatgaggaaactgaggcttagagagggtgaagcaacctgcccgagtttacacagccgctaagtgggggcaaatgtgggattcaggccccagcctctcctccaccccagctgtctctgggtgcaggaggctgtggggatggctgtaggggaagggtgggcaacagtgacagcctacctgaagaactgggccccagcaccctccgtgtttctgtgttattctcccagcctccgggctgctgcaagtccggccctgactcaccaagatgcctcccccaacccgggaaccagggagaccaggccttgcaactttgcccccaccttctctgcttccaggaagtggctgagggctttgccttccaggaacagagaactgcccaagtgggggttggtagctgtgagtgtgctcataagtatgaaatatgtctctaggctaatggcttcttcctaaagtccctgcctccaggaaagtggggccaaggttgggccgtagattcttcccccagataagaactctaccccaaagaaattctgctgccctgaaggcaaattgggaggcaaaagtgtgtgtgtgtgtgtgtgtgtgtgtgtgtgtgtgtgtgtgtgtgttacatttattaagcacctactgtaagcttggaacttttgttttcttgttttgttttgagacagggtctcactctgtcgcccaggctggagtgcagtggtacaatctcggctcactggcagtctcaaccttccaggcttaagcgatcctcccacattagcctccccagtagctgagacgataggtgtgcatcatcatgcctggctaatttttctatttaaaatttttttattttatttttgaggcagggtcttgctttgtcacccaggctggggtgcagtggcatgatcacagctcactgcagcctcaatctctccaggctcaagcaattctcccatctccgcctcctgagtagctgggactacaggggcacaccaccactcctggctaattttttgtattttgtagagacgagagacagggcttcaccatgttgcccaggctggtctggaactcctgagctcaagcaatccacctgccttggcctcccaaagtcctcggattacaggagtgagccaccgtgactggcctaatttttctatttgtgtcgagatggggatctcactatgttgcccgggctggtcttgaactcatgggctcaagtgatctgcctgccttggcttcccaaagtcctgggattacaggcatgagccaccatgcccaccagcctggaacttttgaatctatccccttgttgcactgtctcaacagccctgtgagatgggcactgtttcttatcccaattttacagatgggaaaactgaagctcagggaggcaagcatctgtgtcaaggtcatacagcttgtaagggacagagctaggacttgaacatcctttttgtctgaccccacatctatgctttcaaccctatgccctgcatggcacccggtaaatatgtggcaggcctttctgggggacataactttcaagctcctcctttttcttactctgccctccctctcccacccaagtccacaagcccagccttctgtctcctcaactaggtcaggtgtctcctgacggcctcatgccttcctgaacctcactgggtttcagtctgatcttgacctctcaccagctgtgtgtctttgggcaagtcacttcacttctcttaacctcagtgtggtccttggtaaaatggggataattgtgagggccagatgtctctggtgcaaatatcgtaaagtttggtttaagaaagtatttttttattttttagacagagttttgctcttgtctcccagactggagtgcagtggtgtgatcttggctcactgcaacctctggctcccaggttcaagcaattctcctgccttggcctcccaaatagctggaattacagggagcaccaccacgcccggctaatttttgtatttttagtagagacagggtttcaccatgttggccggactagtcttgaactcctgacatcaggtaagccacctgccttggcttctcaaacagttgggattacaggcgtgagccactgcacctggcctaagaaattattttaagatgtgggtcgggtgtggtggctcatgcctataatctcagtgctttgagaggccgaggcaggaggattgcttgaggccaggagtttgagaccagcctggacaacagcaagaccccgtctctacaaaaaaaaaaaaattaaaaattaaccagatgtggtggcatgtgcatatagtccctactactcaggaggctgaggtgagagaatcacttgagcctaggaggtcgaagctgcagtgagctataattgcactactgcactccagactgggcgacaaagtgagaatctgtctctaatataagtaagtcaataaataaatggaaataaattagtttaagatatgatcagatttgcatatttgaaaccaacataggcctggcacggtggcccacgccctgtaatcccagcactttgggaggccgaggtgggcagattgcttgtggtcaggagtttgagaccagcctgaccaacatggcgaaaccccgtctctactaaaaatacaaaaattagctgggcatagttgtgtgcgcctgtagtcccagctacttgggaggctgaggaaggagaattgcttgaacccgggaggcggaggttgcagtgagccaaggtcgtgccactgcactccatcctgggcaacagagcgagactctgtcttggagaaaaaaaaaaaaaaaaaaaagaaaagaaaccaacataattctaactaacatatgaaagagatcagattgaacctggctggaaggtgaggggcccgtgagtgagttacagtcacccgaggaatgatgagcaactgttcgttcctccaaatcatgtgaatgaagtacaaaggaagagactggaaattgtccgggtgctattcttgaatgcccactctgcatcagacactattctaaaagttgtgtgctgctgaagggtgttatatccagggaatgcaggaatacctgaatcctgccccagaacgtggctgtcactcaccataggattctcagcatagaatttttaattctgtaaacaccagccagtgccaaggagagcatgaggggagagaaagaaaacaagaaagcacaggtgttcacaatgccaagaagaaagatcaatgagatgaccaaacaagaggcactgtcttttctggctacctagtagggaggacaatgtagagtctctgaatagacagtggtcctacccacaggcacactcagtgactataagcttcctgagagcagggctgttctgaagagatttgagttttctcctggccatggagagtgtaattaagtagccctgggcccttgaagacttatagtgcaggttgactgaaagaactaaatcagccagtctttgcggagaggttgtcatgcaaacgaagtgctaagggtcttgcatgcatcccttcattttatcctcacaataggctgtgaagtaggcaccgtcatccctgttgtgcattgtgcaggcaagaacaccaccaaagcaaatgggaccaagacaagacattgagaaggaatgagacaaactgagactctgaggactggcaagggctatggagggtggaagcaagataggagaaggaggaagacagacatatagaggtggcatggcagtgggcagggagagggggcagcaggtagaatcagactccaagaggcctcaaaggtccaataagcagcggtatctgggaggtctgtggtttacaaactcttctgcttatggacttcgtaagtggtcaattaatctatttatgaattctgtgcaggtactactttactcttatgatagattataaataatgtaatacttgaaattaagaaggagtgacatgaggtcgggcgcagtggctcatgcctaatcccagaactgtggaaggccaaggtgggcagataacttgaggccaggagtttgagaccagcctggccaacatagtgaaaccccgtctctactaaaaatacacaaattagctgggtgtggttgtgcatgcctgtaatcccagcttctcaggaggctgagacaggagaatcacttgaacccgggaggtggaggttgcagtgagctgagatagcgccactgtactccagcctgggtgacagagcaagactccatctaaaaaaaaaaaaaaagaaaaaaggagtgacatgaaaagttaatagaactagaagcagaagcactaattctttctacaccccagtggattgtcttgtccacaaataaagtggcttaaccaaaatggagagggaggcaaatcaatttctatgcaccatctagaagaagttaaagggccctcctggatggctttattcatgttgatgagtaataataataactgctactggctgaggatcttctccatcccaggcatgtcagggatgcctaagtccccagtccctgctccagaccagacatgcttccagctgtggcagtagagggtggtggtctagggtgcttgctaagcccaagggtgaaactgtcttgacatccctccgcccattgtctcctcctaggtgccatgcctctgcaactcctcctgttgctgatcctactgggccctggcaacagcttgcagctgtgggacacctgggcagatgaagccgagaaagccttgggtcccctgcttgcccgggaccggagacaggccaccgaatatgagtacctagattatgatttcctgccagaaacggagcctccagaaatgctgaggaacagcactgacaccactcctctgactgggcctggaacccctgagtctaccactgtggagcctgctgcaaggcgttctactggcctggatgcaggaggggcagtcacagagctgaccacggagctggccaacatggggaacctgtccacggattcagcagctatggagatacagaccactcaaccagcagccacggaggcacagaccactcaaccagtgcccacggaggcacagaccactccactggcagccacagaggcacagacaactcgactgacggccacggaggcacagaccactccactggcagccacagaggcacagaccactccaccagcagccacggaagcacagaccactcaacccacaggcctggaggcacagaccactgcaccagcagccatggaggcacagaccactgcaccagcagccatggaagcacagaccactccaccagcagccatggaggcacagaccactcaaaccacagccatggaggcacagaccactgcaccagaagccacggaggcacagaccactcaacccacagccacggaggcacagaccactccactggcagccatggaggccctgtccacagaacccagtgccacagaggccctgtccatggaacctactaccaaaagaggtctgttcatacccttttctgtgtcctctgttactcacaagggcattcccatggcagccagcaatttgtccgtcaactacccagtgggggccccagaccacatctctgtgaagcagtgcctgctggccatcctaatcttggcgctggtggccactatcttcttcgtgtgcactgtggtgctggcggtccgcctctcccgcaagggccacatgtaccccgtgcgtaattactcccccaccgagatggtctgcatctcatccctgttgcctgatgggggtgaggggccctctgccacagccaatgggggcctgtccaaggccaagagcccgggcctgacgccagagcccagggaggaccgtgagggggatgacctcaccctgcacagcttcctcccttagctcactctgccatctgttttggcaagaccccacctccacgggctctcctgggccacccctgagtgcccagaccccattccacagctctgggcttcctcggagacccctggggatggggatcttcagggaaggaactctggccacccaaacaggacaagagcagcctggggccaagcagacgggcaagtggagccacctctttcctccctccgcggatgaagcccagccacatttcagccgaggtccaaggcaggaggccatttacttgagacagattctctcctttttcctgtcccccatcttctctgggtccctctaacatctcccatggctctccccgcttctcctggtcactggagtctcctccccatgtacccaaggaagatggagctcccccatcccacacgcactgcactgccattgtcttttggttgccatggtcaccaaacaggaagtggacattctaagggaggagtactgaagagtgacggacttctgaggctgtttcctgctgctcctctgacttggggcagcttgggtcttcttgggcacctctctgggaaaacccagggtgaggttcagcctgtgagggctgggatgggtttcgtgggcccaagggcagacctttctttgggactgtgtggaccaaggagcttccatctagtgacaagtgacccccagctatcgcctcttgccttcccctgtggccactttccagggtggactctgtcttgttcactgcagtatcccaactgcaggtccagtgcaggcaataaatatgtgatggacaaacgatagcggaatccttcaaggtttcaaggctgtctccttcaggcagccttcccggaattctccatccctcagtgcaggatgggggctggtcctcagctgtctgccctcagcccctggccccccaggaagcctctttcatgggctgttaggttgacttcagttttgcctcttggacaacagggggtcttgtacatccttgggtgaccaggaaaagttcaggctatggggggccaaagggagggctgccccttccccaccagtgaccactttattccacttcctccattacccagttttggcccacagagtttggtcccccccaaacctcggaccaatatccctctaaacatcaatctatcctcctgttaaagaaaaaaaaaaatgggactgggagcagtggctcatgcctgtaatcccagcactttgggaggccgaggcaggtacatcacctgaggtcaggagttcaagactagcctggccaacatagtgaaaccctgtctctactaaaaatacaaagattagtcaggtgtggtggcacatgcctgtagtcccagctactggggaggctgaggcaggagaattgcttgaacccgggaagcggagggaggttgcagtgagctgagatcacgctactgcactccagcctgggtgacagagtaagactccgtctcaaaaaaaaaaaaaaagattcaatgacccttgttaaagcatggtaaggaagactttgttcaaggggagtgggactctctcaatcactgcagggactgcagctatgggattttgcagtgggggcatttgggctcaactatgagtacagcaggggcaagtgggagctgatagccagggaacagggttggatatctgcagctggaaaattaccaagaggaaacatcaggggaaggggaattctggctaaactgactgctggggatgggttctcggtcattttctacactgacctaacaggattcatactggaggcaggccagggtgctcagacatcaccggggggatggtggcagatgaggaacgtgatcagatataggaggtgatcagatatgggaggtgatcagatatggagtggtggggggagggttgttgctaagctgacttagcagagttcttgttagaactggattttatttatttatttattttgagatggagttttgctcttgttgcccaggctggagtgcaatggcgcgatctggctcactgcaacctccgcctcctgagttcaagtgattctcctgcctcagcctcctgagtagctgggattacaggcatgcgccaccacgcccagctaattttgtatttttagtagagatggtgtttctctatgttggtcaggctggtcttgaactcccgacctcaggtgattctcccgccttggcctcccaaagtgctgggattacaggtgtgagccaccacgcccggcccagaactggattttaaaaggaagtgcacagatgggcctaggagaggactcaggggcctgactgattaaagcttggccaagcacagaatctttcccactctccagaagctcaccctgacctctccttttcactcaggccctgtctctcattaacagccagtagcttattggtgatcctagatgcagcctgcaaccttttgtacaactcacagaagcactgatttgctgtcaaatggtggaaaagttcaagctgccaaactttttcttaaaggaccaaacagtgaatactgtaggccttaactgttgcaacaccatagcctctgttgcaacaactcaactctgtccttgtagtacaaaagcagccactgacaatatgtccata

SEQ ID NO: 25020 - DNA, 9546 bp, Homo Sapiens
cccccccgccagcccgggcccgctgcccccggcgcggcgtcgccgcggcgcctcccgcctgcccgccggccctcgcgccctcccccggcggcggcggcggcccggccgccccgcgctccccggcgaggcgccgccgcccggcccggcctcgcctcggacgcctcgctccgacatgccccgctctggcggccgggctcgcggaggatcatgactgcggcagcgaactgggtggcgaacggggcgagcctggaggattgtcactccaacctcttttcgctggctgaactcacgggaatcaaatggcgtaggtacaattttggagggcatggggactgtggacccataatttcagccccagcccaagatgatccaattctgttaagtttcatccgctgtctgcaagctaacctgctttgtgtatggcgtcgtgatgtcaaaccagattgcaaagagttatggatattctggtggggagatgaacccaacctagtgggtgtaatacatcatgaactgcaggttgtggaagaaggactctgggaaaatggcctttcctatgaatgtaggacgctgctcttcaaagcgatccacaatctgttagaaaggtgcctaatggataagaacttcgttaggattgggaaatggtttgtccgaccctacgaaaaggatgaaaagccagtcaacaaaagtgagcatttgtcctgtgctttcacattctttctgcatggagaaagtaatgtatgcacaagtgtggagattgcccagcaccagccaatttatttgatcaatgaggagcatatacacatggctcagtcttcacctgcaccatttcaagtactggtaagtccttatggcttaaatgggacgctaacaggccaagcatacaagatgtcagacccagccactcgtaagttgattgaggaatggcagtatttctacccgatggtgctaaaaaagaaagaagaatcgaaagaggaagacgagttgggatatgatgatgatttccctgtggcagttgaagtaattgttggtggtgttcggatggtttacccttcagcatttgttttgatctctcagaatgacatcccggttcctcagagtgttgccagtgctggaggccacattgcagttgggcagcaagggcttggtagtgtgaaggacccaagtaactgtgggatgcctctgacccctcccacctctccagaacaggctatcctaggtgagagtggaggtatgcagagtgctgccagtcacctggtttcccaagatggagggatgataacgatgcacagtccaaagagatcggggaagattcctccaaaactccacaatcatatggtccatcgagtctggaaggaatgcatcctcaacagaacccagtccaagaggagccaaatgtcaactccaactcttgaagaagagcctgctagcaatcctgctacttgggattttgtggatccaacccaaagagtcagctgttcttgttccaggcataagcttttaaaacgttgtgcagtcgggcccaatcgacctcccacagtatctcaaccagggttcagtgcaggaccatcatcatcttcatctttaccacctcctgcttcttctaagcacaaaacagcagaaagacaggaaaaaggagacaagctgcaaaagagacccttaataccatttcaccataggccctctgtggccgaagaattatgcatggagcaagatacaccaggacagaaactagggttggcagggatagactcctccttagaggtgtctagcagtaggaaatatgataagcaaatggccgtgccttccagaaatacaagcaagcaaatgaatctgaatcctatggattcacctcattcccctatatcccctctgccaccaacactcagccctcagccacgaggtcaggaaacagagagtttggacccaccatcggtccctgtgaatccagccctttatggaaatggactagaactccagcagttgtctactctggatgacagaactgtcctcgtaggccaaagactgcctctcatggcagaggtcagcgagacagccttatattgtgggattaggccctcgaacccggagtcatcagaaaagtggtggcatagttatcgtctcccacccagtgatgatgctgagttcaggcctccagagctccagggtgagagatgtgatgccaaaatggaggtaaactcagagagcactgcattgcaaagactcttagcacaacctaacaaacggtttaaaatctggcaagacaaacagccccagttgcagccactccacttccttgacccattgcctctatcacaacaacctggagacagtttgggagaagtgaatgacccatatacctttgaagatggtgacataaaatacatctttacagccaacaagaaatgcaaacaagggacggagaaagattccctgaaaaagaataagtcagaggatggatttggtaccaaggatgtcactacaccaggtcattccacgccggtgcctgatgggaaaaatgccatgtctattttcagttctgctactaaaacagatgtccggcaggataatgctgctggcagagctggctccagtagccttacacaggtaacagatttggcaccttccctgcatgacttagacaacatctttgataattctgatgacgacgaacttggggctgtatcacctgctctgcgctcatcaaaaatgcctgcagttgggacagaagaccgacctcttgggaaggatggaagagctgctgttccttatccaccaacagttgcagacttgcaaaggatgtttcccactccaccatctttggaacagcatcctgcattttctcctgtgatgaattataaagatgggatcagctcagagacagtgacagcattaggcatgatggagagccctatggtcagtatggtttcaacacaactcacagaattcaaaatggaagtggaagatggattaggaagtcccaagcccgaggaaattaaggacttttcatatgtgcacaaagttccatcctttcaaccttttgtgggatcctccatgtttgctccactgaagatgttgccgagccattgtttgctacctctgaagatacctgatgcctgtctgtttcggccttcatgggcaattcctcctaaaattgaacaactgcccatgccccctgcagccactttcattagagatggctacaataacgtgcctagtgttgggagcctagcagatccagactatctgaacacaccacagatgaacacacccgtgacgttgaacagcgctgccccagccagcaatagtggggcaggagtcctaccatctccagcaacccctcgcttctctgtccccacaccacgaacccccaggaccccaagaactcccagaggtgggggcactgccagtggtcaagggtctgttaagtatgatagcaccgatcaaggatcaccagcctccaccccctctactacacggcccctcaactctgtggagcccgccaccatgcagccaattcccgaagcccacagcctctatgttaccctgattctctccgattccgtgatgaatatctttaaagacagaaactttgacagctgttgcatctgtgcctgcaacatgaacatcaaaggggcggatgtcgggctttacatccccgattcttccaatgaggaccagtaccgctgtacctgtgggtttagtgcgattatgaaccgcaaacttggctacaattcaggactcttccttgaagatgagttggatatttttgggaagaattctgatattggtcaggctgcagagaggcgcttaatgatgtgtcagtccaccttccttcctcaggtggaaggaaccaaaaaaccccaggagccacccataagccttctcctcctcctccagaatcaacacacacaaccttttgcttcactgaatttcctggactacatttcctctaacaatcgccaaactcttccctgtgtaagctggagttatgaccgggtgcaagcagataataatgattactggacggaatgctttaatgcgttggagcaggggcggcagtatgtggataaccccactggtggaaaagtggacgaagctctggtgagaagtgccactgtgcactcttggcctcacagcaatgtgctggacatcagcatgctctcctcccaggatgtggttcgtatgctgttgtccctgcagccctttctccaagatgccatccaaaagaagcgcacgggcaggacctgggagaacatccagcatgtgcagggaccactcacttggcagcagttccataaaatggcaggacggggaacctacggttcggaagaatctcctgagccgttgcccatccccactctgctggtaggctatgacaaggatttcctcaccatctcgccattctccttgccgttttgggagaggctcttgttggacccatatgggggccaccgtgatgttgcctatattgtggtgtgtccagaaaatgaggccttgctcgaaggagccaaaactttcttcagggacttgagtgctgtatacgagatgtgtaggcttgggcagcacaagcccatctgcaaagtgctacgtgacgggatcatgcgcgtgggaaaaactgtggcacagaagctgacagatgagcttgtgagtgagtggtttaaccagccttggagcggcgaggagaatgacaatcattccagactcaaactttatgcgcaagtttgccgccatcacctagcaccttatttagccactctgcagcttgatagcagcctattgataccacctaaataccagaccccaccagcagcagcacagggacaagctacgccagggaatgctgggcccttagctccaaatggatcagcagctcccccagctggcagtgcatttaatcccacctcgaatagtagttctacaaatcctgcagcaagtagttctgcatctggttcctctgtgccaccggtctcatcgtctgcctctgctcctggtattagccagataagcactacctcttcttcaggattcagtggtagtgttggagggcagaaccccagcactgggggcatttctgcggatagaacgcaagggaacataggctgtggtggagacactgaccctgggcagagctcttctcagccctcacaggatggacaagagagtgttacagaaagggagagaataggaattcccacggagcctgactctgcagacagccatgcccaccctccagctgttgtcatttacatggtggacccgttcacgtatgctgcagaggaggactccacttctgggaacttttggctgttgagcttgatgcgctgctacacagaaatgctggataatttacctgagcatatgagaaattctttcattctccagattgtgccttgccagtacatgctgcagacaatgaaggatgagcaagttttctacattcaatacttgaagtccatggcattttcagtgtactgccagtgcaggcgaccactgcctacacagatccacattaaatccctcacgggatttgggcctgcagccagcattgagatgaccctcaagaaccctgagcggcccagcccaatccagctttactcccctccctttatattggccccaatcaaagacaagcagacagagctgggagagacgtttggtgaggcgagccagaaatacaatgtgctcttcgtgggctattgtctgtctcacgaccagcgctggcttttggcttcctgcactgacctccatggggaattattagagacctgcgttgtaaatattgctttaccaaacaggtcacggaggagtaaagtatctgcacgtaaaattggactacagaagttatgggagtggtgcatagggattgtccaaatgacatctctaccctggagagttgtaatcgggcgacttgggcgtcttggccatggggagcttaaagattggagtatcctccttggagaatgttcactacagacaatcagcaaaaagctcaaggatgtgtgccggatgtgtggaatctctgccgcagactctccttctatccttagtgcctgcctggttgccatggagccccaggggtcctttgtagtgatgccagatgctgtcacaatgggctctgtttttggccgaagtactgcactgaacatgcagtcatctcagctcaacacccctcaagatgcttcttgtacacacatcttggtgttcccaacatcatcaaccatccaggtggctccagccaactaccccaatgaagatgggtttagccccaacaatgatgatatgtttgttgaccttccattcccagatgatatggacaatgatattggcatattaatgactgggaacctccattcctctcccaactcttccccagtaccctccccaggctctccttctggaattggtgtgggctctcacttccagcatagtcggagccagggtgagcgtcttctttctagagaagcaccagaggagctaaagcagcagcccctggcccttgggtattttgtatcaactgccaaagctgagaatcttccccagtggttttggtcatcgtgtccccaggctcaaaaccagtgccctctcttcttaaaggcttcgctgcatcaccacatttcagtagcacagacagacgaacttctgcctgccaggaattctcagcgggttccacaccctcttgactccaaaaccacgtcggatgttttaaggtttgttttggagcagtacaacgctctgtcctggctcacgtgcaatccggccacccaggaccgtacttcctgccttcccgtccactttgtggtgctcactcagttgtacaatgccatcatgaatatactttaattggaaaagcacttgttctctctggctcagttccttctccctgcaacctcagtccaaggaacctgctacactctgcaaataacccacatccttttcttcagaccactctccacagtcctgcactgtgattccttctcagcaggcacatgtcaattctgcagtgttcattaccagagtgactccttgacacttctctcatggacctggaaacttccataagtggtgactttcagccagtgcggtggtgtgtgtagccccaaccactggtccccaggaagtggtggtggttgatggcttttcagcgggaaacagaagagacagtgtccttttgcacaagagtctgtgttttcagcctctgtatacaattgagggcagtctagccctttggatgaaatcctcttagttactggtgtatggcctgtgggttacctgaactccataatcggggactttttaaaaataagaaccagctcaagtacatggtttcatactggggtttctgtctccctagtgttcccatccagattagcatgagtgctttggttgacttcaaacctgtgtgtcaatgcagaaggtctggagacagcttcattttgtttatttattttaatttgttttgtcatatggtttttgtgactttatttttttaattcacaaggaccaggtacagtagctgaaacccaattcagatccaccataggattctttgactacatacctctgtcctagaagccggaaaaggagtaaaaacacattggggagatcatgcctaaaagtaatatattcaaaaccacccagcagtaggttttgttaacaacaaactggattttaaaagttctgccatgttaagtggccagcatttcatgaaggataacatttttatacagaaggcagtcaagctcaactcagagccatggaggcaagtaccttaattagttttatatagtcacaacggaaatatattttctagtgaattcttattggaagccaggtctctcctctcattagatcaaaagggacttatgtacatacaacaattgaaagtgtttgctcatgaaatcagttataaatatggtgaattttttctggaccataggaatattatttcaaagaaatattacaacttaaccattaaattagtacttgaagttgagcctttgtggtgggactttttaaaaaaatgcctttttaaagcattaatggctaattgaagtattttatgactcctcattcctggcccagagggttgtctttgaaaccctgtttctaacccttgtgttgtgtgtttctgtctgaggacagtgggtgtgtactggcctcccgggagccactgtgaccaggcctttgagctcttgtcatctgtggagagaatcatgcaaattttaaaagttcttccaagagacttccatgtcctggttattaacaaaaaaggaaaaatgtaataattgatatgattttgtaaaagtatttttcttgaaataatctaaagtttaaaacattatattaaaaaaaaaagttgtgtggtgggaatgtgaaagcagagaaataacttgtaaatggataattttgttctctgtaccaccagttgaagggggggttgactttcgcaatgtataggataaaaaatctgatatatcaaaccatttgtatctaatgtgtacagtgtaaaattgactttaaaaatattgcagtgctattttttcttaatcagaaaggaaaattctcaaggccttttgaagagcataagaagatgaagattgtaaacttgtataaaattatcttggtgagaagacaaattgtaaagtagatatttgtaatcttttaccactttggggttgcttttttcccggaattcatcagaactttgaattttttttttaaatgggctgtttttaatgcaggggcttttcttccctagaaacccaattctaagcagaaaaagaaaaaaaacacaaaaaataaaaaacccctacaaaaaaactttaaaaaaaatggcagcaaagggtagttttcatctggtgtcttttatttaagttttttaagttaagaaaagctggtgacatatttatacgtttttgtgcaaaaataaatgaatggcaatagattttaaaaaatcttattatgtacttctgtgtgaaaaagtctgtataatatttcccttaaatatgcattattttacttgtgagttttttactgaattaatctgaaatgtacaagccctggatttgctacagagtgagaagttattttatttttttttatttttaattttggaaattctgcagaaatcagaactcttaccatggtttgaacaaaaaaaggggaaatggggaggggaaaagggtgggattgtccagcatgcttgtatgtatatttcagaaccttttttaaatgtaaaagctgtacatttctgggaagttctgaatttcttttgtttccttttttccttcaagcattttgcagtgagcttcttttatatatagcaaacaatttgaaagaatacaaaaatatgtgaagttcatttaaaaaaataactacagtatagcgctggtacagtacactaaaagactttgataaaaagaaacaataataaaaggcctccattttaaatgtcattcatatataccttgtggatgagagctatatacttttacacacttttttagaggaataaattattgaattactgaaaaaaaaaaaaaaaaa

SEQ ID NO: 25021 - DNA, 50564 bp, Homo Sapiens
tattattatcttagccaccagggccaggtggtggtgccaaggtcgtctagctatttatcttacttctgtttctttccaactttttgctttctcccttttctcctgtcttataaactagggaaaaggggaggttggggagaaactgagaaggacaacaggagaagtggtgacctcataccataatcctagcattttgggaggccgaggtgagagaatcgcttgaggccaagagttccctaccagtcctggtaacatagtgagaccctatttctaaaaaaaaaataaaaataataaaaaaaataaaaaaaaaaattaaataaataaataaataaattagctgggcgctgtggcgggcacctgtagttcccagctaccgggaaggctgaggagggaggatcgctgcttgagcacagtaggtggaggctgcagtgagcagagatcgcatcactgcacccctgcctgggggagagtgagacccagtctcaaagaaaaagcaagaacaaacaaaagtggtctctggaacaaacctggacaaacaacccttcgaatagaggcaaatttctcttcctggagaagccggtgccactggcaactccccagggggccagctcgggaaaagccagctgaaacgagaggacgttcaccgttcctcgcctcgatccaccggacttcagaaggctacacgcggcaggcgccgctcgggatccaggggccggggtgagaacggaggcggagaaacccctcaggctccgccaccggggcggggaactgggaggcggccccgcctctgggcatcctcctgggtcttgcctagcggcgggcgcatgcttagtcaccgtgaggctgcgcttgcccggggcccgcgcccccctaccccggggaccgcccccgggccgcccgccccacttggcgcgccacttccgcgtgcatggccctgctgccccgagccctgagcgccggcgcgggaccgagctggcggcgggcggcgcgcgccttccgaggcttcctgctgcttctgcccgagcccgcggccctcacgcgcgccctctcccgtgccatggcctgcaggcaggagccgcagccgcagggcccgccgcccgctgctggcgccgtggcctcctatgactacctggtgatcgggggcggctcgggcgggctggccagcgcgcgcagggcggccgagctgggtgccagggccgccgtggtggagagccacaagctgggtggcacttgcgtgagtaccgccggtttgttcgggcggggggcgcctctttgtctcggtctttcgggggacagcctgtgctcgttcctatggcgatcctgtcccccggcgctgggctttcctcttttccacccccgcaactccccattccgaagccaggaacccagcaggtggaggagagagaggcgtccgggggcttctctgcggcccgcaaagccgagccagcgtctgcttccgcacggatgcgatattgaccagggccggggcgggttagattaaccttcctccatcctcacttgtccaagtgggagaggattggattctgttcttgaccgcgtgaaacacaaaactgcatctgggaacattgctggtggcctgtgtgtagggacgagggtgacggtgccatagatcctggttcttgaaaaatgtagatcctggttctcccgtttcaagggcagaatgatttatagcggttgttgtcaaccttggctacacattcgaatcacctgagggtgcctggattcccgacttaattggtctgaggtgcacttgggctttgggatgtttcccgacttaattggtctgaagtgcagcctgggctttgggattttcgggtgatctgaattgcagccaaggcgaccttgagtaggtgagttctcagagcttttgttttgtcttggttttatgtggattgcaaaactaaaaacagagggatgtaaatcctgagatttacaaaattcataatttttgaaaataagggtttttgtttgtgtttgttttttgagacagggtcttgccctgtcacctaggctagagtgcagtggccatcatagctcactgcagcctcgaactcccgggctcaagggatcctctcaccttggcctcctgagtagctggaactacagggggctaatcaccacgcctagttaattattattattttttgtagagatgggggtctcgctatgttgcccttgctgatttcaacctcttggactcaaccgatcttcccgcctcagcctcccaaagtgctgggattacaagcctgagccactgcactcattctaaaaataaatgttgtttccaagttattggtgtgcccgcccttttctatcacaagatttgggtgttgacgattaaaatgctgtatccaagaggaacctgggatttgggataggttctctaaattcctttggagatgaatatttaaattatgtcaaattgggagctctttaaggacagggatgggcttctgtgtttgtgtgtctcttatcaccttaaaatcccttgctcaataagcacttgtgcaatgaatgaaactaaaaatggacagttatgaaaaggttgacttcattgttcagtgccttggagatgaacatggagatgaagagaaaggaaaaatctctgttaattatcaacttgcactttgacaccatagtccagacagaaggttagaaatctgtctctccagaaggcagattgtggggtgccactaagtgcccccctcccacacctcatgagagtacttgatcacttctcacttctgttctgctctccacattttctctgtcttcctctttctctacttatgttataatgtgcttcagaggttcacccactttaccttcctgttatgaattctttttttttttttttttttgagagggagtctcactctgtcacccaggctggagtacagtggtgcaatctgggctcactgcaacctctgcctcccaggttcaagcagttctcccgtctcagcctctcgagtagctgggaatgcaggtgcatgccaccatgcccggctagtttttgtacttttaatagagatggggttttgccatgttggccaggctggtctcaaactcctgacctctggtaatccacccaccttggcctcccaaagtgcttggattacaagcatgagccaccacacccagctaattttttatttttaaaatgtatttatctatttttttttcgatatggagtcttgctctgtcacccaggctggagtgcagtggtgcaatctcggctcactgcaacctccgcctcctgggttcaagcaactctcctgcctcggcctcccaaattgctgagattacaggtgccactacacccagctaacttttgtatttttagtagagccaggctggtcttgaactcctgaccttgtgatccgctcacctccgcctcccaaagtgctgggattacaggcgtgagccaccacgcctggcctgtttttattttatttattgttttttagaaacagggttttgccatgttgcccaaactggtctcttatgcctgtgcttaagcagtcggcctgccttggcctcccaaaatgctgggattacaggcatcagccaccactcctgtcccattttttgtattttaagtgctgggattgggggtgggtagggagaaaacgatagatataaacatttgtgagacatgtcccttcccttaaggaattttgtggttgtgaaagaaaaaaatattggaaccccaaagtatgccagaaggaaagttcagcttgggaactgaatcacacaaatactgcttttccttttgttcccaaacagacagctgtaatttcacaatcccatgtcatagccttatctcctctactcctgcttttcacttttactttatcttatgtaaaatgtagatttactgaggctcataagaacctcacaagaatgtaaccatctaggctgggcgtgatggctcacgccagcactttgggaggccaaggtgggcagatcacctgaggtcaggagttcgagaccagcctggccaacacggtgaaactccgtctctactaaaaatacaaaaattagccgggtgtggtggcacatgctacttgggaggctgaggcatgagaatcacttgagcccaggaggcagaggttgcagtgagccaagatcatgcctctgcactccagtgtgggcaacagagtgagactctgtctcaaaaaaaaaaaaaaaaaaaaaaggtggggggttgggtagtattctttgacattcggaacctcaaaagatgggtcccaggcctaggcatcaaaacgggatatgttgtgtaatcaaatttggagcacagagtgtctctttaatagaaataagagatgagaagctgatgggtaggttgtggtttgaaaaatgtggagtttctggacacacagtgaactatgggggcaggggtgggtttgagcaaaccagtgactcagtgaaagtagttttgtggtaagccataggattgagatctcacccttggcgatgcccaatagaagtttgtctttctgtctttttctttttcttttcctttcagtttatagagatagggtctcactacattgcctaggctggtattgaactcctggactcaagcaatcctcctgctttggtctccgaaagtgttaggattacaggcgtgagccactgtgcacggcagaagtttaagattggttctcccatgagttctttcctaaataaaatccattaatttctaacgcttggggaagttttaaagttgtggtgaatgaactcacacggaaggttcaaattagaatgtgtgtctagcagtggtcatttacaggtagtgagattggttggtttttcattgttttatcagtgttccttcatttaattgttcaaccgttaaagtttatgggaggccattgttttggaccagtctcctgtactaggtcccagcagacctgggtgtgtgtgtgtgtgtgtgtgtgtgtgtgtgtgtgtttgttgctctgtcacccaggctggagtgcagtggggtgatctcggctcactgcaacctccgtctcctgggttcaaggaattcatgtgcctcagcctcgtaagtagctgggactacaggcgcaggccaccacgcctggcaaattttttgtatttttagtagagatgaggtttcaccatgttggccaggctgatcccgaactcctgacctaaagtgatccacccgcctcagcctcccaaagtgctgggattacaagtatgagccaccgcgtctggcatgttgtttcatttttaagagacagggtctccctctgtttcccaggctggagggcagtggtgtgatctcagctcactgtagcctcaaactcctgggctcaagcgatcctcccacctcaacctcccgactagctggttctgcaggtagataccactgagccttgcttgaattcagcatttcaagtctccaaaaggttaagtatattgcttatctcatgatctcgtgtagactggagagaaatgcaaagatcgcccaaagtcaaggtgaattagagccttctgggagctttgcctctgtggttcgcttctctgcctacacacgtgatgggagagtcagcttaaggaaaagttgtttctaaattgctgctccctttgccccagggcctggggaacttgcggtcctgggttcctgctgagtgtactgattctgtgataagaataaccaggttcctgtggttttggcgagtagtacttaccaatgagagttgggtagtaagggttgatcatgtgacaaaagttcatgattgccaagtcacagtgaactatgctgcacagcagcagttggagaggcctaggggagagagaggtaggggctttgaaagatcagtgaacagcaggctgctcagtgaatcattgttcatctaggctgaaaacaattacccagcaacatgtaaatcataacctcatttggaagtgatactgtgtactttgatattatgatgtctataccctggtaaagctgaacactggacatgctttttttttttttttttttttttgagacagggtctcattgtgtcacccaggctggagtgcaggggcatgatcatagctcactgcaaccttgaactcccaagctcaagtgaccctcccacctcagcctccccagtagtcaggaccacaggcacatggccaccaccatgccctggctgattttttaaatttttagtagagacaaggtcttgctttgttgcccaggctggtctcgaactcctgagctcaagcagtcctcccaccttagcctctcaaagtgctgggattacaggcatgagccaccgtgcccagcctgaacatgcattattaaatgcaatttactaaaaggaggtcagtttaaaggaactctgtcatcagttcctgcaatattgacagatagccctccgaaatagaaggttaccctaatgtgtctcctgggtttagaatttcatagaatggggcccacccatattcataagtgacaaataaaggagtggccataaagggtggggctagttaaagcaagcaaatgctattgttgaaatttggcttttaacttaccttgttgactgcttcctttttttgtactagtcttcatatactgttgctttgccatctgcctcaaaacccactaaatctgcagggctaggaaaagatagactgcctctgaatccttcagggtgtctatttctttgtaaaacatactttgaaaagtaaccacagagaatgcttttttttttttttgagacagagtctggctgtcacccaggctggaatgtagtggtaccatcttggctcactgtaacctctgcctcccgggttcaagcgattctcctgcccagcctcctgagtagctgggactacaggcgtgtgccactacacccagctaattttttttttgtagagacgaggtttcaccacgttggccaggctggtctcgaactcctgacctcaaccgatccacccacctcggccttccaaagtgctgggattatagaaatgagccaccgtgtctgtccaagaatccaagaactttttttatagagggaaactaaaggaatgatatggaaatactgataccctttggctttttttttttcttcttgacacgaagtctcactctgtcaccctggctggagtgcagtggcacgatcttggctcacggcaacctccacctcccaagttcaagtgattctcctacctcagcctcctgagtagctgggattacaggtgcccgccaccacacctggctaatttttttatatttttagtagagactgagttttgccatgttggccaagctggtctcaaactcctgacttcaagtgatccgcccaccttggcctcccaaagtgctgggattacaggcctgaaccaccatgcccggaccactttggcatttgtaagtggcttccagtcagtgagaattcattaccttctattcactaggtgttgcaacattaaatattactgcagttacttttgcaccagcctaataggatgtggaggtcctaggtccttttctttttgggggacgggagatggtgggtatcaggtaatagtggggactgacatccagaagagttgtctcacaaaactctttcttcttctccccggatgcccgtaacaattatttttattttttaaatttttttgttttttgaggcagggtctcactctgtcgcccaggctggagtgcagtggcacgatcatggctcactgcagcctcaatatcctgggttcagatgatcctcctgcctcagcttcccaactggctgagactacaggctgttatttgtggtgatggggtctcgctgtgttgtccaggctcctctcaaactcctgggctcaaaggatcctccagtcttgacccgtcaaaagtgctaggattacacacctgtgtgtgagccacggcacccagtcacactttttaaaaatctggtgatttcctgagactggaaggttcaggttaatgttctgcttagctaagaattgaacaaaaacagcctttgttaatatctcttgcaaatgtatccattgattttcttgctttagattctgctttacacagactgcttttttttttctctttttctcaagtttgatgcctccctgaactaaccttcatctgaaatgaaaaaaaagactttgaaggtggagacatggatattgaatagtgaatatgtgccagggacagggccatgtccagacagcattatatttagtcatggttggtgtaaagctgatgaaatgcaacagagacagggatctttatctgtttaagtcatcagtatagtccaagcccctagaacagtgttttgcacatagcaagtactcagtatatagttgctgaaataattgagttgataaatcgatagtgttttgccttggaaattatgactcgtctattttctgagtagttctcattctggtcttgaattagattttaggcagcaaagaaggacgacagagggaggaaactgtaggcaattctgtggtgggaggttgtggggaaccagaggaaggaagttaacaatttttttttgagacagggtcttgctctgtcacccaggctggagtgcagtggtgcaatatagctcatggcagcctcaaactcctgggctcaaacgatcctcccacctcagcctcccatgtagctgggactacaggcgtgcaacaccacacccggctaatttttaaattttttatttgtggagacgaggccttactatgtttctcaggccggtctctaactcgtgggctcaagcagtcctcccacctcacctcccaaagttttgggattacagcgtgagccaccacacccagccgcaagttcactattgaacacagttgatgttcttggcaggcgcaattgcagattaaccaagttcttgttttactgccaacatgggcaatgtgaagtttctacctggctaggcaggattgaaggtaacgaggcaggccctaggaaaaatggtgaagcttctgaattttgccacctgttatcaccagataacaggcggcccactgatcgggattctgaacactagattgatgccagcaggcccactgatcggggttctgaacactagattggttggaaaaggaagctctcaggaatggatcatcggtttggaaagggaggctgagttacaggagtctccttgatgatgtatttactgaacagcctgtgaaattttgtttcttagctgggtgtggtggctcacgcctgttatcccagcactttgggaggctgaagtgggtggatcacttgaggccaggagtttgagaccagcctggtcaacatggtgaaaccccatctctcctaaaaattcaaaaattggccaggcgcggtggctcaggccagtaatcccagcactttgggaggccgaggtgggcggatcatgaggtcagtagatcgacaccatcctggctaacacggtgaaactccgtctctactaaaaatacataaaaaaaaaaaaatttatccaggtgtggtagtacacacctgttgtcccagctactcgggaggctgaggcaggagaattgcttgaacccaggaggcagaggttgcagtgagccgagatcgcaccactgcacttcagcctgatgacagagtgagacctcgtctcaaaaaaaaaaaaaaaaaaaaatttaaaaattagctgggcgtggtggcgggcacctgtaatcccaggtactcgggaggctgaagctggagaattgcttgaactcaggaggcagaggttgtgatgaaccgagatggcaccactggactccagctgggcaacaagagtgagactccatctcaaaacaaaacaaagcaaaaaaaaaaaacaaaacaccttagcagggcatagtggtgcgtgcctataatctcagctactcgggaagctaagaatcactggaacctgggaggcagaagttgcagtgagctgagattgtgtcactgcacactccagtctgggcgacagagtgagactctgtctcaaaaagaaaaaaagaaacttgtttcttatccctcattaatgcccacctggagaaccggggaatctgccagtgttgtatgctgagggtcttagcaatgtgcaactctgggcaaccagagccctgagaactcatctgataatgctccagtctgggaggcaaacttcctttgtgatcagctgatgtgttttaggtaggaaggcccctggggaatttatctccgcctttccgtatgccttgtgtgcgtgtggggagccagcagacgcagaaataattcagaggtatcagagtcaccatcacatctatcatagattagaaatagatgctttatataccttatctctgacctgctcaaaatctccataatggaagcattcttcccttaactgagctaggagaaatttggaaactcacccacctctagccactaaatgggagagctgagagtcaaactcctatctgtctgacttgaggcctgtgctccctctaacaacctgatgcacaggtcagctagagcagcagtccccagcctttttggcaccaggaaccagttttgtggaagacaatttttccacggaccagcagtggggtatggtttcaggatgattcaggattcaagtgaatcacatttatttatttatttatttatttatttatttttatttttttgagacagaatttcactcttgttgcccaggctggagtgcaatggcatgatctcggctcactgcagcctctgcctcctgggttcaagcgattctcctgcctcagccttccaagtagctgggattacaggcacccaccaccacacctggctaatttttgtatttttattagagacggaggtttcaccatgttggccaggctggtcttgaactcctgacctcaggtaattgcccgcctcggcctcccaaagtgctgcaattacaggcttgcggcaccacgcccagcctgcatcacatttattgtgcactttatttctattattattatgttgtaatatataatgaaataattatgcaactcaccataaactagactccgacggagccctgagcttgttttcctgcaactagttggtcccatctggggctgatgggagacagtgacagatcatcagcaattagattctcataaggagtgtgcaacctacatcccttgcatgcacagttcacaatagggttcacgctcctatgagaatctaatgccgccactgatctgaaaggaagtgggtggagctcaggcagtaatgctagcgacggggagcagctataaatacatatgaagcttcgctcacttgcccgccactcacctcctgctgcagcctggttcctaataggcacctggcggtcagggagccctgagctagagaaaggggaaagaaggctgagtgcggtggctcatgcttgtaattccaacttttgggaggctaacgtgagaggactgcttcagcccagcattttgagaccagcctgcgcaacatagtaagaccctgtctctaatgtgtttgtttgtttgtttgtttgtttgtttcctttttcttttgagatggagtttcgctcttgttgcccaggctggagtgcaatggcacgatctccgctcacggcaacctccacctcctgggttcaagcgattctcctgcctcagcctcccaagtagctgggattacaggcatgtgctaccacgcccagctaattttgcatttttagtagaaacagggtttctccatgttggtcaggctggtcttgaactaccgacctcaggtgatctgcccgcctcggcctcccgaagtgctgggattacaggcataagccaccatgcccagcctccgtctctaatttgtaagaaattgaaaaaaaaaaaatttggggggaaagagaagggagcagcagaggggatgggtgagcgagagcatgccagcttttcacccctggcctccccagctctcactggaactaagtgtatgtgtattttttgagatagggtctcattctgttgcccaagctggagtgcagtggtgctatctcggctcactgtagccttgacctcccaagctcaagtgattctcctgcctcagcctccccagtagctgggactacaggcttcactatcacccctggctaatttttgtattttttctagagacagtgtttcaccttgttgcccaggctcatcttgaactcctggcctcaagcgatccacctgccttggcctcccaaagtgctgggattataggcatgagccgccactcccagcctaaatgtgcttttcgttccttccaagtcagaggcgctgaagtcatgtcatgttgctggcatgtaaataggcctctaaaagcagtggaaatccctggaggcctgttcacaggagctggcaaaataggacagtggtatttcagggtcataggcttcctttcaaccagtgccccaggccccaaagtgtgttgtgctggggcgcagcttctctggcccaacaaggccacaattttccaccatcctcttcctctggtttctggcccagtgctcttcaattttagggaatgtggagattctgctgctgccccttgagtcagtatcttggacaggctcagagcctctctctggctggcactgtaggccaagatactgatacagtccccaagagcagggactgtatctgtttagtgccttaccttgcataatgcctggcacaagtgagtgcttactcagtacctctgaatgaatgcctgcaagctaagacgacgtagaagcaaaaaaggcagaaacttctaaaaaaacaaaccagagttatagacaccaggcaccagtgaaagcccaccttggcgcttagaagaaacatattccaaaaaaagaatatgttttaaaattaaacatattttttaaaaactttttttaaaaacatatttttaaaattagaaaaagaagccttaaataactttaaagtagcttcaaatatacatgaggaacaaactgatggtatgtgagagtagtttagaacattgagtgctttatgacacccttggattgcttttgatgattcttgggaagccagaaatggtgactggaagaccagcagtatttatgtagcagacaaatcatctctacctttgggaaaattgcttttggagtctgtcctagttgaagccacttagtgaacttaaatggtgaactgcagggtataaaggtgtgggtggaaggcacggggaagcacgttgcctgccaaataactggaaaaggcaggttggatgagaaaatcattcccattatggggctagcattgttcttcccacagagtttcgacctcctttctctgctcttaccattaggaaacccctgctgtgcgtcctcctttcttagaaatggcttattctatttatcccagtaatgttgtcaggtacttgggggttgagaagtagcatatcctcagcttggccagatgaaagggcactctagatagaaagccatacgtttattattattatttatttttagaggtagggtctggctctgttacctaggctggagtgcagtggtatgatcagagcttattgtagccttcaactcctgggctcaagagatccttccgcctcagcctcctgaatagctggaactacgggcatgcaccaccaaacccaactaattttttattttttatttttttacagagatggggtctcagggtctcactgtgttgcccaggctggtccctaactcctgggctcgagcaatcatctttcttttcggcctcccaaagcgtggggattacaggcgtgagccaccacacccagcccataaattattctaatttttagtatgaagtacttgtgatactctgccatgaaggatgcagtgctggcaggaatagtggaataattgctgcttgtaaacatttaagattctcctgtggattttggtgagtgatcattaaactgttttccaaaagcatatacaggccaagcgtggtggctcatgcctataatctcagcactttgggaggctgaggcaggagaatcacttgatctcaggagttcaagaccagcctgggcaatatactgagaccttgtctctatttttataaagtatttttaatttttatttaaaaaataaaataaaaagcatatacaggccacgtatggtagctcacacctgtaatctcaacactttgggaggccgagttaggaggattgcttgagcccaggagtttgagaccagcctgggcaacatagtgagaccctgtctctatatttttagaaaaatattttttatttttttttaaaaagtatatccaggcgtgatggctcacgcctgtaatcccagcactttgggatgccaaggcgagtggatcacttgagctcaggagtttaagaccagcctgggcaacatggtgcgactctgtctctactaaaaataccaggcatggcggtgaacgcctgtggtcccagctactcgggggctgaggagggagaattgtttgatcccggggagcggaggttgcagtgagctgagattgcaccatggcactccagcctgagtgacagagcaagactctgtctcaaaaaaaaaaaaaaaaaaaaaaaaaaagcatatagaacaaaatgtgaaagttttctccctctccagagaaacactgttgactgcttggagtatagccaaactgtgtttacacccatatatacatacacacatactgcatatgaatacgaattgggttgtggcataactactattctgcaactttctttttgatgcataacagtgtatgttagaactctttccatatagtgcatagaaatctaccttgcccttttaaatggctgcagaatattccacagactcaatgtataactatttactacttccctgccgatggatatttaacctgtctgtagttacccgttatcaccaagcttcaaggaatagccccataaatgcatctttggacacgggagcataatatgtgactacttttctaggttactgtaaaagtagaattgctgggccaatcaggatatgtttgctaacactagttatagtcaacctttaaaatttttgccaatctgacagatgaaaaatatttcattatttaaattatcttttatctttacttttaaaaaatgtagatttcgtctgggcgtggtggctcatgcctgtaattccagcactttgggaggccaaggtgtgtggatcacttgaggtcatgagttcgagaccagcctggccaacaaggcgaatccccatctctactaaaaatacaaaaattagccaggcaggatggcaggcgcctgtaatctcagctactcgggaggctgaggcatgagaattgcttgagcctgggaggcagaggttgcagtgagctgagatcttgccactatactccagcctgcgcgatatagtgagactcagtctcaaaaaaaaaacaaccaaacaaaaaaataatgtagttttctggctgggcacagtggctcatgactgtaatcccagcactttgggaggctgaggcaggtggatcacctgaggtcagtagttcgagaccagcatggccaacatggcaaaaccccatctctactgaaaatacaaaaattagctgggcatggtggtgcacacctacagtcccaactattcaagaggctgaggcaggagaatcgcttgaatctgggaggtggagtttgcagtaagctgtgatcgcaccattgcactccagcctgggcaacaaagcgagactccgtctcaaaaaaaaaaaaaagtagttttctgagtcttgctttttctacttttattccataagtgtatttctatatattaactaagagtgaaatggaaatgattgtaaccaaatatgtatttgtacataacatgataatctgtgcatttgtgcatttcgcttttctacatctttggttacttctttaggccaaatgcctagtagttataaatcaaagtcattttatgagatctaatatttatttaggttttctcaagtttctgtactaatggttaatcaatatcctaagttccatgccatgtactttaaatttttgtgcttttggtgagtattcaccagtatctcaatgttcagcctttctttgtgtgtgtgtttcttttttgaggcagagtctttcagtgtcacccaggctggagtgcagtggcatgatcatgatcatggcttactgcagccttgtctttccaggctcaaagggtccccccacctcagcctcctgagtagctgggaccacaggcatgcaccaccacacccagctacttttttttgtagagacgtggtctcgcttgttgcccaggctggtctcgaattcatgggcttaagcaatccaactgcctcagctcccaaagtgctggaattacaggtgtgaactaccaagccctggcccatcttgggtgtttatccatgtattctgcagtactttcccgagaagtcctcttagacagcagctcaaatgggctgattgttctttctccgtccaagaaaaatgctgatgaatgaacttctctccctcattacagaaggaaaataatgttcttatctttttgtaacaaagaaagtaactagaatttagtacactgtgacttagaacccaaggaagactcctcgcttgatgcttagcgtgcatttcttgcagatttcgtttgatggtttgaattcaatattcttaaagtgtgtctcttttttttttttccaggtgaatgttggatgtgtacccaaaaaggtagaatttttatttctctttccctttacaatcctttttctatttggtaaatcataatcaaaatcagaatgtttccaaatagatcagttaaaattctttctgcaaaaaaaacccctagaccctactaaaagtagcttaagcaataggattgtttttgtttgatttgtgttttttaaatttttttatttatttttaattactttttatttttattattattgtttttttgagacggagtttcgttcttgtcacccaggctagagtacagtggcgcgatcttggctcaccgcaacctctgcctcctgggttcaagtgattctcttgcctcagcctcccaagtagctgggatgacaggcgtgcgccactgcacttgactgatttttgtatttttagtagagatgggggtttcaccgtgttggccaggctggtctcgaactcctgacctcaggtgatctgcccacctcagcctcccaaaatgctgggattataggcatgagccacagaccccagccaaggcctggtcatctacaccacaggatagttttttctcagcaaaaagacccagccagcaaaccaaactgttgaatggaatcttctcaagttctgtgggttcatggattttctgtatcacattagtgattttttcgttgttaatatctgtggtgcaggtcacattgaatgaattcattttttttacccttgacaaagaggaaaaaacagcagctcttatttgtaaagctgcctcttgcttatacttgcaaagaattttaccactcatttgaatgtactttcaacatatgttgtaatctcaagcttaccacctttattaatgacattccattttaacttgtcatctttttggtattatataagcaaatctcctaatctcatcagtgatgcatacctgagtttaattccaaaaagtctttttgaagtcttttccctggtataggtaaggtgtttttctttctgtcttaggaagacttttcttctctgggacattttccctcaactatttcctttcctattagtcatactttttgtaatctgttctacttggagccatgcaattatgactgtatgaattatataaattaattataaggtggttttatgtagtttaaaccagttatggtggtaaatttcgtgttgattggtacaagtttatttttttttaaatataccactgggctaatactgcacagtaaactgattttgtaatgttttagtctcatatttacttattccttctgatcacatgcggtagacatttatgtatgttcatttatatatttttttttcttttttttcttttctttttttttttttttttttttttttttttttgagacagagtctcactcttgcccaggccggaatgcagtggtgtgatttcagctcactgcaatctccacctcccaggttcaagtgattctcctgcctcagcacaagtagctgggactacaggcgtgcatcaccatgcctggctaattttttttgtatttttattagaaatgagatttcaccatgttggccaagatggtctcgaactcctgacctcaagtgatctacctccctctgccttccaaagtgctgggattatagtcatgagccactgtgcccggccttgtgtttgtttctttttagtctgtttttaatagctttccccttatctctttaaaaaaaaatgttttaagttagcaaggtatagtagattttatttattattattattattattttatcttttgagacagagactctgtcactcaggctggagtgcagcagtgtgatcttggctcactacaacctctgccctcagggttcaagcaattctcctgcctcagcttcccaagtagctgggactacaggtgtgtgccaccatacccagctaatttttgtatttttaatagagatggggttttgccatgttggccaggctggtcccgaactcttgacctcaagtgatccacctgcctcgggctcccaaagtgctgggattacagacgtgagctgccgtgcccagctaggtttgtttttaatttaaagggcagtatttttatctgctgttacctagttaccattcattcatgattccttttttccctcaggactgatttactgctgttttggatccttttttttttttttttttacaggtaatgtggaacacagctgtccactctgaattcatgcatgatcatgctgattatggctttccaagttgtgagggtaaattcaattggcggtaagtgtcaacactcagagggttcagtttccaagtgtagatatttttcttttataactgagccataaacttttttagggatggaggaggaattgcggtaaatattcacaatacgagatttacagtttagccatttttaagtatacaattgagtgccattaagcgcattcacattgttatacagtcgtcaccactattaccacttccagaacttttctgctatcccaaacagaaactattctattaaacaataacccctcattctcttctccccctggcccctgggaacctctattctgctttctgtctctatgaatttgccaattctagggaactcatataagtggaatcatacaatatttgttcctttatgtctagtgtattttgttttcacggtttgtccatgttgtagtatgtatcagaacctcattcctttttgtttgtttgttaagacagggtcttgctctgttgtccacgctggagtgcagtggtgcaatcatagctcactgctatcttgagctcctgggctcaagctatcctcccacttcagcctcctgagtagctgggactacaggcacgtgccaccatgcctgcctattttttttaatttttgtttttagtagagatgaggtctcactgtggtgcccaggctagtcttgaactcctgagctgaagtgatcctcccgcctcagcctcccaatgtgctgggattacaagtgtgagccactgtgcccagccttcattccttttaaaggcagaataagatttcttcatatggataaaaccacattttgtttatccattcatttgttagtgaatttttgggttgtttttaccttttttttttttttttttgagacggagtctcactctgtcacccaggctggagtgcagtggtgcgatctcggctcactgcacgctccgcctaccgggttcacgccattctcctgcctcagcctcctgagtagctgggactacaggcgcccaccagcatgcctgggtaattttttgtattttttttagtagagacgggatttcactgtgttagccagaatgatctcgatcttctgacctcgtgatccgcccacctcagcctcccaaagtgctgggattacaggcgtgagccaccgcgcccggcctgtttttaccttttggttattgtgaacaatgctgctatgaacattcgtatatgggtatctgttcaggtctctgcttccagtttcttttgggtctgtacttagaagtgaaattgccgaatcgtatggtagttttgtgtttaactatttaaggaactgctgtaaatcctttgaagccattaacagttttgaagaaatttagcaaatttatttatttagcaagtgtttattaagtgcccaccacgtcctatgcacatcatgttctaggcactttgccaaaacatttctccttgtcttctgcgcagaaagacgatgccaactgagtgtgttctccactgagtggcacagaggcttttaacacatggggcagcagaatgacacagggaagggatgactgtcttcggagacattcactcactgcggttgctgttgacagtcagtgattctctgctcggggtgttcagggacagatgccttagttactaactagaaggggaagatcctgtttctgaatactgacttgggtttcattgcagtgttattaaggaaaagcgggatgcctatgtgagccgcctgaatgccatctatcaaaacaatctcaccaaggtgtgtatgctgggtttttaactttgagaaagagctgttcccttcttgagtactcagctaagtcttgccagactgtagccctatttatttatttatttttattattatttttttggagacagggtctcgctctgtcgcccaggctggagtgcaggggcgcaatctcggctcactgcaacctccgcctcctgagttcaagcaattctcctgcctcagcctcctgagtagctgggactacaggcgtgtgccaccacacccatcgaatttttgtatttttttagtagaaacagggtttcaccatgttggccaggctggtctcgaactcctgacctcaggtgatctgcccaccttgtcctctcaaagtgctgagattacaggcatgagccactgcgcccggccctattttatttttaacgaccaggtctctatctgtcgccaggctggagtacggtggtgcaatgatagctcactgtagcctccaagtcctgggctcaagcagtcctcccacctcagtctccttagtaactaggactgtaggcatgcaccaccacacctggctaatttttaaaatattttgtagagatttctcactgtgttgcctaggctggtctttaaactcctgccttagcctcccaaagtgttgggattatagagatgagccactgtgcctggcctcttactttttctattattgaaattgacctgtcagagcagaagcctctgacctagatggccagtctcttctgcagagagagggtggcatgtgccagagctggcagaccaggcctcacctaatggctgcaccttgagtaggtctggcctggcaattagattcagaagtcacatacgagagactttgtgcaccagtataccagtttattaattaaaatgaggagtgctatctagctgaaaacctgccattgtgtgtttgtttgttttttgagacagagtttctctattcacccaggctggaatgcacaatctcagctcagtgcaacctctgcctcccgccaggttcaagcaattctcctgcctcagcctcccaagcagctgggattagaggtgtgcaccaccacgcctgggtaatttttgtatttttactagaaacgggatttcaccatgttggccaggggtctcgaactcctgacctcaagtgatttgcccacctcggcctcccaaagtgctgagattataggcgtgagctaccgcacctggccaaacctaccattgtttatttgcctagagtaagacctccttaagagaccaaattaggattcagaaggttgtttttatgaatgacatctgatcaagaaaactgggcagaggtgtgtttgcctccagcaactgtatgtcatccttcactatcctgatgcttttcccccatagtgctgggatgtcacacctttcccaccaggaccatgtaggtgacattgacaacctgtgcatcacttaactctccttttccttgacaatatcttcccgccacccttcatttgtctttgtggtctcactttgctgtttctaagatttcttacggttgtttgtttgtttgtttgtttgtttatttgtgaaacagaatcttgctctgtcgcccaggctggaatgcagtgatgtgatctcggctcactgcgacctctgcctcccaggttcaagcaattcttgtgcctcagcctcccgagtagctgggactacaggcacgtgcccccacacctgcctaattttttttgtatttttagtagagatagggtttcaccatgttggccaggctggtcttgaactcctagcctgaagtgatctgcctgcctcagcctcccaaagtgctgggattacaggggtgaacaaccactcctggccctcttaggttatatttagatcagtaacttttttttttttttttgaaaagggtcttactctgtcacccaggctgaagtgcagtggcatgatctcagctcactacagcctcgacctcccaggctcaagtgatcctcctgctttggccttccaacatgctgggattacaggcatcagccactacacctggcttagatcagtagattcttgatgataattaggccactgtgatctcagtagcagcatatttataaaccaatttttaggacgagttacttcatacatagctaactgtgtacagttttatattcttattcattgggtttattttttggagggtgaattttccaaccttaatcctcaatccagggggaaaaatatttaaaggcctgcagtccttaagcacaggagattttaaggctgagtatagagtaacactggcagtactaaaacacaccaagttttttatttttattttttatttttttgaagtcaggatctcactctcttgagcagactggagggcactgtcgtgatcacagctcactgcagccttaacctcccaggctcaagcaatcctcccacctcagccccctgagtagcttgggctataagcactgtcccaccacaccctactacttttaaaaaacgtttgtagaggccgggcgcggtggctcacacctgtaatcccagtactttgggaggccgaagcgagtggatcatgaggtcaggagattgagaccatcctggctaacacggtgaaaccccagccctactaaaaaatacaaaaattgaccaggtgtggtggcgggcgcctgtattcccagctatttggaaggctgaggcaggagaatggcgtgaaccctggaggcggagcttgcagtgagctgagatcacaccactgcactccagcctgggcaaaaatgcaagactctgtctcaaaaaaaaaaatttttttgtagagatgaggtcttgctatgttgcccacgctgatcttgaactcctggactcaagcaacccttctgccttgtcctcccaaaatatgggaattataggcataaaccactgcatctggccttttttttttttaatggagctgactgaaatacttttgcaaaagaggtaggaaaattattcaggaaccagcattttgtaatacttagaaatcttggtgtgtactatagcttatggtgatcttatggggaaggaattacctatagttgacccagaaattctatattgcaaaggaaactttctatctaatatcctggaaactgaaagtaaaaatctcactgcttcctcctctgaactagtgtctgtcctatcgccacgcgagccatactcctttttgtctagcattgcagatgaagtcattaagacctgagggaatggtgttctggaggcctgtggattttgtctttgaccttgattcagcttgattaagcctggcacctgcaggaacaggcctggagggtgcagggaaagaagaagataactcaattcagaatcaagcacgttccaatatgttaaagcattccactttgtaatcatgcttacatggttccattattcttgtaagttgaccacatttgcatgcccctgcatgtatcatggctggcgaaagcgtgccagcagcccctaagtgaaggcctgggtacagaggattccagtaagagcaaatccaaaagtaagagtctgagttctcaccgtctccagcgtagaacttcagtgtcatgtacttttgtggtattcttcccattttacgaaagcacaagcattgcgtttccctcccttggccagagtattcctctcttgctcttgcctctgttcatttcaccattatcctgttgtctttcttagccttctgcctctcctccagacacaccagtctttttgagagagggtcttgtctctgtcgcccaggatggagtgcagtggcgtaatctcggctcactgcaacctctgcctcccaggttcaaggaattctcgtgcctcagcctcctgagcagctgggattacaggtgcccgccaccacttctggctaatttttatatttttagtagagatggggtttctccatgttggtcaggctggtctcgaactcccgacctcaggtgatctgcctgcctcggccttccaaagtgctggaattacagatgtgagccaccatgcccaggccagacacaccattctgtaatgtgattacattgcacataaggaactttcgccctcaattcttgggggcaaagatgtcatctttcttacgggggtgccttgcatatacttttttgtctctgggttttggcccaagttagcacttttatttcttcttctttttcctccttcttccttctttcttctttccttccttcttctaacttctttctttcttcctcctcctcctccctcttctcctcctcctccttcttccttcccctgctccccttccctccttccttcttcttctttctcctcctcctccccctcactttgtcatccaggctggagtgcagtggtgccatctcagctcactgcagcctcaacctcccagattcaagcaatcctcctgcctcagcccctcaaagagctgggactacaggtgtgcagcaccatgcatggctaatttttgtatttttagtagagactgggttttgacatgtttcccaggctggtctcgaactcctgagctcaagctatccacccacctctgcctcccaaagtgctaggattacaggtgtaagccacctgtgcccagcctatttcatcttactgtatacttccggcaactaatggcaacccctttcctaagtataggttgccagttagaagttctacagaaacttgaaaaacggagaattgtgttggcatcagcaaaccaagaatcaaaatgttcagtagagaaatgaaagttctgataagttgcagtaggtgtctttgtttttattctaagaacaggctaatgtcatggttccttctttagtcccatatagaaatcatccgtggccatgcagccttcacgagtgatcccaagcccacaatagaggtcagtgggaaaaagtacaccgccccacacatcctgatcgccacaggtggtatgccctccacccctcatgagagccagatccccggtgagtcatacaacaggtactcattaacagcagtcaggagtttactgttgctttcaacctgaaaagccatgccaggggatctgcctaaaccagttctctctttggagccaggccatgggagaaggtctctgcagaacctaactccagttggcttagtggtagctagtgatgcagtcgcccaggctggagtgcagtggcacgatcttggctcactgctacctccgcctcctgggttcaagtgattctcctgcctcagcctcccaagtagctgggactacaggcatgccaccaccacacttggctagttttggtatttttagtagagatggggtttcatcatattggccaggctggtcttgaactcttgacctcaggtgatccacccaccttggcctcccaaagtgctgggattgcaggccaccgtgcccagccaagagatttcatttggccccaggctcagacatattgcaggtaacagagggagagaaatcaatgaaagcctcattctttccttcttagcttagcatacattgtttccagcctcagtttgtcagacgggttgttatttacaagacacgtgataatttattgttttgttcaagagagagaaatcttgtaaggatgtagcttgagtagctaagtgagcttttatatgcatatttttctcttttaagtagagacttatagaagattaaagctgtaaggaatctcagagatggtcataacttcttttgcattttattttattatttatttatttatttatttatttagagacagagtctggctctgtcacccaggctggagtgcagtggcacaacctcagctcactgcaacctccacctcctgggttcaagcgattttcctgcctcagactcccgagtagctgggattacaggtgtccgccaccacgcccagctaattatgtactttagtagagacagagtttcaccatgttggtcacatgggcccacctcggcctcccaaagtgctgggattacaggcgtgagccactgtgcccggcctattattttattttatattattttatttttttgagacagggtcttgctctgttgtccaggctggagtgcagtggtgtgatcacagctcactaaggccttgaccaggacgtttagatgggagatggctcaagcgatatctttcttttttcccagctagattataaggactttgtggatggtgaacatagtttatacatcttttgaattttccatggattagcttcataagatccattatcaaggtgaattttttttttttttttttttttttttgtgagacagattcttgctctgccacccaggctggagtgcagtggcgcaatctccactcactggaacctctgcctcccgggtttaagcaattctcctgcctcagcctccttagtagctggtactacaggcacataccaccatgtccagctaattttttttgtatttttagtggaggtggggttttgccacgttgtccaggccagtctcaaactcctgacctcagttgatctgcccaccttggcctcccaaagtgctgggattacaggtgtgagccactgcacccggccaaaatgcaacatatatatttttttgtttgtttgtttgttcagagacagagttttgcttttgtcacccaggctggagtgcaatgggaggatcttggctcactgcaacctctgcctcctgtgttcaagcaattctcctgccccagcctcctgagtagcagggattacaggcatgcgccaccacactcagctaatttttgtatttttagtagagacggggtttcaccatgttggccaggctagtctcgaacatttgacctcaggcgatctgcctgtcttagtctcccaaagtgctgggattataggtgtgagccactgcacctggcctaatatatttaataactgatgagaaatgagggtaggggggctacagagagaaggaatcagcagttgacaactgaaggctttgtctgcattattgggagcaggtggtaactgaagtggtaaacttgagagagatatgggttggaagataaaattaaggttcagttctaaatagactaagtttgaagccaatgtaaaattgtgtggcgagatagttagaaacatggaactgcaacctggggagaaggtcaaacctggaagaatgcatctggaagtcctgcaagataggacctgctatcctatatccaaaggtttcaatctccttttcactacatgtatatttcactatataggttgtacctcttgtaattcaatgtgtacaccatataggttgaaacctttgaaagaataagcagagaggaaagggccacgtcgatttttttttttttttttttttttttttggagacaaaatcttgctctgttcccaggctggagtgcagtggcacgatctcggctcactgcaacctccacctcccaggttcaagtgattctcctgcctcagcctcccaagtagctgggactataggtgcgtgccaccatgcccagctaatttttgtatttttagtagagacagggtttcaccacgttggccaggccacatagattttgaactacatagaaatttgtcttttcaggcaggaacggtgtctcacacctgtaatgagctgagccccagggttcctacctgcccttggggtgggagggtgaacagatccaacagagtctgttcatgaccactgagatcttcattcttcagagaaatgtaaaagttatttagccatcatggcttctgtttctagagagaaaataaaaatgttaactcagggaggatttggttggcagctttccaagcagagactttaacaaaacttgtcaaaacggagactatgttggctgtgaaagtgtttggtttttggcataaaatgttgtgattactttgcaagagaaagagcagtcttgtgtgatctatgttgcctttttctacataggtgccagcttaggaataaccagcgatggattttttcagctggaagaattgcccgggtaagccaacctgacctgacctcagtgactcattcttccttactgtctcctggtaacttttcttcgtcttctcctcccaagcatttaatgtaggcctttcctgaattccctcctcttacagcttctcttttcatgaccttgtatatctcattcctagaactcctcagtagatccctcaaatctttcatgctttcaatcagaggccaaagtcaaatgcagggtaatttgaagactgcatagcaaagtcctaaaactgtcttctttcttcaacttaatacagcatcaattaagaatgtgtctaaagtagcttgtattttagaatagaatagctggttttggccagatgtggtggctcatggctgtaatcctagcactttgggaggctgaagcgggcagatcacctgaggtcaggagctcgagaccagcctggccaacatggtgaaaccctgtctctactaaaactatggaaattagctgggtgtggtggtgtgggcctgtagtctcagctactcgggaagctgaggcaggagaatcacttgaattctcaaggcggagttgcagtgagacaagatcacaccaagaaagaaagaaagagagagagagtgccaccacgccccgctaattttgtatttttagtagaggtgggttttctccatgttggtcaggctggtctcaaactcctgacctcaggtgatccgcccgcctcagcctcccaaagtgctggaattacagatgtgagccaccacacctggccagattttcttttaatgaacaaacatttttttttttagagacagggtcttcttccatcgcccaggcaggagtgcagtggtgccatcatggcttgtggtagccttgagctcttgggctcaagcaatcctttcacctcagcctcccgagtagctgggactacaaacgtgcaccaccatacctggttaactttttaatttaaatttttgtagagatggggtctcgttctgttgtccaggctggtctagaattcctggcctcaagcaatcctcccaccttggcctctcaaagcagtaggaatacaagcatgggccaccgtgctgaatggatttagattcatagaggggcaaaaagatcatgaggaagtttgtttctctgatttgaagttgctgtacattgcaggctttctagtttagagggatgctcctgtcacttgtgagaagaggtgatgcctggaaacaggtggggagggacccaatgtgttggcgcagggactggccttcattcatcttctgagtggcactcactgtggagtttgcattgctcaactcttctgctccctcaggggctgtgctaatccagtttgaggtcctaatcctatgcttttagaagggcttttagggagagtgactcatagtccatgagcctatcttcactttgattcacccagagtcatggacagttcagacagcacgaggcagttcagaaaggaccagggagctgctttgcagttccataggatggtgaaaatgtcccttgaagatacctcagaccaggcaggcttctgacttggaggagttctaagaaaaccatacagtcttttttggtttgctatcaggtcgcagaaatgtgttagagaacagccttccttccctgtgatccaccctgcattgtttgattttagggttgagtgacatgacatatgtgaggatgtagtgagacatacagtcatgactcattatgtttggataatgtaatttcattccggactcaccctcaaagaagtttcattataaatagctgttcattagcaattttaaatatttacatttatgcatgtcatcaacaaaaggctctgaaacacaagaaaatgaatttacgattgatacgtgattcttcaagtctactttatctttgttacggtgttggtgaataagtaataactgggcaagtacataaataatgtagggaagatagcatgatttagtttttgcactgagggggcttctgtttggatggagcatgaaccttgtggaatactgtgcatgagtagtcctggggctgcaacgaggtaaagagaaatcttttagggattcagccgcctgaaagatcagttccagaagccaggcacagtggcttatgcctgtaatctcagcactttgggaggcctgaggcgagcgaatttcttgagcccaggagtttgaaaccagcctaggcaacacagcacaacccgatctctgcaaaaaaaaatacaaaaattagctgggtgtgttggcacatgctggtagtcttggctacttgggaggctcaggccggaggatcacttgagcctaggagttcgagaccagcctgggcaacatagggagatattgtctctgcacagagttttttcctctctgaagaaatgaggctaaagagctttaaaaacaatgaaaaatacatttcccttctgtgacgggatattagggatttttcttttcttttgagatagggtcttttgctctgtcacccaggctggactgcagtggtatagtcatagctcactgcagcctccacctcccagacacaagttatcctcctgcctcagcctctcaagtaactgggaccacagacatggaccatcatacttggataatttttatttttacttttaggggttttttgtttgtttgtttgtttgtttgtttgttttgtttttttgagacagagtctcgctctgtttcccaggctggagtgcattggtgcaatcttggcttactgcatcctctgcctcctaagggcaagcgattctcctgcctcagcctcccgagtagctgggattacaggcacacaccactgcacctggctaactttttgtatttttagtagagacggggttcaccatgttggccagattggtctcgaactcctgaccaggtgatccacccacctcagcctcccaaagtgctaggattatgggcatgagccaccgtgcctggccttacttttatgtttttgtagagatggggtctcactttattgcccaggctcaaaggaatattttctacttaaagttgcagtggtatccaggattggatcttggaacagaaaaaaaaaaagattaatagaaaaactgggctaggcaaggtagcttacacctgtaatgccggcactttgggaggccaaggtaagagcattgcttgagcccaggagctaagactagcctgggctaacatggtgagactctgtctctacaaaagaaaatataaaacttagctgggtgtggcgatgaatgtctgtagtcccagctactcaggaggctgaggctggaggatggcttgagtcctggaggttgaggctgcagtgagccgtgttcacaccactacactccagcctgggtgacagagaccctgtctcaaaaaaaagggaaaaagtgaaaatctgcagtctagggtttagtcattagtaatgtaccaatgtcaatttcttattttgacaaaggtatcctaattaagtaaaatattaactttagggaaaactgatcaaggggtataataagggaaatctctgtactatctctgcaacttttctgtaaacgtgaaattattccaaaattagtttatttaagaatactaaccctctgctcgcgtctcagccgcagcgtcattgttggtgcaggttacattgctgtggagatggcagggatcctgtcagccctgggttctaagacatcactgatgatacggcatgataaggtaaatgccacctttttcttttcgcttttcttgatgttaatttaaaaaatgaagaattttttcttatgttgtcgttaaatactagggtgcaaagcaggtgtgggggtcatttggttggtttcatatggtgctgtatccaagttacctgaatttggcctatatccctcccagttgctggttgatgatgataattttgagttggtcaaattggctggtaatttcatcactaagtggtagatagtcatgagatgccctcatagggagacgtggggcctaaacataactattagctaaattaaacagactgttaggttaatttatttttttatttttattttttgagacagagtctcactcttttgtccaggctggagtgcagtggcaccatctcggctcactgcaacctctgcctcctgggctcaagcgagtctcatgcctcagcctcccaagtagctgggattacaggcatccaccaccatgcccaactaatttttgtatttttagtagagatggggtttcaccatgttggccaggctggtctcgaactccctacctcaggtgatccacccacctcgacctcccaaagtgctgggattacaggtgtgagccaccaagccccgccaggttaatttattaatttctggaaatcaattttatatgatcaagtaatgttagattgttaccactcattctaaacaatttactaaattctttgcattaaagcaggggtgtccaatcttttggcttccctgagccacactggaaggagtagaattgtcttggactacacataaaatacactaacacaaacaatagctgatgagctaataaaaaaataaattgcagactgggcacagtggctcacgcctctaattcccagcactttgggaggctgaggcgggcggatcacttgaggtcaggagttggagaccagcctggccaacatggtgaaaccccatctctactaaaaatccaaaaattatccaggcatggtggcaggcaactaatcacagctacacgggaggctgaggcataagaatcgcctgaacccaagaggcagaggttgcagagagccaagattgcaccactgcactccagcctgggcaacagagcaagactctgtctcaaaacaaaaaacaaaacaaaacaaaaaaactgcaaaaaaatctcatagcattttaagaaagtgtacaaatttgtgttgggccacattcaaagtcatcctggtccgcacacggcctgcaggctgcaggtcgaacgagcttacattaaagggaatcttgtagatcatacacttgaaattttttttttttttaagagacagagtcttgctatgttacccagtctgcagtacagtggcatgatcatagctcactgcagccttctgagctcataggattttcctgcctcagccttccaagtagctgaggctacaggtgtgggccaccatgccctgactaatttttttttttttttttttttgagacagagtctcactgtgttgcccaggctagagtgcggtggcacatcatggctcattgcagcctcaaccttctgggctcaagcgatcttcccaccccagcctcccaaatagccaggactacaggaacatgccaccacacccagtgaggtttcaccatgttgcccaggctggtctcaaactcctgagctcaagtgatccgcccacctcggcctcccaaagtgcttgggattacaggcatgcgccacctgactactttttatatatttttagagatgaggtcttactatgttgcccaggctggtctcgaactcctggcctcaagctatcctcctgcctcagcctcccaagtagcaggtggagttcaagaccaacctgggcaacatagtgagacccccatctctactacaaaaaattaaaaaattagcaaggtgtagtggtatacgcctgtagttgcagctacttgggaggctgaggtaggagaatcacttgaatccaggaggtcaaggctgcagtgagcaaagattgtgccactgcactctagcctgggcagctgactgtccctaacaaacttgtgacttaggcaagccacataatgcctttggggcctagttctgcagggacagaatttatcagatccctgactaccaagatgctatgattctaattcttatgtgagcagatggagggagacagggattctgagaatcctaggcagtatgtactttaaggaactttctctgtggctttgaaactggttatataattagctccaggagattgaggtcctgaataatattttttcataggtaagtattattttgctagaatatatccagcaaattagaaggatggggaaaggtagaggagttcctagcttgaatttatatatagataagtaaataaactgcagcagtctgtcaataaagggggtaattcttgcatctgtaaaattggctactttgcagagagccacatctacttgggcttcctgccctctcccatcccaaatgcaccaagttcattctccctttttttcccagtgttaactccattttagagctactctgtgggtgggcatggtggctcacacctataatcccagcactttgggaggcctaggtgggcggatcacctgaggtcaggagttcgaggccagcctggccgacatggcgaaaccccgtctctactaaaaatagaaaaattagccaggcatggtggtgggcgcctgtaatcccagctcctcgggaggatgaggcgggagaattgcttgaatccaggaggcggaggttgcagtgggctgagatggtaccactgcactccagcctgggtggtagagcaagactccctctcaaaaaaaaaaaaataaaagaactactctgtgaataactcatgacctcccacctgaactccacatgtggatggtcacagatatatctccaaggccatactgttgagatttatggctagacaagattttgctagtaaatcttcccttcaatcatatcagagggaaagcagaccttgagatacgaaaagtggaaagagaatttctgttccctggacttaaggaaaagagaagcaagctttgtgaggagaagacagtggacaatggctgtccatttaactgtaggacaggagttggtgaagtcatatgtattgcagatggtggtggtgatgtaggaaaatagggaatttattaatactccactcccaatatggccataagtaaggaggaaataattaggggagagataatgctgaagtttccctcccaagtttgtggtgtgtctttgctcaagttttcttcctctcgcattacccatccctatgttgatatgcaggtacttagaagttttgattcaatgatcagcaccaactgcacggaggagctggagaacgctggcgtggaggtgctgaagttctcccaggtacagtgccaagcccaggcatgcacgcggcccccagtcaatcacactttctgcttgtggcttcgcccagttagtttaaaaacacaaacactatgtctaccccggtccatatattccacctctagggtactccctattatttccttcctcctaagaagctgtattttagccaggtgcggtggctcacacttgtaatcccagcactttgggaggctgaggtgggcggaacacttgaagtcaggacttcgagaacagcctggccaacatggtgaaaccctctctctattaaaaatacaaaaatcagctgggcgtggtggtgtgcacctgtaatcccagctactctggaggttgaggcaggagaattgcttgaacccagaaggtggaggttgcagtgagccgagattgtgccactgcactccagcctgggcgacaagagcgagactccgtctcaaaaaaaaaaaaaaaaaaaaaaagtctgggtgtggtggctcacacctgttatcccagcactttgggaggtcgaggcaggcggatcacctgaggttgggagtttgagaccagcctgaccaacatggagaaactccatctctaccaaaaatacaaaattagctgggcgtggtggcgcatgcctgtaattccagctactcggggcaggagcatcacttgaactcaggaggtggaggttgtggtgagctgagattgtgccattgcattccagcctgggcaacaagagcgagagtccatctcaaaaaaaaaaaaaaaaaaaaaaaaagctgtattttacattcagccttgaagtcaagggtaaaatattagaaatctggcagttgaatttagatgaactttgattttttttttttctttttgagacagtgtctcactttgtcacccaggctggagtgcattggtgcaatctcagctcactgcagcctcaacctcctgggctcaagcaatccttccacctctgcccccaccaagtagctgggactacaggcacatgccaccacgcctggctaatttttttgtattttttgtaaagatagggttgagccatgttggccaggctggtcttgaactcctgagctgagactatctgcccaccttggcctcccaaagtgtaaggattacaggtgtgacccaccacacccggcccctgattttttaaatttggattttaaaactttgatttttgtgctcaggtgtcttattacacatccttaatatttttagatttatatttattttttaggaaatattatggaatctaatttttatcttttttttttttgagatagaatttctctctgttgctcaggctggagtgcagtggtgccatctcggctcactgcaacctctgcctcctagattcaagggattctcctgcctcagcctcctgagtagctgggattacagtcacgcaccaccatgcctggctaatttttgtattttcagtagagacggggtttcaccattttggccaggctggtctccaactcctgacctcaagtgatccgctcacctcagcctcccagggtgctgggattacaggagtgagctactgtgcccagcctatctttcttgggttttttggtttgtttgttttgttttgtttttgagacagggtcttgctctgtcacccaggctggagtgcagtggcacagtcacagctcactgcaacctccacctcccaggttcaagtgattctcctgcctcagctgggaatataggcacctgccaacaagcccaactaatttttgtattttgttttagtacagatgggtttcaccatgttggcaggctggtcttgaactcctggtctcaagcgatctgcccacctcaccctcccaaagtgctgggattacaggcatgagccaccatgcctggcctctatctttcatttttaaaattatttttcttgacacaaggtcttgctgtgttgcccaggctgtagtgcagttccatgatcattgctcactgcagtctccaactcctgggctcaagcaatcctcccacctagcttctacaggtgcatgccaccatgcctggctaattaaaaaaaaaatttttgtagacatggagtctcactatgttgcccaggctgttctcaaactcatgagctcaagtgatcctctagcctcggcctcccaaagtgttgagattacaggtgtgagccaccatgtccagcctagaatctaattttaaatcataccctttgaattttgtagttagaaagaattacaaagtgctttattcctcaagcaatcacttgaatttcaggcagtattttcctagagaattagccttttaaaaatgatcttcccttcccccacacagcctcaccttttcagtatagaccacatcaaataaaattgtgaatgtaaaaatgctcggctggtggaggaggctaccatcataaccaccttaggaccttcagtaaactatttattttctccactctccaaacccaagtcttactttccttcattccaattaagaatatacagagatcccaggcacagtggctcacacctgtaatcccagcacttgcaaggccaaggcaggaggagaatcagttgaggccatgagttagagaccagcctgggcaacataacaagatgccatctctatgaaaaatttaaaaattagccagatgaggtagcacgtgcctgttgtcctagctacccaggaggctgaagtgggaggagagcttgagtccaggaggctgatcttgccactgcactccagcctgggcaacagagcaagaccctgtctcttaaagaaaaataaataaataaataaataaataaatatattattttatttatatgtaaatgtatatttatataaatagatttatatatgtatattttatttatatatttatattttatatatgtatattttatttatatgtatatttatatataatatacatatataaatatacgtattatataatatatgtatataaatatacatatatatacatttatatatataataaataaaaatatacatatatttaatacatatatttaataaaaacattaaatacatatatttaataaaaatataatttatatataatatacatatatttatatataaatatatttatatataatatgcatatgtttattttacatatataaatatatttatatataaatatacgtatatttattttatatatatatgtgtgtgtgtatatatatatatatacacacacacacgtatatacccagggagaggcactaattgtgcagttttgaaaagtttcctagtgatgctgccgtggcctactttcaaagcactatgcttaggtttaccacttaaaatgttattacatttttccagaagtacactttaaaatactttgtttttaaagtgaggcattacaatggtgtcatgagctgacattcccagccactgactggaagatttgggtcaacccagggaacaggcttggtttaagggagttcaagtgttggtggcctttgggtaaaagtttatgtctatgtttgtatgtgggattcagtagggattttctttaatgttaaaaattctagtttcctctgtatttgctttccttcttcccctgtcctccctgagcctccacacatgtgtaacacattttatttgccaataggtcaaggaggttaaaaagactttgtcgggcttggaagtcagcatggttactgcagttcccggtaggctaccagtcatgaccatgattccagatgttgactgcctgctctgggccattgggcgggtcccgaataccaaggacctgagtttaaacaaactggtaagctggcttggtctgcccgaaacatttgtgaatctactgggagtcttatggttttattttccccccagacacccaaaacttgggtggattccattggattcttttctctttttcccatgtattcagtttgtgatcaaatttcattgcttcttcctttgaaattaaaaaaaaaagttttctcttctcttctttccttttcctttcttttctgtttttgtttttttctttttgtttttgagaaaggtcttgctctgtcacccaggctggagttcagtggtgtgatcatagctcaccgcagtcttaacctcctaggctcaagtgatccacccacctcagcttctggagtagatggaactatgtgtgtgccacaatgcccagctaatttttttatttttattttttttagagatgaggtttcaccatgttgcccaggctggtctcctcggctcaagcgattcgcccatctcagcctcccagagtgctgggactataggcatgtcccagcatgtcccagaaaaaggccgccacgtctggcctttttcttttttgttttctttccttttttttttttttttttttgagacagggtcttgctttgtcacccaggctagtgtacagtggcatgatcatagctcactgcagtcttgaattcctggggtcaactgatccttctgcctcagcttcccaagtagctggagctacaggaatgtgccaccacacctggctaatttttaagttttctgtagagatggagtcttactatgttgcccaggctgctcttgaactcctggcctcaagtgatccttccacctcggcctcccaaagtgctcggattataaacatgagcctccatgcccagccggcctgccacctctaacctagtttcctattggcctccctcttacagacttcgtttttgctatgtgaatgtctctttcaagtcctatgctgatcttttagcatctgtagtaggtaatccagattgctgggtgggtaactgtcttgtacattgtacacagggatgggaacagatgtgaagctgtctctcttggctctacccgtgctgtctgtatttgtggacagttggcattcttacttgttcttttaaatgttgaagtaaaatctagaatgggagcttggggtttggttcccagagtttgacccaaatttgaaccttagttcttacaacataacagttgcatggctttgagcaagcagcttaatttctctgcttcaagtggttcatattcacaatgggaatgaaaaaagttcttgcctcattgggttatacagaagagtaaatgaaaaagtgcatgcaaagtaatttataactgagaccctagcttacattatgaacacaatgaatgttcacctgctattgataatgatgatgatttttctgatatgctatactactctattagtaataataggatattttatgtttgaggtgcatatatttattttgttctgggtttttttgtttgtttgtttgtttgtttgtttgttttgagacagagtcttgccgtgttgcccaggctggagtacagtgttgtgatctagctcactgcaacctctgcctcctgggttctagcgattcgcctacctcagcctcccgagtagctgggattccaggcgtgtaccaccacgcccgtcgaatttttgtatttttttaatagagacaggatttcaccatgttggccaggctggtctcgaactcctgacctcaggtgatccacccaccgtggcctctcaaagtgctgggattacaggcgtaagccacctgcgcccagcctgaggcgtatatatttgatagagctgcttgagcagtgtataccttttgacttatgttctaatactaagttcctgttgtaatgtggattccttttctgtttctgtaaaaggtcatttttctgcatgttaacttataaaatattcagggagatgttttgattgtttgtaatcttattcaatgacatttagtaaaattaattgcctattttcatattaacaaaactagtcagccaggcgccgtggctcacacctgtaatcccagctctttgggaggctgaggcgggtggatcacctgaggtcaggagttcgagaccagcctgggcaacgtggtgaaatgccgtctctactaataatacaaaaattagccaggcatggtgacgcatgcctgtaatcccagctacttgggaggctgaggcaggagaatcgcttgaacccaggaggctgaggttgcagtgagccgagatcacgccattgcactccagccctggcaacaaaagcaaaactccgtctcaaaaaaaaaaaaccaaaaaaaaacaccaaaggaaaacaacaacaacaaaaaactggtcattcagcttttcacctttcaagagatattttgccattgtacagatgtaagcactgataggtccagttttcaactaaatttgctaactttttttgggggggttggatagggtcttgctctgtcacctaggctggagtacagtggtgccatcatggctcactgcatccttgcagcatcaaactcctgggctcaagccatccttctaccttagtctcccaagtagtaggaactacaggcgtggtccaccacacctggctaatttttaaaaaaaatttttgtagacacaaggtctcgctgtattacccaggctaattttgaactgggctcaagcgatccttccacctcagcttcccaaagtgctgggattacaggcatgagccattgcacccagcctatatttgctaaatttttgaagaatgaggcaaaaaaaaaaggttcagtctcatttgacattaagatatatttatataatgcaaattgagtgattactatgtgctaggtcttgtcaacatgttactaatctaatttaatcttgccaacaaccggcaaggtataaggaagccaggagcacagagatactagataatttactgggctgtaaactctatggtgtagggagaatgtctgtcttaccatggtattctcagtgatgaagtcaaagtctcatttgtaatagaagcttaaatatttgttgataaacaggtggttatacaaggtctcataaccggtaagttgcagagctaggatttgaattttggtctgtctgtaccaaaggttgtactcttttttttttttttttttttttttttttgaggcagagtctctttctgttgcccaggctggagtcagtggtgccatctcagcttactgcaatctccgccccctgggttcaagtgattctcctgcctcagcttcccaagtagctgggacttgccaagtaggtgggcatgcaccaccatgcctggcgaatttttagtatttttagtagagacagggtttcaccatgttggccaggctggtctcaaactcctgacctcaggtgatccgcccgccttggcctcccgaagtgctaggatttacaggcctgaaccactgcgcctggccagttgtactcttaagctctgtggctacttacttcctacttctgccatatctctacttctcatatatacttaggatttgcaaagccacatgataagcataacatgtcttcttaaagcaaaaatttgactacatataggaaaatatttttggttaagggaaacatcaatatgtgtttttgttttgttttgcttttacttttcttctgggagtctgaaaaaaacatcagtatgttttagagtagagtgcaaaagttgcttggatttttaaagacaaaatggtaagcttcatagaaatgtgcttttggccaggcatggtggctcacacctgtaaccccagtgctttgggagacctaggcgtgaggatcacttgaggccagaagtttgaggtcagcctgggaaacagcaagacctattctataaaaaaatgttaaaaaggctaggcgtggtggttcacgcctgtaatcccaacactctgggaggccgaggcaggtggatcacgaggtcaggagatcaagaccatcctggctaacatggtgaaaccccgtctctactaaaaatacaaaaaaattagctgggtgtggcggcgggcacctgtagtcccagctactcgggaggctgaggcaggagaatggcgtgaacctgggaggcagagcttgcagagagcctagatcgcgccagcctgggcgacagagcgagactccatctcaataaataaataaataaataaataaataaataaataaataaataaatgtatgttaaaaaattatccaggtgtgatggcacatgcctctagttctagctactcgggaggctaagcaggaggattgcttaagcccaggaggtcaagattgcagtgagccatgatcacaccactgcactccagcctgggtaacagagcgagaccctgtctctaaaaaaaaactaaataaacatagatatgcttttggtgactgcttgagtcagtgttcctcaggagcagtgcttccatgggacaagttgaaaagctggactccagagggattccaagtggcacacctgatagttgagtgatcctcttcatgtctgcctggccagttgaattgtacattgcaatgtcaaatcctgttaaaacatctcaaaagtggataaaatactaccttttatgttaagcaagatatgaaacttgccaacttttttttttctaatttctaacagaggcagggtctcactgtgttgcccaagctgatctcaaactcctgggcttaagggatcctccctcttcggcttctcaaagttctgggattacaggtgtgggcccactgtacccagcttgaaacttgccagctgtaaatgcctttcgtgttgcagctgagtctcatggtttcttggagattctggctgcagttcccatgtgaaatgaggaagggagatccagaggtttgatctaccttttttagtaggtgggccaagtggttacatgatatctctttgtaattttaggggattcaaaccgatgacaagggtcatatcatcgtagacgaattccagaataccaacgtcaaaggcatctatgcagttggggatgtatgtggaaaagctcttcttactccaggtaaggtctcttcccttcttggtgagggagggtctgcgtgttacatgatccatctggctcttcactgtcaaatctgcagtctgcttaagcaaagttaaaaggatgagtgtctttatattgtcaaaatggtacaatgtgttgaaatagatattggttggatacctgacattatctgaataaaagacttaaaatgcttagcacagactgaagttttcatgtagacaatatgatcacccgttgcggaactctcttaggagcagacttgtgcttggtggcagtggaaggaagtggcatttggaagaagtaatttagattggcatttttttttttttttggagacactctgttacccaggctggagtgcagtggcatgatcacgggctcactgcagtttcaaccttcctgggctcaggtgatcctcccacctcagactcccaagtagctaggatcacaggtgcattttttgtagagacagggttttaccatgttgtcttgaacccctgtgcttaagcagactgcctgcctcagcctcccagaatgttaggattacaggcatgagccaccacacatggcctagattgtcattcttgtatgactggtcttgatacaaccaagactgatttccttctctccggcatcccacacctcagcccgcttcctaagcaccattgcaagctctgtcccatctctatccattaatgatcacttgatctactttcagtctgtacctagaacctcatcagcgattccagcgtgtcccagggccttatatcaggatgaaaacctacaccagtcacacacccaaacccttttagctcctttagaaagttcttgctcttggctaggtgtggtggctcccatcactttcagaggctgaagttgggggatcgcttgagtctagtagtttgagaccaggctgggcaacatagtgagatgttgtctgtattaaaaaaataaagattcagctgggcacggtggctcacgcctgtaatctcagcactttgtgaggccgaggtgggcagatcacgaggtccagagatcgagaccttcctgaccaacatggtgaaaccccatctctgctaaaaatacaaaaattagctgggcgtggtggcacacgcctgtagtcccagctacttgggaggctgaggcaggagaattgcttcaacccgggaggcagaggttgcagcgagctgagatggcgccactgctctccagcctggcaacaagagcgagactctgtctaaaaaaaaaaaataataatataataataatgataataataataaagattctaggcacagtggctcatgcctgtaatcccagcactttagggttataaaatagaactaaagatgctgaaaactaatatagcttgttccataaatattgtattaaaaagctaatatcttcattaagtagattaactgccaggtaagtgagaacttgtgaatgtgtcttttgggagtggggccagacaggttgagcatcccttatctgaaatgcttgggaccagaagtgttttcagtttcagattttggaatatttgcatatatataatgagatattttgcagatgcgacccaagtcgaaacacggaattcatttgttttacatacaccttatacacatagttggaaggtaactttatacgatattttaaatgtgtgcatgaggcatacttttgtctgcgtttttgactgcaacccttcacatgaggtcaggtgtggaattttctgcttgtggcatcatggtgctccaacattttggattttggattttgaatttctggattagggatgctcaacctgtaatagaatgtataggattctcataagccaatcattttgagttgttcgctgaggcatgacatatcttcgctgtattaaactatctagatagtgtaatgaacaatggtgtgaaactgtcagaactagggcattaaggtagatggataaatggctagtggaacaatttagctatgttcaaacagacagtaagataaacactgattttaaaatatctccatagttgcaatagctgctggccgaaaacttgcccatcgactttttgaatataaggaagattccaaattagattataacaacatcccaactgtggtcttcagccacccccctattgggacagtgggactcacggaaggtaggtatttaaaaactgaaggtcatttgtggtttccttcctctttcccctgcccccaactttaaattaggtctctgtcagctgatgaaacctatctcagccccagattacattgctttttggttactctcttgtcacagttccagttttctcccctgctactactttgagtgtacagtatctttccttcacaccaccctatctctttgatcttttttttttagcttttttatttgaactaattttaaatttaaagaaaagctctaaaaataatacaaaggactcctctctaaccttaatatttttgcttttttattttttcactctacacacacacatgtctatctttcctaagaactggcccttacataaaccgagtatcattttctttttttttttctttttgagacaagctctcccactgtcacccaggctggagtgcagtggcacgatctctgctcactgcaacctccgcctctgggttcaagcaattcttctgcctcagcctcccgaatagctgggactaccaggcctgcaccaccaccatgcctggctaattttttgtagagatggggtttcactgtgttgcccaggctggtctcaatctcctgggctcaagcgatccacctgcctctgcctctcaaagtgcagggattacaggcatgagccactgtgcctggcctttcttttcatctagaggcagaattcctcagcccttcttttgtcttatatgacactgacatttattttgtagaatacttctcattttggcgtggtttgatatttcctcgtggtttgattgaggttatgtatttctggtcatctccctctttgatagttcagtgtaattgtttagttttctgatagatgctttttttaatgtgcattgtagatgaagccattcataaatatggaatagaaaatgtgaagacctattcaacgagctttaccccgatgtatcacgcagttaccaaaaggaaaacaaaatgtgtgatgaaaatggtctgtgctaacaaggaagaaaaggtaaggaaaaatccagcaaactaaatagtgccttgcaaaatggacagggatggcagtattttgcaggggtggaaaggagggagaccaagcagttgagccttctgattcaactggacaggcccactttgatctgtcttacctgcattttggggttcttcataatatttcatctagaaggaggttccactccttttaaaaaataaagacgatgccaggcgtggtggctcacacctgtaatcccagcacgctgggaggccgaggcaggcatatcacctgaggtcaggagtttgagactagcctgaccaacgtggtgaaaccctgtctctactaaaaacacaaaaatgagccaggcatggtggtgcgtgcctgtaatcccagctactcgggaggctgaggcaggagaatcacttgaacctgggaggcggaggttgcagtgagccaagatcatgctactgcactccagcctgggagacaaagcgagactccatctcaaagcaaaaaaaaaaaaaaaaaaaaacaaaacaggagaggccagggccaggcgctgtggctcacgcctataatcctaacactttgggaggccaaggtaggcggattgcctgagctcaggagtttgagagtagcttgggcagcatggtgaaaccccatctctactaaaaatacaaaaattggccgggcatggtggtgccatgaacattcctcagtagcctatgatttctggatattgaatcatgaaggctcctacttagttatttcttcatgccagttatcattcattcagttgataaacattatttgtcattcttctcaagactaagaactgctatatagagaggaataatatgaagagctggccatcaccagaggctctttataagttcaattaagatcacaatatcagtcagacaccgtggctcacccctgtaatcccagcactttgggaggctgaggtgggtggatcacttgagcccaggagttcaagaccagcctggccaacatggtgaaaccctctctctgctaaaaatacaaaattagccaggcgtggtggtgcgcgcctgtaatcccagctactcgggaggctgaggcaggagaatcacttgaacccgggaggtggaggttgcagcgagccgagatcatgccattgcactccagcctgggcaacaagagtgaaactccgtctcaaaaaaaaaaaaaaaaagaagaaagaaaagaaaatgtttctcttcttttcccaggtggttgggatccatatgcagggacttgggtgtgatgaaatgctgcagggttttgctgttgcagtgaagatgggagcaacgaaggcagactttgacaacacagtcgccattcaccctacctcttcagaagagctggtcacacttcgttgagaaccaggagacacgtgtggcgggcagtgggacccatagatcttctgaaatgaaacaaataatcacattgacttactgtttgagttttatgtatttctttattttaatcaggatcttctgatagtggaaatttttagtacataatagaacttatttatggagttagaaatttgtagtgttatccaggattgattttcatttgatcacatctcacagtaattaatattttcaagttttttttttattaacagctctgtgctagttttttttttctgttttagcctcatcccaaatataaagctttgtgaagtacaattaacttaatgtacttgaatgaatagaacttgctactttttttttttttttttttgagacagagttttgctctcattgcccaggctggagtgcggtggtgctatttcagctcaccacaacctctgcctcctgggttcaagcgattctcctgccttagcctcccgaatagctggaattacaggcacgcaccaccatgcctgactaattttgtatttttagtagacatggggtttctccatgttggtcaggctggtctcaaactcccaccttcaggtgatccgcccacctcggcctcctgaggtgctgagattacaggcgtgagccactgtgccagcttgctaattttcacagaagttgatggcaattcttcacatgtaaacagtgccagtgcacagaacctttatatattttttgaagccagtactgtgctctgcatataacaaagctgcttcaaggatgagacctttttctaaaagcatgtaatgtgagaagccggcctgccttattttcttttttcttttttaatgattaaaaatagtttgtggcaaggcacggtggctcaggcctgtaattctagcactttgggaggccgaggcaggaggattacttgagcctacaagtttgaggccagcatgcacagcatagcaagactgcatctctacagagagtaaaaaaaattacccgagtgtggtgatgtgcatctgtaatctcagctacttgggaggctgaggtgagaggatcacttgagcttgggtgaggtgaggctgcagtgagtcctgatcatgctgctgcactcaatcttggacaacagagcaagaccctgtctcaaaaaaaaaaatatatatatatatatatatatattatttttatgaggtgaagtgcatcaaacttgggaaagatttgaggaggctgggaacctcctggaaaaccactccttgaagaaagatatgagagacatttagaagtgattcctgctttcagaaggaggtggattcaaat

SEQ ID NO: 25022 - DNA, 38399 bp, Homo Sapiens
cctaccaggagactgttgtcaagctaagtctgtcctttttctgaaggcaaagcagccactctgcaacagttttgatgtgagaaaacaagggctgtaaaagggagctggcggaagtggtgacataaaggaagaggctggatgtactaggaagagctggctgaaatcagtgactcataaagctgcaaatcgcaaatcgcatgaaaacttgcgtagcaatataatgttgataaaagcaccaggtactagaacattaggatgtttgcaaagtatacccaagctctttaacagcaaatgcagtaccaagaaatataattcaagtgatagagattaatatcccaaataaatattcggcatgaagcactgtggtacctaccaactcagtggctgtggaacttcaactttctgaccgtccacctccaggtcctccaattccttaaaatatttgttctttaagcaatggagaatctcttttgcgtggctattgaaaaataaggaagtttcaaactgatctaaaaaactaagttaatacattgtatcttcttaaatttaagactgcaagtgttttaaaactaaaaccaacttttgcatggagagtaaacattctttagtcactacttttacactgtatgccttcaaaatttaagcaatccacactgtttgagccctaagagcaacactgcattccttctctcctaagcatatcctaccgttatagttttacttgcgactcatttagaaagatgtaactacaaagatggagggggggcgcggaggaggggagaaccaaggggttttatgcattctctataaattctcttacgttccaaaaggtaagaccctcagcttccctcctggaagattccccaggagccgaatcttcctcagatctcattttcatttcgtcttctaaccttgcgcctgcaatacctccgtgaccatttcattggaccctgtgctccccacctcaatgcttcctgaatccaaaccgctgaaacgccacggttctctggcactgtaacacttgtcgaagaaaacaccgtcgcctttaacctccagcatcctggccccaactcccaaaaaatcaggcactgcctccctaccttttgtaaccagtaattcttaaagtggccgggagcggctccctgagagcgtccatgaactggccccactcgccctcgggcacgatcttgagctcctggtagtagtgctcgaacagcttgttctccttgacgatctcggggtagcctccttcccagccctgaggaaggaaagagacgtctaccccgaggcccaaggagccgccccctcgccgccgcctcgcaggcctcggggtccgggaagcccaggaggagcccctggcccgcccgccgggtcccggctcctaccgcctcgccgcgctttccaccaccctcggcgccatcctccgcgtcctccggccgctgctgttgctggagccgccgaccccgcgaccgccgccccatagcccacgcggccgcgcacgcagcacgcagaaaccggcccgccacggccagaactctagccctacacctcccgggacttccggccggaaaccaaggccccacgtgtccgggcctggtcctttcggggacctttggggaccgtccaggaataagcccaaagcgcacaacccgtctttcagaaaagcggcgtgacagggaaaacagcgaacagctctaaggggaaaaaaatgctccaggaagcagccacaaaggcgtctccgcgcgaagcgcccaggtttcccacgcgggctcaaggagctccgcggacagcctgaagccgcgcgtgcgcagagcggcgcggggttactgcggccccggcgtgggtggggcgcttgcaggtccctccccgcgcaagtgctcgccccgcccccggggccgcacccacagccccggctaccccggagaagcctgacttgagaaccctttctgcagagtcccggcagtgcgggactccggtagccgcccctccggtagccgcccctcctgcccccgcgccgccgccctatatgttgcccgccgcggcctctggggcatggagcacgctgcccagccctggcgatggcaacggcgacgggggtggcggaggagcgcctgctggccgcgctcgcctacctgcagtgcgccgtgggctgcgcggtcttcgcgcggaatcgtcagacgaactcagtgtacggccgccacgcgctgcccagccacaggctccgagtgccggcgcgggccgcctgggtggtgcaggagctgccctcgctggccctgccgctctaccagtacgccagcgagtccgccccgcgtctccgcagcgcgcccaactgcatcctcctggccatgttcctcgtccactacgggcatcggtaacgtccccggcccccggccccctaccctactcccggcccggcgtcctctccgaccctcccctcactgcccggtgccctctccccgaagcctcccccacccagatgccctctccctgccagatcccccggggcgtcccccatctgcacgggtgcccttccccgagtcccccggccccgggagtttggaaaccagaagggattcgtctggaaagggcgggaaacaaaggactggaagggagtgatggaaaaaaacatgatgaaactgatctggaaagagccactcagtggtcctaggtttggtttccttagccgggcgcggtggcgcctgtctgtgatcccagttactcgggagtctgagatggaagaatcgcttgaacccgagaggcggaggttacagtgagccgagatctcgccactgccctccagcctgggtgacagagcgagactctgtctcaaaattaaatatataaaaataaagagttaaaaagtaaaaatgtaaaataaaaatgaagactagattttgttcccttagatcacgactgtgggggcgggggggagggggttggcctagagtctaatgctgatggtcggtcttgagggccactggtttctactcctttctgccggttccccttttggtatctttggtgatggtggagctgttttctcccagccaagtgatcagctgcaactggaaacctgctgtcctaaaactgcctagcagtttctccttataggcttgatcactttcagagactttcatgtccaccttatgcaagggaccccaggattgtgggggtggaaagccagcaaccttaaaccttaaacaaacgaagtcttaaagatgacttctaaatctttcaaggtttttgtttttttgaatatttgaaaactggctgtgtctgaaatcttcaagccttctaataagttggggttctctccaggtcgtatcttttggcttttacacagccaaagcaaacgacaggtcgaaagttcaaaattaaattttaaacgttttcattcaggctctggaaagcttcacagttaaaaaggatgtctctacacccaaggaagttgaactcactggctgtgtgactatgggcagtttacccaacctttctgatttggggtcccaccttaaaacactcacttcccagagagacaggaagaactcagtgtgtgtttataagcctctcttctttctcctggtgtcatgcattccagcgaagagaaagtacacagctccactacttggaaccagtgttgtacccagcacagtttttggtacctgagttccctgaaaaccagcaccttaccctgtaactggtgcagtctgtgtcctcagtgtgctttgatgacttgcactttaaacaagggcaagtcaacattcatcagaggcttagtgagtactgtgtgcctgaaactctttaccattgctttattttttttttggaatgggatcaaccattgctacaatttgaatattagtcagactttgctgtttgtatatacttttccataaatataccagaagctgtatgtctgtttctttatggctaaaagcaatctcaggtcagagtattcggtgctatcctagtcccatcagtcatgaccctggatgagttactaagctgccccgcagcaaggtttccccacctgtagaatgggcatggtgatggaacccccctgtgggatcacatgaatttagagcaaaggcaactccctaaaatgcttgcatggtgctggcgcatctgcgtgctcagtacacaatacctagcactattttgcattgctgtgaatgcacatccagacatgtactctgtgtgtcattcatgtgcactgctgccagcctcatgtgccagcaaaactgtggtgttggaaatcaagggaacacttgacaaagttttgcctgacatcccaagtggaagctttttaacttgagacatcatgtttcattgtacctacattcactcaagcagaaaaatgaatgcagcctcccaaagggccagagtcaccttgaatgatagaacttgaacagctcattcatacagagtagaacacggaggcacagcatgctgctgtcttccctgaggctgttggataaggagctgctgggatgaaagcccacttcctatactaatagtttaaaagctgctccaagaggattggctgggtcaggtatagttttttttttaaattgctaggctattttttttttgagttgtacatgttattgtgtacatagtctatgtggtttggggacatttacattttccaaatagaaaagataaacattttccattctacccaagcaactaatttattaaacagtcacttgatctaagtcatgagcacttggaagagaaccagagtggaaacagcatttagcactgaacacaaaccatcccagcagcccctgggagcgtcctggagccctttatttgcacagggccctgcagagaacggagaacaccacacccggtgagaggaggctgtgggtacaaggatgactcttatgaaaggcaggagaaaagtgagcctgaggaggcgctggccaggcagagccagtagcaccttacacaacctgacaggtgtgcacacaggccctgtgctgacctgtgaggtttcgctggagtgaggttgggccctgccttggggaactagagcctcttttgggagtggcaaggaccagagccaggtccagggactttccacagtccatgaggcctgaaggcagcagcagagctacagctcttcccagagcaactgactgttctgggaacaatgagtacaggacagtcaggtcaaggagggaggaaaggtgaaggaagggatagagggaatggtgcgctttcatgtatttattcagcaaacacttaaggaagacttacgtgccagtgaggatttctggacctggcgttgtgctggggatatagtgacaagacattccctttgagttgaggagtaaaagacaggttatggagaatctatggggtcttttggacacaaacaccagggagggaaggacaggctgcctggaaggggacagggctggggtggggggatagccatgacgcaggacgagctgtggtcctgaccagttcccccaggagggcaaaggacattttcaggaacatctttagggctcacggtagcgacaaggattgcctgcctcctatctgtgctgaagcctccttctgatcccagggcgcttgggttcttgggtgcaggggcggcagcgtctcactggggccctagtcatgtagagcatggagtggcgtctggcatggtggcagcccctggaggcaggtgccttccccagcctcctggcaggcctccctagggccttccgaagcctgtgcctactcctatcacctttgccctctgctctgtgattacagtgacgccccgctgcatttaccctgttccctggccctctattttgtctccctgggctggtgctgtaacccaggtcctcatcatctgtgttggttcttgctgggcttcttcactcttccccactggtctttctctaccctcgtttgtaaatcctgctttgctagacacagcaaaagtctcccggagtcaagggcattagctctgaactgtgtcggagtcgctggggggctttgcagactgtgcctgacctcatgctctttctctccacccacgcagctttgttcagtattccctgaacccaggctgctttgctcatggattttccttccccactatcagcagtgaattagtcaggggattgtctctgcattgcacattcatttaacaaataactccgaggagcctgagcaggaggtgccgcttgccacgggagtcctcagtgactgcctttgttaggactggtggccaaatggtgcccagagtgcacacagtcagatgcccagaggcctcctctttctgacacctgtcccaggtttgtactcagccaggtccatgaccttgtgggactttgcttctgtctttatctctgacgatggtgcctcaaaacattgcacctactttgattccttgtatctctcgtgtaatcctattaatgggctcctgtggggagcctagcccagcttcacttttaaatgtgcggtgggtaatgttaaaacacagcagggaactttgagggtgaagtgtgttaaaagataaactcaggtgcattaaaattgtagtttttttaggctgggcgcagtggctcatgcctgtaatcccagcacgctgggaggccgaggaaggtggatcacacgaggtcaggagatcaagaccgtcctgaccaacatgctgaaaccctgtctctactaaaaatacaaaatttagctgggtgtggtggcgcatgcctgtaatcccagctacttgggaggctgaggcaggagaatcgcttgaacccagaggtggaggtgcagtccagcctgggcaacaagcactaaactccatcttaaaaagaagtcatagcgttttttggagcagaccaattcatgaatcagcaccaaaccacaagcagtatgagctccacctagaaggtgtgtgggaaagccattttgtaagacgtgtttgcacaagcaagacaaaggaagcatttgattggtcagagtggaaagttccggaggttagtgggtggtttctccttggaacaatctctcattagaagtcaattggcagtttctgattgctttaagtttccttccactgttgggtttccatgtgcttatgtaagacacaagacaccatctcagcctgatggccttctaattaatttgttttaataagggcatactgaatccttggcccttgcctcatagattggaataatctgagaaaagaaaaacttctattcaaaagtgtaggatgatgaaaagtgaaataatgatagccaagcacttattttaagcatgctttgttggcagctgtgcaatttggccatcatttcaaaagtcttttacagaaggaaaggctaggcgaaaggaacagacccaaatctaggaagtgccatagatttcaatggtctcacgttgttaggggaaaaaagcaataaagtcgatcattaaaattaaccactctcagttttaaacatttaaaaattattaaatccaccatgacctaaattactcccatataaccaaattctctatttcattgttcccaaacttgggggtacaacattataggttgtcctgaaagatgacgtccagacgctttgagagtcaaatcatttgctgaataaatgccttgttgttataagtaaaccaagggattattattccagtttgttgggaaaatatttcaagacatacttctttagttccctgtgtgaattaaacaggcatagaacttgcttgcaagacgacaaaacccaaacatcttactttaaacgctttaaagaatagtcattccaagtagttgcttgcattttcatcctctggaatgcatactgtgctatattttgagtctttcccctttggagcaggtcccatcgagcatatgagtatgaacagttatttaccagttacttgggtttatactgtatgggtaattctgcccgtttgaatagctggagaaatcactcaagtgctgcttaggagcagacgtttgagaagctcagagttctcagtgcccttgtgtgggtgccaccccacagccctcgcggacagtaagaatggacatggaggcagccccgatgattttgttcttttcaataatccatttttcttcctgggtgcttatagggcactttctttttccttagatggataatctgtgtttgcttgtttattaatttcgcctgattttctccaagcctttttaggaaattgaatttagcccaggaaattgaatttctccgtgtctctcattctgtctgttctgaatgttaggtgccaggacttaagatacttgtcaatattgtatgtgaacaaacttacaggtgaaatacatgcttgttgtagaaaacttagaaaataattcaaggaaagaaagaaaagttgcctataatttcatcttagagataaaactgacgatattgtggtattatctttttcccatatctttcattgcttttaataagtttttttctaagcagtagagatacacacatacacatacaacatcttgtaacctacttttagcagttggtaagtatttcttctgacttaatagaaacacttaatgaaaatgactgacagtgaggatttcatatgcttgggccagacattcccatgtctcaacgggtcctcatggtgtggtggctggagcacctgggaaaagggacattgccagccagccctgcctctgtgatgttctctggccatgtcaccatattcctgtgagcttccacgttctgatctgtaaaatagggataatagtcacagttttgcagtgtaaaaaaagggcatttagtataggattaggaattattagaaacactttgataaggaactataagatgcacttttatattatatctaagcttgtaaacttaaccaaaaggcaactgcaaatcgtcctggccattaaagcaccaaataaattctggcacattaatactctcagttcagctccatcatcaaacatgtctcccattcctggtggcctcacagacaccaaggtttgcagttttcatgggttataaaaacaacttgatgaaaagcaagtcttattcttttttttttttttcaattgagatggggtctcccagtgttgcctgggctggtctcggaactcctgggctcaaacagtcctccttccttggcctcccaaagtggtgggattaccaccacaccaggccaaagccttgttctttgcctggaaagaaataagataaaataggaaaattataacatgacagagaacaaagtgtcagatttaatcttacatttactctgattaatcagcaaacagaatctctgtgtagcttcccagacctgactgttttgtattcgttagcttgtaatcagaacagaaaacagatatatgacacattactcaacatcctttttaatccaagtgcttcatagtttctcttaaaaatggtttccatcttaagggactgtcaccttcttgttcaatcctttattttctcaaagagagggaatagttgtttcccattgttcctctatggaagggtgattttgggtgcgaatgggatggtgtaggagaaggggctgtgagtgcccatgcctgtcctaactggggtagtctgggccgcagactgatgtgctgtgagttccatgagtaatttatgtccaggcaggtgcacccaccttccttgctatctgaaattggccccatggccctaagtaggaccctgtcatttatgcctggggtccgctgcactctctcaagtgctgtcgtccctctagagtctaaacaaagactcaggtaaaagccatgcccagacaccttcttcccgaccccaccccacgcgagttccaaattggccacagtcaaaggaaaatcttcaccgacaacaatggatttccaaggaagtaaactgagtaaagctaaagggaatggcccgcaagaagaaaagccttccaggagatgctgagaggggcagagcgcttccttggagcggagtgctaggtccaagtcagagctctctagagggagggaagtcaggaagaagatctcaccttctcctagcaactggaggcagaggcagcactcccctcctctcccctgtccaccactctgttgacttcagcggttttatgacaggcctataggcatcagggttactggtgtccccttccagggcaggaatcagagaacaccagaagagactggtgtcgatctttgtaaggctcggtttccagtccttgcagttctcagacattcacatgagacaaaaaagagggacaaatcttatcctgaggttctttgtgaatgtcttatccagggcatgtgctagagcagaagtcattcaaaaatgcagctacgcagaagcacgtcctcactcccagagcacagccaaacctagaccgcagcagctgcagccatgtagcaccagtgccctgagcaagttgatgtcaagttgatgtctccaaaatataacacacttgtgctaattcagactaattgtcagcaggcttttctggaaagagccaggtagtgcatatcttaggctttgtgggccaagatactgggtaggtatttacgatgagagaaaacacattttcacaaaagtttcagtggtaaattcaaaatatattatcttagtgcattttttgtaatatatgtctaatgagaagaatagaattcttttcttggtgagggataacatttcacttattgggattcaaagttagtgtttcctattatcaacatctattgtaaatgttcctctcttagtgttgatctgtcatgagattttacgtattttatctctataaatggaagcgttgacatcagtccacatgtatatgattttaattgagcatgatcatcacttggaaggcactcatggaatcctgttagattcttctcttgatctttgcctttccatatggtattacattacagattcatatcttcctatggaagattagatggcaactcttccactgcacagctaaatggattttgaaatatggaaatccaggttcacacactgtatttaaacttagaatttatatccactgcaaactcatgtgagcatggagagctcacttcttttaattttaatagcatggaaagtacagaacgcagtttgatatgacttgtgattggaacaatggcagttgtcatcaaaatgactttaacacagtatgagttttgcacaagtgctgttttgccttgcagctttaggttgaatttattatcaagtctgcagtaaaagctacttaagcccttcagaactcaataatggtggtgagggcagttcttgctcagaaaagtttcagtctcagctctgagctcaaaataatgtgatgaaactttattaagccatcaaactggtgtatttatgtgggacaaatcggcatagtcagcttatttgtgacaaaaagttagagaactgatgatagttgagtccatgagagggattgtcattcactgttgacactatgggcttaatcacacacaacagattttctgcaaaagacctgctgatacaaggaatagcatgaaacaccttacatttttacaagtttgtaagtttgtaatttgttttttttttgtcccatacatttttatcaccatcatttgcaacagcttagcagattccactttggattctactaaattcgtgttttctcaacatctttgaaaatattctcaccggtagttgttctgcacagactatctaaagagcctaacccttcattcacttcagccttgatgtgaactcctcaaataaacaactgagccatatcagtaacatccatagactcacccagagccgacaaagactgctcatcatctgccttgctttttcttttttaattattattttgagacaggatctcactctgtcacccaagctggagtgcagtggcatgatcctcagctcattgcagcctccacctcccaggctctgatgatcctcccacctcagtctcccaagtagctgggactacaggcatgtaccaccacacccagctaattttcatattttttgtagagagggggtttcgccatgttgcccaggctagtcacagccatctacctgccttggcctcccgaagtgctgggattacaggcatgagccactgcatctggtcctgccttgcttaaatagactgttgagggtgctcccagtgtccttaactcctctagcaagtgttctccccaaaaggctaattgtgagaaacaagtgtgtattctctggacacgcctctttggttgctgctgttgattaactcaccattgatgcacagctttccttgcttcactaaccaatgagccgcccgataacctactttggttgcagcctcattttcctttgttttgtgaagaaatcctgctgccttggcctctgtgccttaaatgttctagtttttctgaccagtgcttttctgtgagttgggaataggctggtgagtgcagagtctgataatattatcctctattatattcttttgacacagttctagtgtcattgccagctgacgtttttcaggtcagaattcaacccacaacttagaagaaaattgggagaaatggatcaaggttcgctggatgtgattctgatatgccagagggaacgtccaccacatacgcagaatgtttcctgggagttgcttctctcacactgcatttgtccattgtttaaatgggtgacatccaatgcagaagtgtcttaagccattttcaattctgtgtatttcaaccttgctaatattttcccttcctctttttcaccttgccttcctgttatccagtattgaatttaggatggatttttttcaggtccagaggcccgacctcttatgaactgagtcctttctattttaatagacatcttgctaaaccaaatccaggccttacattccccttttatgtcttgctctttttttctgtatttcctcaaacttagaatttgaacactttctcacctctatcctgcagtttgcctagtgggaaataacttgaggccgtaactctcagggaagttttctctcaactttctcataccggtgtcccttttgctctttgccgcattgagaatctcctaagctgacttcagaagtgggctgcttgctcttggtacttctcagcttggtacactgaggggtagagtgagagccactctgtcttctgccattaattctgtccatccgggtctaacacaaggcctcctgttctggttgacaaatgggccgaggcaggaaggatgtctgatcacaagacaagattgcctcctgtttttaagggagcctatgacagtccaagaagcccacacgtacctctgtcaaaaccaaattctgcttgttccacaggaaatgttggtatgcaagcacttgcagtgtgcctacatcccaaatgccagcccatggtacccattgtctgcccggatctgaatcatgattccaagacgcagagagaaattgctgggattcgttgttcttattcattgcttggcaacactgcagcttccaggagaatacccacctcactgatgacacaacatctgaatgcacacttactggccaacacgtgctttgctgtaaatcagtatgaagtcttcctaggggtcctggcctgaatgagatgagaaccttggaggctgcttttgactcatgtgaatgtcttccccaggagttaagtgggagtgctggggagagagtggcttgaggatgcacagccagcatgacactactattatgtgattactgtcgacgttcataaccataactaatgactaattatgactttaccctggcgcacatggtcagaatggaaacaaataacaagctttacagtttttcctgctctattaaggtataatttacaaataataaaattcacccattttaagtctgtaatttgggctggtcgcggtggctcaggcctgtaatcccaacactttgggaggtagaggcaggtggatcacctgaggtcgggagttcgagaacagcctgaccaacatggagaaaccccgtctctactaaaaatacaaaattagccgggtgtggtaacacatgcctgtaatcccagctactcgggaggctgaggcaggagaatcgcttcaacccgggaggcggaggttgcggtgagccgagatcacgccactgcactccagcctggaccacaagagcgaaactccatctcaaaaaaaaaaaaaaaagtctgtagcttgatgaattttggtgattgcatatagttgtgtaatcatcaccgcaaatcaagaggtagaacagctgtattcctctaaaaaactccctttgtgtcattgtggccagtctccaccctgactctatttttgccttgtctggatttcgtaagtctaaattcagtttcacaatctatttttttttattttctttattattatacttgaagttctagggtatatgtgcagaacgtgcaggtttgttacataggtatacacatgccatggtggtttgctgcacccattaacccgtgatctgcattaggtatttctcctaatgctatccttcccccgatcccccaccccacaacaggccccagtgtgtgatgttcccctccctgcgtccatgtgttctcattgttcaactcccacttatgagtgaagacatgcagtattttgttttctgttcttgtgatagtttgctgagaatgacagtttctagcatcatccatgtccctgcaaaggatatgaactcatccttttttatggatgcatagtattccatggtgtatatgtgccacattttctttatccagactatcattgatgggcatttgtgttggttccaaggctttgctattgtgaacagtaccacaataaacatacgtgtacatgtgtctttatggtagaatgatttataatcctttgggtatatacccagtaacgggattgctggggcaaatggtatttctagttctagatccttgaggaatttggttggtaggctattaattactgcctcaatttcagaatttgttattggtgtattcagggattcgacttcttcctggtttaatcttgggagggcgtatgtgtccaggaatttatttatttattctagatttttctagtttatttgcatagaggtgtttatagtattctctgatggtagtttgtatttctgtgggaccggtggtgatatcctctttatcattttttattgcatctatttgattcttctctcttttcttctttattagtctggctagcagtctatctattttgttgatcttttcaaaaaaccagctcctagattcattgatttttttgaagggtttttcatgtctgtctctccttcagttctgctctgatcttagttatttcttatcttctgttagcttttgaatttgtttgttcttgcttctctagttcttttaattgtgggttagggtgtcgattttagatctttcctgctttctcttgcgggcatttagtgctataaatttccctctacacactgctttaaatgtgtcccaaagattctggtatgttgtatctttgttcttattggttttaaagaacatctttatttctgctttcattttgttatttatccagtagtcattcaggagcaggttgttcagtttccatgtagttgtgtggttttgagtgagtttcttaatcttgagttctaatttgattgcactgtgatataagagactgtttgttatgatttccattcttttgcatttgttgaggagtgttttacttccaaccatgtggtcaattttagaataagtgtgatgtggtgctgagaagagtgtatattctgttgatttggggtggagagttctgtagatgtctactaggtccacttgatccagagctgagttcaagtcctggatatccttgttaattttctgtctcattgatctgtctaatattgacagtggggtgttaaagtctcccactattattgtgtgggagtctaagtctctttgtaggtctttaagaacttgctttatgaatctgggtgctcctgtattgggtgcatatatatctaggatagttacctctgcttgttgcattgatctctttaccattatgcccttcttcgtctcttttgacctttttggtttaaaatctgttttctcagagactaggattgcaacccctgctttttgctttccatttgcttggtaaatattcctctatccctttattttgagcctatgtgtgtctttgcacgtgagatgggtctcctgaatacagcacaccgatgggtcttgtctctttatccagtttgccagtctgtgtcttttaattggggcatttagcctgtttacatttaaggttagtattgttatctgtgaatctgatcctttcattatgatgctagctggttattttgcctgttagtttatgcagtttcttcatagtgtcaatgatctttacaatttggtatatttttgcagtggctggtaccggttgttcctttccatgtttagtgcttccttcaggagctcttgtaaggcagtcctgatggtgacaaaatctctcagcatttgcttgtctgtaaaggattttatttctccttcacttatgaagcttagtttggctggatatgaaattccagatatgaaagaaaagaaaattcttttctttcagaatgttgaatattggcccccactctcttctggcttgtagggtttctgccaagagatctgctgttagtctgatgggcttccctttatgggtaaccagccctttctctctggctgcccttaacattttttccttcatttcaaccttggtgaatctgacaattatgtgtcttggggttgctctcctcgaggagtatctttgtggtgttctctgtatttcctgaatttgaatgttggcctgccttgctaggttggggaagttctcctggataatatcctgaagagtgttttccaacttggttccattctccccgtcactttcaggtacaagagtcaaacgtagatttggtcttttcacatagtaccatatttcttggaggctttgtttcttttcactctaagtcttctcgctttatttcattgagttgatcttcaatgactgatatccttttgccacttgattgatttggctattgatacttgtgtatgcttcacgaagttcttgtgctgtgtttttcagctgcatcatgtcttcacctgttcttctctaagcaggttattctagttagcaattcctctaaccttttttccaggttcttatcttccttgcattgggttagaacatgctcctttggctcagaggagtttgttattacccgccttctgaagcctacttctgtcaatttgtcaaactaattctctatccagttttgttcccttgctggcaaggagttgtgatcctttggaggagaagaggcattctggctttttgaattttcagcctttttgcactggtttttccccatctttgtggatttatctgcctttggtctttgatgttggcgatatcgatactattttttttcggtttgttagttttccttctaacaggcccctctgctgcaggtctgcctgagtttgctggaggtccgctccagaccctgtttgcctgggtatcaccagtggaggctgcagaacaacaaacattgctgcctgttcctacctctggaagcttcatcccagaggggcacccgccagatgccagccagagctctccagtatgaggtgtctgtcggcccctactgggaggagtcttccagtgtggatacacagggggtcagggacccacttgaggaggttgtcccttatcagagctcgaactgtgtgctgggagaaccgctgctctcttcagagctgtcaggcagagacgtttaagtctgctgaagctgcgcccagagccgccccctcccccaggtgctctgtcccagggagctgcggttggctctgcccagttcgaacttcctggggctttgtttacactatgagggtaaaaccgtctacttaagcctcagcagtggtggatgcccctccccccaccaagctctagcatcccaggtcaacctcaaactgctctggagcagcgagaatttcaagccagtggatcttagctttctgggctccatcggcatgggacccactgagccaggcactggagagaatggtctgctggttgcgaagactatgagaaaagcgcagtgtctgggccagaatgcaccgttcctcctggtacagtctctcatggcttcccttggctaggaaagggaaatcccttgaccccttgcacttcctgggtgaggcgatgccccaccctgcttcggctcgccctccgtgggctgcacccactgtccaaccagtcccagtgagataagccagttacctcagttggaaatgcaggaatcacccaccttctgtgtcgatctcgctgggagctgcaagaccggagctgttcctattcagccatcttgcccgcccacccttcacaatctattaatatatagagagcagtaatattgcccaaaaagggaaagttaatctttgtggttaatcctctcccctgagtctcattttgccttttctagaatttcataagtctaaattggatttatttcattggtaacagtgctattcatgttgtctttctttcttctcgggtcagttttggtcatctgtgtctttcaaggactttgtctatttcatcaagttgttaaatttattggtataaggttgttcataatagttccttattatctgagtggatcacgtgagcccaggagttcaagaccagactagagatcagacatagagagaccctgtctctacaaaaaaaagtttttaaattaaccaggtgtggtggtgtgtgcctgaggtcccagctactcaggaagctgaggcaggaggatcacttgagcctaggatgttgaggctgcagtgagccatgattgccccactgcactctagcctgagtgacagagcaagaccctgtcttgaaaaaaaaaaaaaaagagttccttattatcctcttaaggtctgtaggatatgtagtgatgtcccctctttcaatgtgttatacacttatattaaaaagaaaattcaaacagagaataacattttgcattctctttataattttctaatttcttgtccttttattttaactccttaaacctttagtaaaatgcacctaagccagtgtggtacaacagaacgtgatctttctttttttttttttaattatactttaagttttagggtacatgtgcacattgtgcaggttagttacatatgtatacatgtgccatgctggtgtgctgcacccactaactcgtcatctagcattaggtatatctcccaatgctatccctcccccctcccccccaccccacaacagtccccagagtgtgatgttccccttcctgtgtccatgtgatctcattgttcaattcccacctatgagtgagaatatgcggtgtttggttttttgttcttgtgatagtttactgagaatgaacatgatctttcaattgccccgatttacatttaagctcagccactcactagcttgtggccttgagcaacttactttaccactctgagtcttaattttatcctctatcaaatgtggataagagtgcctctgcctggttagctgagctgggggcaaggagttgctgggggaattgggggtggggctagcaggtgaaagtgctcagtgaatggaagccattgcaatggtgatggatgatgtgatgatgtgttccaaatcttattacttagactaggactagttaatggttttaggatagtggaaatcttgagagcctcttgaagcccctagttttctcaaattcagtgtattctgttttatattgcatgtaagtagaatctggagtttgtacactgtggtaaacatgattgaaacgtggtaatgctttattgaaaaatctgctttttggctggatacagtggctcacgcctataatcccaacattttgggacaacaaggcaggaagatcacttgaggtcgaagtttgagaccagcctgagcaacagattgagacttggtctctacaaaataataataataataataataagtgtggtggcacatgcttgtagtcccagctactcgagaggctgggacaggaagatcgcttaagccctggagctcaaggccgcagtgagccatgatcaagccactgtactgcagcctgggcaacacagcaagaacctgtctcaaaaaataaaattaaaatcaaaatccacttttagcttagatataataaattagtataaatgttactgaggatgacatttgtacaagaaagtaagatttaaaacccaaatcatttaagataggattacagaaatgattatctttaattttttaaaaaattgtgcctgtttcttgtttcctaaggtgcttaatttacccatttctgatgcgaggaggaaagcctatgccactgttggcgtgtacaatggcgattatgttctgtacctgtaacggctatttgcaaagcagatacttgagccattgtgcagtgtatgctgatgactgggtaacagatccccgttttctaataggtgagtgtccacagcagtgaactccgccttgttcacatcattgcttttatattgatgtcccagtggtttctaatgagaaagtccaagcttcctgtgagaacaaagacaacagagaaagcagcagcaccccggagtcccatgggagagcccagctgtctcagcacagctgggggcagagaggtgacgcaggtgctgggcaccttcccccgcacgggcaggcactgaagcacaggtgcctggtcaggccaagaacccaaaaatagcagtgggctgtagcagaatgagcagggactaaagattgagaccctttggccactcattgaccacataatctcctgcggttccttccatgacatgaggaaaacccagactgggttagcttcctacagtgcagcttctgtgattctatgaacttgaatcaacttttaggtctatgaagttgttgaatttttttatttgtatcagttaatgtgaattaatgtacattttcaacctctaattataactttttaagttctaagcaaaaatgaaaataaaacagccatcaaaaatatttgcaagagcattaaaaattaacactctggctgggtgcagtggctcacactgtaatcctagcactttgggaggctgaggtgggcagatgacttgaatccaggagttcaagaccagcctgggcaacatggcgaaactccagctctacaaaaaatacaaaaacgtagctgggcatggtgacacgcaccatggtcccagcttactcagaggcactgaggtgggaggatcacctgaggccaggagatcaaggctgcagtaagccatgattgtgccactgcgttccagcctgggtgacagagtgagactctgtctcaaaaaaaaaaaaaaaaaaaactcagggatcttatatataagaaaggttcttctatatatttgtttagtctatcctagcatttagatattaaaccatactgaggtgttgcttacaatggtagcatgctaaaagtctgaagtcagtctgtcagatttgcaaactaccctgcagtgcttcaccttaagctacataaagtgaccttacattgcattgtgctttttctccatgtgtattaatttataatcatagaaataaactaacacttggatagtactttgttgctgagagatccctttcacatttctcagccatgttttttgttggtgaattagaattttattccaaggtttcatcatacctgaggatcgttacagtgagacacctgtccctcctctacaaaaggagggttggctgagaaggcgtttcaagatccttttctagctccagagtctgtgcctccatgaaatgctagactaaattctttggtactaaactgttgtacactacccccaaatatcttcttggtttacctgctttttgactactttattttcttctgccctacctgtcaagaggaagaacaggcttttgagttcctgtgcagatcacacgatttatgcctccccatgttctctgaggcagaaaggatgtccctaagatgtgaaaggtcagaagagttacacagctggcccaagacatctagacgcagtgaatggcagagcggtgatttccaccacctcaccaagctgagcttccgcaagtggtaacaaggaataagaggaaggggaatttctttctttttttctttttaactaaagatacagattttaaatgtttgccagagagtctcatgggactcacctctatggtgaacaacaacagaagaaccctcctgtttaaagtagctccgcagatggttcgcatcacgtagaggtgactgtgaagctggtcagagattccaaacaccaatcaattgtagacagacctcttgacttctctacaattaaacagaaggatttgaaaaggaaaaaatatgccaagtggaagacaatctaggttaccttttgtgtgttatatttattgcctagagtttattgtttttgtgaggaaacagacgtgaaattacataaataagtaattatgcctactgtagttaccatgaagtaataagcaaataataataatatatttttttttttgagatggagtttctctatcgcccaggctggagtgcagaggtgcaatctcggctcactgcaacctctgcctcctgagttcaagagattctcctgcctcagcctcccgagtagctgggactataggtgcatgccactatgcccaactaattttttttattttttttagtaaagacagggtttcatcatgttggccagactggtcttggactcctgacctcaggtgattcacccgcctcagcctcccaaagtggtgggattacaggtgtgagccaccatgcccagcaaatttctaacaaaaggtttttcaaaacagcaaaagtggttaatctaaaatattttatagaaagattttaagttttttttttgtttgtttgtttgttttttcttgaggcagcctgtcatccaggctggagtgcagtggcgtgatcttggctcatggcaacgtgtgcctcccaggctcaagcaattcttgtgcctcaacctcagagtagctgggattacaggcttgcgccatcttacctggttaatttttgtattttcagtagagatggggtttcaccatgttggccaggctggtcttgaacccctggcctgaagtgatccacccaccttggcctcccaaagtgctgggattataggtgtgagccactatgcccagccagattttaagatcttataaatggaattaaatatttagcttagatgaacacaagtactagttttcttccaatctaagcaataaagggagcttgtctcctggaagaaacataaagtaaccatgttatttagacaacatgattcctttctagaatctcatattggaagccaaattacctaggggtgaaatactaaaatcccaaaaaggtagcaaatcaactataaatgtatggatccaataaatgacttacaaaacgtattataaaacttggtatgaactgctttgcttaggaaaaaaaaataaaagctgattacagtggcaaaatcagaaggaagaaatcttgaaacccttgctatagaccagaaggttttccatgtcctttttctaactgtgaaaaagtattcaatgtcactggtgatgactcagataataatgatgccccacgtgtacattgatttaatattgaactgaatgccagcactaagcagcatctgtctttcccattttaaaaaagtatatcagaaccatcaagttaacctctttttatcaatatttcttttataaaacactgttttggccttttgccttttcttgatggaattaattgatgtgatactaacaactctcctttaagtgatgaaaaatccctgcggattcgtaagaataggagagaaaactggggataccgtgggattctggggagaaccatgcaggcggccacgggagactcttgtcaagaaccgaggaggaaggactgaccgagcaatgctgattgatgagcctgcaggaattctgctgtgggggaaacatagatgcgcattaatttgtttaaatgaggttgtaaataagagaagaccagagatctactcctaggaactgccacccttcaaggggtgacgtacagccagtggtgacagagcagcacaggagcatcacccctcctggttcatgtggtggagatggcagcattgcctcatgcagattttgtgagaaataagtgggatgcgtctgtctggtgggctgactccctgatgctccctggaaaggagccgtgtgcccaagtcagatttctgtccatacttgtcatcctgaagatgtagattgtgatgaacaggtcaaagtattttgagtacattagatgatgtatttgtattattagaaaaacaaagccctgcttggcatacctgacaacagtccttaatggtttttactaccagttatggctaatatgttacactaacaatggtaatctgaagggttgcaataatactgttcagtcaggctggggctcgtagtgaaattttacggtttattagccataatcatcttgcaatttttttcctttaggttttggcttgtggttaacgggcatgttgataaacatccattcagatcatatcctaaggaatctcagaaaaccaggagatactggatacaaaataccaaggggtacgtacagaaagtgaagaatttctgtgaaagttgcttgccatggttcctggctattttagtgttgccagctctaagaagtagtagcgtagtagttattagctacaagttttcagtgtaagtcatcattattaataacaagtgctattgttattgtcttattagaataacaaaagacccaaatctagctaactgaacagttattaaacaaagcagaaactccagttatatctgtgcttgggaagagaggatgaggaagaatttatgattgacgaggagtgtctgacacttttgtttctagcagtataatggaatagatactttgaccctcctctgaaaacagtttaaaacattggaatattttgaaaatcttcttaaacgcatcagtatactatcaagaaaggaactaatcatcagaggacaagatctaggtgaatgttggaatctggagcgtgtcttttgagaatttgtgatgaggcgccgaccaccatgctggtttataacccagattcgcactacttgtatagtatgaaaaatctcaagccataaattaatttccgtggcctggggtagtggtggactctcctggccagcaaaagcccagatccccaaggggatgtgcattcaacctgagtctcaaagaacccaatgtgccacgttccacagagtaagaggcacggtcacaaggtacagaacccacaaggaagtacagcaccatgagggagagcgtaattcaacatgaaagatttcagatgttagaattaatggaaacattataaagtgagtacttgaaatgctttttaaaaggagtagattacaattaggagtaagaagcaatgtaccataaaaggactagaaaccaatagagcttcagaaaaaattttttaaagtacataaatctaaaactttaatggagaaagggcgtgacatcacttagtttgaaattcttccacttatgttcctagaaaccatatgagaatagcaacaaaaacaaacaatgctacaaacctcaaattacttaaactgtgaccctgagaacctggaatcagcaaagccagctccagacgtgatggtagtgtgatagaagtggcagagaagagaaaacatgacagagtcctagacaggctgctgatcacctattcagcccctgggtggattggggaagaatcctctctttggtgttgggcttatgagcaaactgcaccctcatggggtcatcccaaggagccgcttcctctggcaggtacagtggctgggagagcacagtgtaagctggatggtggccccctcgcttcctgcccagcacccttgcatggggaacagcatgattccaaattaatcggcaagtgttcatcccctgaaggagagggccctgtcctgaggaggagctgccatgagccagactaagaagggacagggcacagtcctggggaaggcagaatgaaaaggtgcagaagataccagaagccacagactggcagatttgagaaacaccacttccaaaagaaagggcatccccagagacggcaggatcccatgggagggccctcctgggccaggctggttacggaaaggcctgcggtgccttatacagagggtcctgtccactgttccacagtagttgagatgccacaaaaacttttcagcccctgtccctccatttcctgctctcagtgtctgatccttgttctaatccaacatattcaaacctgaacaacaaaaaaggtacaatccccaaatctgtgcagtcataacattaggacagcaaaaaagcagcaaaacttacctgagcagaaacgtgtttcacaaagcaggggaaaattgtaatcaaaattccaacatgaattttaaaatgtgaatggaggccaagcgtggtggctgacgcctgtaatcccagcatgttgagaggccgaggtgggcagatcacatgaggtccagagttcgagaccaacctggccaacatggtaaaaccccatccctactaaaaacacaaaaattagctgggcgtggtggcacgtgcctgtaatcccagctacttgggaggctgagacacgagaatcacttgagtctgggaggcagagggtgcagttagctgagatcatgccactgtattccagcctggacgacagagtgagactctgtctaaaaaaaataaaaaaaataaaatgtgaatggagcagttgcagagtctatacccatcagctaaagaacacctgcgacgaacccgcaatctacaaacttattacctgtcgcagtaaagggagacctctccctgtgatgtttccccacagcatgtagccgccttcctgaagctagtaatcaacccagcttcctgacggcctgtggccatcaatggcatctctgtgaacagacaggccaaaggaaatgcagaagcttggctgtaactctcaggcagcaggaggtgacaccagacatcggtgcagatgacatgggacacatgagacttagggaagaaaatgcttctaaaattcttaatttctcctctccaagtactaaccaggctcagccttgcttagcttccaagatcagacaagatcaaaattctttatttctaatcatttaaaaaaaaaaacaaaccacagaagcatgttagaagatagaaatggaaaagcaaagaatatgaaacctagactgggtgcagtggctcacacctgtaatcccagcactttgggaggctgaggcaggaggatcacttgaggccaggagttcgagaccagcctaggcaacatagccagactcccatctccacaaaaaaattgaaagaaaattagccaggcatggtggtgcacacctgtagtcccagccactcaggaagctgaggtgggaggatcacttgaacccaggagtttgtggctgcagtgagcctcgatcataccactgcactccagagggagaccctgtctcaaaaaaaaaaatcttttttttttttttgagacggggtctcgctctgtcacccaggctggagtgcagtggcgcgatctcggctcactgcaagctctgcctctcgggttcacgccattctcttgcctcagccccccgagtagctgggactacaggcgcccgccaccacgcctggctaattttttgtatttttactagagatggggtttcaccgtgttagccaggatggtctcgatctcctgacctcgtgatccgcccaccttggcctcccaaagtgctgggattacaggcgtgagccaccgtgcccggccaaaaaagatcattcttattgtgaatgatgttttggtgatagctggagaaggtagggaaaatatatccatcctaggcacattgaagtccatgaagaagaaatccaaagcattggaacagaatatattttaaaaactaattcaagaaagcttttgtgaagtaaaacaagacacaagagcgtctgccgtttgcaggtacgcaccctataccggaggaagtggacaggaaacagtgacgatcatctgcacgtgccatgagtggcttgtaagggaaagttcgttagattcttcagggcagcgttccgtgccagggtcttagaggcagcaacacgagaggcccaaggaacgtggaagccaaaatattatcctagctttggagtccctcatgtaaaatctgtcaggttttgaagactcaggtgtagggagtctgagtgctgtgccccatgaagactccaccatggtcggctttgtgaccagctcccttcgctgcagactcttaattttgcagggcgttttcatgtgacacattgatggtttctaatacacaggtgtgccgtctacatccagtgactccgtgaggtctttcagaaacgcttcgcaggactctgttaatcatggtgccataactggttagggtcaaaggagcaagtgacaaaatgaacaaataaagagataaagagaggtgcacaggtgtgacgtccatagtcagtacatacaggctgaactagggcttaggacaagtgctgtgggctgtgtgtgacaaccagtttgtggttttgtaatgtggcatctgtaagcagcctgtgtctcaagaggacattttttagcagattggcatctgcaggttttccagtctaattccatgcttaccagtccacccatacggttccaccacaccgtgtgtcccacaccagacacttaagagagaaggttcactgagcaggcggcatgcaggaaggcatcgtggccccagccctgcccacaggctgtctgccctttgggtgactggcatctgcagggtatggtacaaaggtccttccacgtctgggattcacctgcccagggctctgatgaaatacagatcatgattaacgtaatcttgtagaaagttgaagcagttacagaaatgggtgaataagaaagtgaaagtgactaagctccatggcccagaaggaacagcgctgtgaatgctttgggtccattcttgcaggtgcttctgcaggtgcacatgcccacacatggcgaatgacattctatttattgggcattaagtttgatatttttatgttttatattgtcattaaaaagttcacttgtcaatgaatattgatatttgtattagtctgttttcactctgctataaagaactacctgagactgggtaatttatgaagagaaaatgtttaattgactcacagttccgcatggctggggaggactcaggaaacttacaatcatggcagaaggcaaaggggaagtaaagaccttcacatggtggcaggagagagagcgagtgaagggggatctgcctcactctttcaaaccattacatgtcatgagaattcactatcacaagaaaccgcctgcatgatccagtcacctcccactgggtcccttccttgtcctgtggggatcacagttcaagatgagattgggtggggacacagaatcaaaccatatcagtattattttacaattctgaattatttcaagcttacagaaaagtagtagagagttcattattgcaaacgtctacataccccaccttccttaaataagaaaaagaaaagcactgtgctgtctcgggctcagcaaaaccattttctttctttttaaaaaaatagaccatctcaggctgggtgtcatggctcacacctgtaatcccagcactttgggaggccaagagaggtgggtcacctgaggtcaggaattccacaccagcctagccagcatagtgaaaccccatccctactaaaaatacaaaactccaaaaaaaaaaaaaaaaggtagccaaaagccctcatgcatgcatgtaagttgcagtgtgctcagagatgtagtctctaccctatgctgcagtatttgctgaaattggtcttatgacttagggcgtaataggtttgtcttttttttttttttttttttgagacagagtctagctctgtcacccaggctggagtgcaatggcacgatctcggctcattgcaacctctgcctcctgggttcaagcgattctcatgcgtcagcctcccgagtagctgggactacaggtgtgtgccatcacacctggctgatttttgtattttcagtatagacaaggtttcaccatgttggccaggctggtctccaactcctgacctcacatgatccacctgcctcagcctcccaaagttctgggattagaggcgtgagccactgcgcccagcctaatttttttttaaaaaaagctctgtccttacatgccttcagaattttctcagctctgcagacatagtgtccagttggaacctggggcagatcacaccaggcctctctaaacacacttgagtaaccacaaagctacagcctgagggtgagtcccaagtccaaggaggggccttctgccctccctctctgctgggacccttctccccacccctcatctggtctttggagtgtgccagccattgctgtctgcctcagggcctttgctgcatctcttctcctgcctggagcactcctgagagcacctccagcacctgccaggctggccctcacctgcaagccttgaatcgaccctcaccttccctgtggcctgttgccagccactctgtgatagtgacctcctccaccccatcccagctccggggccccctcactctgccctgcccctcgctactcctccccctccatgagctgtgtgctctccttgttcatgacactggagttcatggttctagatgtggggagggtgtctgtccaagtgcctgggcagggcatggcccataatacggactcagtgcatttgtgaagatgtgacgaatgaatgaatctgtgcttgaaaatgaatatctttgtccctcattgctctagggttctatctaggtccattttacatggtttactctgtattctctgcttgcatgatccatcagcaggtgcactggtttattggtgtcttccactgtaactgtatgtgtgtgtattcacatagacaggtattgatatacatatgtagttgatgatcagaagttgtgatatgaattagtaaaccatgtaacgctggatatgtcttactgattaacattctgtaaggataatatttttccgttcttgaatttatgttctccaggtaagtattcactagcatctctgaagtccgtatttcattttgtagtaaatgcactactttggtctgtgttttcttctaggaggcttatttgaatacgtaactgcagccaactattttggagaaatcatggagtggtgtggctatgccctggccagctggtctgtccaaggcgcggcttttgctttcttcacgttttgttttttatctggtagagcaaaagagcatcatgagtaagttttaaaacacttttaccatttgtaatttgttctttgactatattattaccatttttcaggctagatttttgaagtgttaatttaaatcgctgaattccagtttattctgtgctttggccaaacaagtacaaaaccaaatagctgtagaatcacccagctctagggaataatcaggtccacatcagcacagttgttctctataccacgtccttagcctctctgaattgacagtgctgaattcagtggtcaagttagacaccaagcaggggattcagggctctgaatgggaaatactgattaaaacagatccctgactgagcaatagccaatggccagcttgcgaatgctgcaggttgaggaagtcctgaagaggtaggtgaatctcagagcccagcgacactggcagaactcatacacacaagagctctccagctatgtggtggcttaggccatggctctgaacctggggtccttaatgggctacagaagctctgcatgccccctaaaatgacatcattttccagagaccgggtccttggcttttatctgatcccccaaaaggcttgcgagccatttgaccaacacactcataaagaaatcaaagggactgggcgcggtggctcatgcctgtaatcccagcactttgggaggccaaggccggtggatcacttgaggtcaggagttcaagactcacctggccaacatggtgaaatcccgtctctactaaaaatacaaaaattagtcaggcgtggtggcgggcgcctgtaatcccagctactcgggaggctgaggtacgagaatcccttgaacctgggaggtggaggctgcagtgagccgatatcgcaccactgcactccagcctggttgagagagtgagactcagtctcaaaaaaaaaagaaaaaaggaaaagaaattgaaggatgtcaaggctgaagtgaatttagagaacatctttctaatccaatggatgaggaaactgaggttcagggagcagagtctgaggccagccaggagccccatctcattgacgggaagagatctcaggagcaacgtgggatctttacctgccctgacattggcgcgtgtccctgacaataaatgatggagactgggcttagcaagcggccagcctggtatgcacatttactatgtcccctgagccacccacttcatccactcaaaacatctaatcgaaatctccaatgctgctgatgctacgaggtgcaaaaatgtataactctgtcctacttcatggagtttatcatcttttttgggactaaggacagagagaaaaagctaaaagaagaatagattgatatggtatagtgggaagagtacctaggtgtacttcccagcctcaccacgagtttgcagatgcaaaggatgattattggagataagaagaagaaaggtcatatctgaagtatctctttgtctaattttttttttaagacagcgtctcactctgtcacccaggctggagtgcagtggcacaatctcagctcactgccacctctgcctcccaggctcaggtgatcttcccacctcagccttccgagtagctgggattacaggcatgcaccaccaggcctggctaattttttatattttttgtagagttgtggtctcactatattgcccaagctggtcttaaactcctggactcaagtaatcctcacacctcagcctcctgaagtgctaggattcgaggcgtgagccaacgtggctggcctctttgtctaatacttgaagaagtgatagcataaatgtgagctctaagagcagcgccccgcattcttcgagacactccatcgtgccagtggcctggtattttcacgcatagacagtgaggagagagcgagatcagagagccacgacctacctaaatcccagagctgctgagaaaaacagaggggtctgcggaaagttgagtgagtgccgaaggcagagagggtttgagaaggaggctcaatgccaggcatggcagaaaacactgtgggccaggaatgggccttctgtgctgagaactgtgtctgccagaaggtcatatgagagtcctaagccctggcacctgtgaaagcgaccttactggagaacgttatcagttgagatgagaaggggaaacgtggatagacgtacaccaggtgatcacacagagtgggaaggccatgcgaagatggacacagaggcgggggcgatgcagccatgaacccaggaacacgtggtgccaccagagctgggggaaatgggactggaaccttccctgaaccttcagagggagcgtagccctgctgccaccttgatttccaactcctggcatccagaactgggagagaatcagtggccgttattataagccacccagtgtgtggttaactttgttctagcagccacagggaactgatacgccagccttccagccatttaaaattgactgggaaagtaagggcaggagtatgattggtgaacccctctgttttctcctccgccagatgactttgttgtcaccggtttggttgaaatacaacgttatctctctaaatatacattctacaatctgacttcctcccctctgcgcccgctgctcccagcactgcacctggcctgggcctcacttcccggtgaagatgccatccttttatattcctaatatttgatgtgaagaagtgagtaatggctcatttctcattaaaagaaacaaatgagataacactgacgtttaaaaaaacacggatcagagtaagattgaacatgggcacaccaagtcagtggcaaagatgttttctcaaatgaaatcaggaaacaggaaagcccctctcagtatttgaatatgaaacatatagaaatggaaaataaataattcagttatctaaatgaaagtctttgctaatgaaaacccaaagatagtctttgcagaagagttcatgagttgaaagagctctttgtcattcatttgctgtttaaattggtgtcagtgtgaaaccagttttaagccctgaagaattaatcaattcagttttgcagaagtatgttcagaaatgtaggacttacaagctgagaataaaataaaaactcctttttaaaaaatattttcataaacccaactaattaagccatcaaataaaagtattccaaaagaaaacatgccaaggatctattccttgcactccatttataatgttctttttttttttgagacagtctcgctctgtcacccaggctggagtgcagtggcgcgatctcggctcactgcaagctctgcctcccaggttcacgccattctcctgcctcagcctcctgagtagctgggactacaggtgcccgccaccatgcccggctaatttttttgtatttttagtagagacggggtttcaccgtgtcagccaggatggtcttgatctcctgacctcgtgatttgcccgcctcagcctcccaaagcactggaattacaggcgtcagccaccgcgcctgactggattataacgttctaaaaacaaaattgtattcaatgaaatctttctataataatcagtatttaaattcataaatgattgcattgatagttaatgcattgatttctaggtcagaaacagtcaactgtgctgggttgctaacaaatattctcttaaagggcaaaatttaaaggtattctaaggagtaagaaaaatttaatcatttaaaaataaatattttatttctatataatggtttctgtgaaatacacttaacctcttcagccaacatcccttcattgtgtgagaacaccctgacctcacacatgttctttctgatgtcacggagcccagccttgctgcccagcctggtgggggggcgcgttttctcggcatcctgcggcagtcctgtgtttcccatctcccacctgccctctcgtgtttgcccatttcaggctctcctgctgtcatgtactctgcccttgccttttcgggccagggtgcccatcttcccacgggcagtttctgggagagaggcgctcacctgctatgtcactgtgcggcggccagtgccgctggcccatggggaagctcttcagcacttgcaagtgctggatggcctggatcccagcaggcctgtgaacaccttcagcctctaaccagcgaacatgtttgcaatgcactttcgcaggtttgacaccagctgttaggcttggccacgttgtgtgttgggcactcgtgggtccatgcgccaccactgagccacgtagctggaaaggctgcagtctcgaggcctcatgccaggggaagtgacgcttgatccggaagtcctgaccgacttcttagaattgttcttattacatgcctttttggggacacagaacatacaaaagtaaacgtggccgcccagtatgttcgaattctctatttgtggattccggtgttaaacttaactaagaccagcagggttttgccaactccctctcagtttctcgtcctcatatgtttctaccacattaacaatgagctaattgctttctatcatgatttttagtctgttgtttaatctttctgtgtgtgtttatagaaactccctttctccatcttgtcaaattatttctaatttttactccatgcacttagttgccacctttcccaactggctattatccccaaaacaaatgagcacgcctgcattgatacaatttatatcaaaacggaaaataatgtttgtttcgagcacaaggctgaatggtggacaatgccatattgcatttccccagatttcaccgaatccttactaagagcgttcatgagcctcctggtatgcagctgggtgcccactctacacaccctgggctaggccagtagttcccaactgcaggctggagaaaactgctggagtcaccagcaggtattcaggaagcacctacttggtcctgcccctcctccagcctgcatgctttccccgggggctgaaaagacagctccgcaatgtgctgatcagtattttcatcaaatgtcagtaattttccttccagatagaaaggtgaattctatgggctacttcttctgaatcacactttatgattagatatatttaattcttcatgataataggcaaaattaaactataagtatgaaatgccaaagtttttgttactacatttaaaaaactgagtactcttttgtaatgaaaaatattgtcacttttgttagcattggttaaatgtctaagcgacagaattatttccttttttaatttttttttcttaggtggtacctccggaaatttgaagagtatccaaagttcagaaaaattataattccatttttgttttaagtgcgtttttcatgaaattatcttcaacttgaagctttccaatggcgcttctctatggactttgtaaataagttatatctttgtaattttcctgctactttatcattttcaagatgtcctctaggaattttttttctagtaattttgcaatctacctaataagtacctaaatacgctgaaatggaggttgaatatcctactgtgtaacaggtcagaatttcaagctctgggtaataactgctgatattttttctaatttcaaatttacctcttttggctatgtcttgccaagtgtgtatgagactagactttacaactgtctttgatggcattttcagaacaataaatgtcacaatcccttctatagccccctacagtgatctcttcaaggtcaactgcagtgttgcttccctccccctatagggctggaatctgtctaggagccctctctcggaggccacagaggctgggggtagccattgtgcagtcatggcccgggggaaacttgccaaccttcgtgtcaggtgctgtgtgtaagtggagaacttggggatagaggaggaagctcctcgtggcccttccaaggtgaggcaaaggcatctggacttgttccagcccagcccaccgggtgacatcaccgggcagggaggggtgctggtggtggttcatacggagtaagctgctctgcctgtgtgagtggctcctgggccctaaacaggcacctttaggccatgggtcactcaccgtgagccatcaatgtgctctggtctgacatggtttctctctgtcttctagtctagacctagtttttttgttctgttccccacgtatggatatagtagagattgttgtctgtgaaatttctcttttgtagattttgagttttcccttgtagtgtaaagaatgatcactttctgtaacaataacaagaccactttttaagatttatcctgtttgttctttgttgattgaaacataataattgttaaaattctctacagccttctttttcttccatagctaatcttccttctaatagtttttgctttctgttttgctgttgttgctttgcaaagctttcccctcatagcctgtacctgttatcaatataaaataatcttcctgttgaatgcttcatgacttgaattctactttgataaaaacattgccatactgctttttatcttgatgaattcatctggcattgctttgccttatcatctcatctggagtttttaaatgccatttgtttcagttgtctttaacaacataataaatagactttgccatttaacaaggtagctcaaattcttttactaattgttacatcgaaacattctttcatcatatttcctgtttttatttggttttttcaacttcttctgtttactatctacagtgatttggaaaggagatttcctttaaaacaaacaagcttattgggaatggcttttatgatttttaaagtagccttgagagcttccagttaaatctgatgagctgaacatacacctttccttctcccctctctattctgaccccagttgaaatcacctcaaaggaatttaggtgggggagtggccccataaagagagtgagagagagtcaccactgcagatg

SEQ ID NO: 25023 - DNA, 1434 bp, Homo Sapiens
ggcacgaggggccgggcggcccaggggctgccgcgggactcggggcgcagccgagtggctgcaggggtggagtgggccggacgagccgcggggcccgggtgccgcgggttcgaggccgggccccgcgcgaggaggccgcgccaccccgggggagctgcccggcagcgagtttgccccgctgccgaaagaaggcgggagccggcaggggccttcgaaaccccctggcaacccaggcccggagtccttggggagcggctgtttcctgggacgccctcccggacacccccgctgcagggttacggttctgggcccccggcagaaggctcctccgggtgacccccggcggggccctgcgagccgcgggagccgaccccggggcctcgagccgggaggaagggggcttccggaggcggagggccgggggccgagggagccgggcctctcggacgcggggcagggcagcgcccgggctggagacggactctgggaccctcggctgcgggggtctcagcgacctgccccgcggcaagcgcggccgcggagtggcctaccggggaccctcccccagagggaccggcccggggcggggagatgaacggcttcagcacggaggaggacagccgcgaagggccccccgccgccccagctgccgccgccccgggctacggccagagctgctgcctcatcgaggacggcgagcgctgcgtccggcccgcgggcaacgcctccttcagcaagagggtccagaagagcatctcgcagaagaaactcaagctggacatcgacaagagcgtaaggcacctatatatctgtgattttcacaaaaatttcatccagagtgtccgaaataaaaggaagaggaagacaagtgacgatggcggagattctcccgagcacgacactgacattcctgaggttgatctgttccagctgcaggtgaacaccctacgacgttataaacgacactacaagttgcagaccagaccaggcttcaataaggcccagttagcagaaactgtgagtcgacacttcaggaacatacctgtgaatgaaaaagagacccttgcctacttcatctacatggtgaagagtaacaagagtagactggaccagaaatcggagggtggcaagcagcttgagtgaggatgaagcacatcttaaaggaatgaagtgtaatgcttgatgcacaggtgatatctactacatttaagcccataaagactgttaaatattattgtaaataaaaaagtttgaatgatgaatactgtaaatctttttggtcaggaggattatattctcatgattcagcatgtgtatagaaagactttcttttcgataactctggactaaaaaaatcaggatcattaaaagaattaaaactatgtatttcagcattcaacaaagcattaatcaattctctggaaaaaaaaaaaa

SEQ ID NO: 25024 - DNA, 30328 bp, Homo Sapiens
tttgggatgattgtggtcatagctgtttcctgtattaaaatatgactcggctgggcgcagtggctcatgcctgtaatcccagcactttgggaggccaaggcaggtggatcatgaggtcaggagattgagaccatcctggctaatacagtgaaatcccgtctctactaaaaatacaaaaaaaattagccaggcgtggtggcagatgcctgtagtcccagctactcgggaggctgaggcaggagaatggcgtgaacccgggaggcggagcttgcagtgagctgagatcgcaccactgtactccagcttgggcgacagagcaagacactgtctcaaaaaaaaaaaaaaaaaaaaaaccccaaaaaaacaactcatatggtttagtaacagactgggcacgaaagggctatttaaaaaacagttgctcctctggcggaaaggaatgcctggagactacttattttatttcttactgggaggaccaggatcatcatcctattttgcatagaaggttcagtttgttctttcccttaaaataggaagataagggcattatccccctaagtctcgtatgatattccccattctgagtccagaatacctagaaatttggaatttggctattgccgtgtctggactgtgagtatgggaaggggaaacttttctgtctgttgtccccactaccgcccctcacatccgtgattctgaaccccatgataaatgccctttgaacctttttcctccttttgatgccgaatccccttttatgggactccgccagcacgggtgcatttaaccttcctgagcttgcccacctgacgcatgcagccaagaagctttgaaagatggagtgccctggctgagggttccaggtctcagcaaggccacgaggtggtgactgcctcccagaactctgttgggccaccctccgtcctggagacccccaaaacctccatagcaccaactctgcccattcacacacacagtcagccctccctcccgagtccaccgcgggcagagggccagccaccatgcctcccatagccgccatccctgggaaggagccctgaccccgtccttacacccctctacactcactgcctgtggggagagctgctcgctgtcacaagcatccagggggctgggtcgaggggccccctgcatggtgggggaccatgttgtcgtgcatggaatgaaactggccacacataacagatatggtggcgctctggtcggatctaggggagtctgtcctacaggatgaggcttgaactgtcctgagtgaccagacacccagcctctgcttcgagtgctcagttatgattattgtcctgatttagttaactgttcttcaggggctccaggaggacgagtgtgtatcctcccattgctctgtgcagcctctaacctctagagtctaggggtctggggagaagttgggaagtctggccagtggggccggtgcctggtgacctcgggaggtgggatatcatcatcttcagaactgtagttgttactgggataccagctctgggagaccacaggtgcagtcagcacagcaggaccttagacaaggcacccagccccagtttccccacctgggaagggggctacttgtggctagaagcagcccggactcctgagcaagactagaccaagaggccggtatgtggacacccccgcgtgggcacccccacggggacaccctggccaccgccgcgcggacaccctcacgaggacaccccggccgcgcggacacctaccgcggggacgccccgaccccatcctacctgctgcgccccgcgccgcgccccgcaccccgcccgccacggcctgcgtccgccaccggaagcgccctcctaatccccgcagcgccaccgccattgccgccatcgtcgtggggcttctggggcagctagggctgcccgccgcgctgcctgcgccggaccggggcgggtccagtcccgggcgggccgtcgcgggagaggtgagagcgctggctagaccggggccgaatgcggccggattcggggcgggggccttcagacctagggtggaacactgggatagggtgtggggaattcggaccgctgtgaagtgatctgacgttgggtgggagtctccggacttggggtggggaatctggatgggaactggggaattcggaccttgggtggggatctttggaccggggtggggtccccagactccttgtggaaagctgaggttgaagatctgtgctgtgatgaggggctccagatagcggtgagagatcccgcttcaagactgggttgggggtccagaccaggaggataagcctctccctggagtagggcttgacctggtgagggtgtggtagagtcacaggggagggtcccacttggtccttgggctgggatcagactctcagagctggagagttgcaggaggcctgggggagggtctgtggagccccagactcagagggccttggtgacttctccaacaggctccctgttggaggccttggggtaccccagggcctttccctgcaagagagaggctgctccaccaggaaggggcccaggactccccagggtcggggggatgtgtggtgtgcaggaccacgtgggaatgttagagaaaggggaagtcactccgggcctgccctgctaacagacctgctttttggatttttccagccagggatttttgtgtcctgttgctttttattgtttaaagtgaccctccaagcctgagggaccgtaggagctgccctgcagagcccagtgagacactagttaatgcagaaaaaacagattttacttggtaactactgacaacatgagaaaaagctggctccatgctgatttgtctagatgtgcctggagtttaaagggagagtgagggagtgggaaggggtggggactcagtagagttagggaaacagaaaatcaccaaaactgggaagggagggttggcccctgtgaaaccaactgatctgggtttgccactggggcttaccgaagtcaggcccccaacctcccacagagactgggagacaggggccccatcctcaggtgttggctggaacacacaggaaattcttgtggcagccttgaacttctcaggcaggcactttagagggggctaggatcgttctgggaatgtggccttgagctgttaggagctatgttagtgttcgttccagcctagataggccagggtgaggcccagtggagaaggggactctaaggagcctggctggagtgtggggagggagggtctttgtcagcactccccctgtgcaagaagagcagagacctgcttctttcctctcaacagtccccgtccattttctgttctgtgttgtgttcataaactaccagcgggaccatctgttgagacttggtagcaaaggatttttgctggatgatgcaagcagtcaagcatttaatgaggaaacaaaaataacaggccaggcacagtggctcatgtctgtaatcccagcacttttggaggccgaggaggatcacttgaggccaggagtttgaaacaagcctgggcaacataaagaccccatctctacaaaaaatttaaaaattagcccggcgtggtggcatgggcctatagttccagctacttgggaggctgaggtgaaaagatcgtttgagcctgggaggcggaggctgccatgagccatgatcttgcctctatactccagcctgagcaacagagagcccctatctttaaaaaaaaaaaataataataaaataaaaaaataaaaagaaagaaagaaataaaaacaaagatgaatggagctgttgataaacccagtttttgagcctacagggcagcagttgaggtttctggccgttgggccctaacaaggccagcaggggcactcagggacttcctggtgtgtggtgtgaagtctgtgatgatggcataggcattggtatcccagttgtggttactttctggagagagcatgtggcatgcaggagctggagggggggtcttcctgggcggcctgtgtagcagcagctccaggcacaaaggctgcccctggagaatctgttgtggttctgagttctttcaagtttatatcaagttttccggcttcagtctgcagggctgtttttttcagatcctgggggcaaagggcagctacaagaccacctgagtcccaatagggatttgagttcttggtgacaccaagtcagggaggagacaaattagaaatgtcagtctgaagagagtggtaggtagccagatactgaaggaaagtagatgggaggatttggtaagggctgacgtgtaggaaggcagtgacagtccaagtgacaggcagatcataaaacctcaaggataggccgggcccggtggctcatgcctgtaatcccaagcacttcgggaggccgaggtgggcaaatcacccgagtccagaagttcgagaccagcctggctaacatggcaaaaccctgtctctactaaaaatacaaaacattagccgggcgtggtggtgcactcaggaggctgaggcgggataatcgcttgaactgggaggtggggggctgcagtaagccgagatcgcaccactgcactccagcctgggcaacaagagcgaaactccatctcaaaaaagaattaggccgggagcggtggctcacgcctgtaatcccagcactttgggaggccgaggcgggtggatcacgaggtcaggagatcgagaccatcctggctaacacggtgaaaccccatctctactaaaaatacaaaattagccaggcgtggtggcgggcacctgtagtcccagctacttgggaggctgaggcaggagaatggtgtgaacccgggaggtggagcttgcaatgagccgagatcacaccactgcactccagcctgggcgacacagcaagactgcgtctcaaaaacaaaacaaaacaaaacaaaacacctacaaaagacagtgaactagactaggatctgataactcccaagggggtgttatatttctccactgaagcatagcatttctctttacaaacccttcccttttgattgaagataatcaaagtgagattattcttatttaccaaataattctggtctcattaaatttggcctgattatttacataaatgcagcacgaacagtaattgaccacacaggcctttttaagtttgctgaaacttttaatagggaatcttagattgagctttttaaagccttt[450 bp omitted]aaagataattgcttcaattttgtttagagaagtatcatttactataatattacgagtcattgataggttaagagaaaagggaaaggtttctttctttttttcttttttgaggcagagtctcactctgttccccaggctggagtgcagtggcgtgatctcagctcactgcaagctccgcctcctgggtttacaccattctcctgcctcagcctcccgagtagctgggactacaggtgcctgccaccacgcccggctaattttttgtgtttttagtagagatggggtttcactgtgttagcaaggatggtctcgctctccagacctcgtgatccacccgcctcggcctcccaaagtactgggattacaggcgtgagccaccgtgcccagccggggaaaggtttctttttttaatattcagaaaataaaacataaagagccaacaatattctgaacaaaagtcataaaaagactgtaatcatccttcagcagtttactcagttgcatgcaggtactgaattcttgttctgcttgatcttgggctagcaggtacatgaacccatcttttctcaaccagtggagatcctggctcagtgcagtcatgtgatctcaaagttaagaaatgctgtcacgcccaggtgcagtggctcaggcctgtaatcccaacactttgggaggccaaggtggctatatcacttgaagtcaggagttcgagaccagcttggccaacatggtgaaaccctgtctctaccaaaaaatacaaaaattagccagttgtggtagcagacgcctgtaatcccaactactcgggaggctgaagtgggagaatcgcttgaacccgggacatggaggttgcagtgagccaagatcacgccactgcactccagcctgggcaacacagtgagactccatctcaaaaaaagaaataaggaaatgctgtcagaagcctaccccacggtacctgtcatgggccttttcattggtccctttttgttgaagatgaagcactttgccctgtagctgattgcaagagatttcaggaaagcatcagagtaaaactctaatgacaaaagacttaaaatagtgtagttaaatatctaatgagagatcattacaaaatcaaacgatttacaaggaatgttggttgtttatgacacatagcattttaaataataaccagaatgatgattgctgttatatgaggacatgtcattggcagaagggtattcaccagtttgtgggaactttatacaatatctggaatccttatattaacatttaccaatatgcatgtaactcaaggaagtttaaatagcattaaaaaaaatttttttttaggtttttttttttttttttttttgagacagagtcccgctgtgttgctcaggctggagtgcagtggcacgatctcggctcactgcaacctccgcctcctgggctcaagcgattctcctgcctcagccccccaagtagctgggattacaggtgtgcaccatcacacccagctaatttttgtatttttagtagagatggggtttcaccacactggccaggctggtcttgaactcctgaccccaggtgacctgcccaccttggccttccaaagtgttgggattacaggcgtgagtcaccgcgtccggccctaaataacattttttatttgacagcaccttgcatgaaattctgtagggtccagccctacagggtctgtgggtttttctccccgtgtgcagagatgagagatcgtagaaatgaagacacaagacaaagagatagaagaaaagacagctgggcccggggaccactaccaccaagatgcggagaccagtagtggccccgaatgccaggctgcgctgttatttattggatacaagacaagggggcagggtaaggagtgtgagccatctccagtgacaggtaaggtcacatgggtcacgtgtccactggacgggggcccttccctgtttggcagccgaggcggacagcgagaggagacagcttatgtcattatttctgtatttcagagacctttagtactttcactaattttgttactgctagttagaaggcatagccaggtacagggtggaacatgaaagcggaccaggagcgtgactgcttaagcacagcatcacagggagacggttaggcctccggataactgtgggcagacctgacactccacaagaggtggttgagcagagtcttctctaactcccacagggaaagggagacttcctttcccggtctgctaagtaacgggtgctttttctaggcactgacgcaactgctagaccaaggtccgctaagtaacaggcgtcttcccaggcgctgacgttaccactagaccaaggagccctctagtggccctgtccgggcataacagaaggctcacacgcttgtcttctggtcacttctcaccgtgtcccttcagcttcttatcactgtatggcctggtttctcctaggttataattgtagagcgaagattattataatattggaataaagagtaattgctacaaactaatgattaacaatattcatatataatcatatctatgatctatatctaatgtaactattcttattttatatattttctttattatactggaacagctcgtgccctcggtctcttgcctcggcacctgggcgacttgctgcccacaaaattcaccattgaaataaacctaattagtttaacatctctcttataaggtcacaggacagatcctttgaggtcttccaggggccctccaggaaatctcaagtcagtctgagatcaagacaatgtcacaggccacatgcagtggttcacgcctataatcccaacactttgggagtccgaggagggaggattccttgagcccaggagtttgagaccagcctgagaaacatgctgaggccctgtctctacaaaacaaaaaattgaaaaattagctgggcatggtggtacatgtctgtagtcccatgtactctgaagactgaggcgggaggatcacttgagcccaggagttcaaggttgcagtgagctgtaattgcaccactgcactccagcctcagtaacagagtgagactctgtcactaaaaaaaatttaggctgggtgcagcggctcacgcctataatcccagcattttgggaggtcaaggtggacagatcacctgagatcaggagttcaagaccaggctggccaacatggcaaaaccccatctgtactaaaaatacaaaaattagctgggcgtggtgccatgtgcctgtggtcccagctacttgggaggctgagacagcagaattgcttaagcctgggaggcagaggttacagtgagcccagatcacaccatggcactccagcctgggtaacagagcgagactctgtctcaaaaaaaaaaaaaaaaaaaaaaaaatttaaagaaactttatacataaatccattcaatgattatgaggtcaattctagccagctttgacctcataacataaaatttcttttctgcagactttcttgaggccaggagttcaagaccagcctgggaaacatagggataactttctgtatccattcacagttgcttttgttttgagacagaatctcagtctgtcacccaggatggagtgcagtggtgagatctcagcttactgcagccttgacctcctgggctcaagcgatcctcctgcctcaccctcccaagtagctgggactacaggcatgtaccaccatgccaggctaataatttttgagtttttttatagaaacagggtttcatcatgtttcccaggcttgtctcgaattcctgggccattcaggctttgtcccatatttttcctctttttgtaattttacttcaggacaaaattacatccctttctttaacaaaaacactctacattctttgcatacttttcatataaaaacacatcctatcttcctcccatactttgtataggaaattgtttccctcattcttattgtttctaggagttttgttttcatatattgattataatttttaaccattagtaaccggtattttttttttaaagagacagcgtcttgctcttttgcccaggctggagtgcagtggcacaatcaggactcactgcacccttgaactcccgggctcaagtaattctccaacctcagccccctaaagcactgagattacaggcatgagtcaccacgcccggccataacttgtattttacaagtaaaactgggaagaagacaattggaaattgtctgtcatttaccagtttgttggcaaattttatgaatataccatcttataatctctagaggtatatcctttttatagtacaatgtttttaagtgccaagtacatgtttattaacagaccagaatacctttagccagtctgtaccatataaaaataagaagccaaaaagtacaaaaagttacgcttaataatgaatgtttcagcactttcttctcttcaggtattatttagatattcaatgaatgtctattatttaacttcacttagtatgactctgaggttgaaagttactgaaaacatcttgtaagcttttttaggccaatatattatcaaacgcaattaacaaaacacaactcactagtttatataagagctagttctcacttttttttttactctattttatatattttttcttttcttttcttttcttttttttttttttttttttttctgtagagacaaggtcttgctgtgttgcccaggctggtcttgaactcctagcctcaagtgatccacttaccttggcctcccaaagtgctgggattacaggtgtgagccaccacccagccctattttatatttttatctgaactgtgtttctggcaaattggacaagttaagggtcacttgctccatgtgaggggaaggctttctacctgtatttgtggataagacctttacgacttgttttgccctgatggatgactacatgtttccagtgagctcagctggttgcttttgtgggtccctgaggcactgcgagcccctgatggggcaggaagcctaaagttccagggaccgtggggagttgaggggctggagggggaagagagaggcctgcagcggggatccacaggtggaggaggccagacttgaagggggtgtctccttcaagagaaagtagggaagtatggaggtgataggaagggagaggcctgagaggagctagtttggggagatctcaagtatcccaaaggagccactgatgttccaaattatccttggtaaagtcacatcaacaaggaaggaagcagacagaggcgcacttgttccttgcagttttgttttgatgtgctgattaaagtagcgcagagggcatgatcagcagggctccagtaagacgctcccacgggaggagcaagaacacagaacagagggggcaagacagctccaccaggagtcaggagtgaatcccctctgggaacgaggcactaggaagaagaacttccagcccaggaggtaggtagcgttcagaagaagcctggggcgggcgcggtggcgcacgcctgtaatcccagcactttgggaggccgaggcgggcgaatcacgaggtcaggagatcaagaccatcctggctaacacggtgaaaccccttctctactaaaaatacaaaaaattagccgggcgttgtggtgggcacctatagtcccagctacttgggaggctgaggcaggagaatggcatgaacccgggggacggagcttgcaatgagccgagattgtgccactgcactccagcctgggcgacagagcaagactctgtctcaaaaaaaaaaaaaaaaaaaagcctgggactcttagcgcctcagagccttactcagaatcataaaatcattagaagcaatgtctgtcctcactgctgcatccgatattcttccggaccactggatcacaaatcaaaccatgtgactcccgcatgagcaggcagagtggagataacacggatcgctgtgtacactgtgtgctccggttgttgcatccgagggttgatcggatggtggttcccatccagatccaagtcctggcccctgatcacagagaaacacagctggacattaaagtggtgaggacggaaattataatatttggtgaccagtgacaggaggggagagagccgagctccgctccgagttgtgcaaagaagtggggagtggggaggaagaacagtggggactcagtggagtgaggaaagtggaaaattaccaaaagcaggaagggagggttagccttgggaaaccgatctgggtttgccacgggggcttactgaagtcaggcccccagtcccacagaggctgggagacaggggccccatcttcaagtgttggccagaacacaggaaattctcttggtagccatgactttctcaggcaggcgctttgaagggggctgggatcattttaggaatgtggccttgagctgttagaagccatgtgcagtatggcttacacctgtaatcccagcactttgggaggctgaggctggagaatcacttgaggccaggagtttaagaccagcctgggcaacgtagcaagacgctgtctctacaaaaataatttttaaaaaattagccaggcactgcggcatgcccctgtgtagtcccagttactcaggaggctgaagcaggaggactgctggagcccaagagttcaaggttgcagcaagctgattgcaccactgcactccagcctgggcggcagaggtgatcacgccactgcactcccgcctgggcgacagagcaagaccctgtctttaaaaacaaaaaggccaggcaggtgcggtggctcatgcctgtaatcccagcactttgggaggccaaggcgggcggatcatgaggtcaggagatcgagaccatcctggctaacatggtgaaaccccgtctctaccaaaaacacaaaaaagttagccgggcgtgctggcgggcgcctgtagtcccagctactgggaggctgaggcaggagaatgccatgaacccgggggatggagcttgcagtgagccgagattgcgccactgcactctagcctgggagacagagcaagactccgtctcaaaacaaaacaaaacaacaacaaaaaaaaaacagccgagcgcagtggctcacgcctgtaatcccagcactttgggaggccgaggtgggcagatcacaaggtcaggagttcaagaccagcctgaccaacatggtgaaaccttgtctctactaaaaatacaaaaattagctaggcgtggtggtgtgagcctataatcccagctactcaggaggctgaggcaggagaatcgcttgaacccaggaggcggaggttgcagtgagccgagatcgcgccactgcactccagtctgtgtgacagagtgacagcccgtctcaaaaaataaataaataaataaataaataaataaataataaaatgaagcagcagcagctttgttagtgtttgttcaaggcctgataggccaaggtgaggctcagccgagaaacgtgctcagaggagcctggccggagtgtgatgggggagtctttgtccaggctgctgccacggtgggcctcaggactcatggcctgggcgctgggggtggggctgccactcagccttgaggagagcaatgaggaggtcagattccactcacatccagtgcggtctggatgcaggcctggcccagagcctggtccagatgctggggctttgtttttttgttgttgtttttttgagacagagtctcgctctgttgcccaggctggagtgcagtggcactatctccactcactgcaacaacctccacctccacggttcaagcgattctcctgcctcagcctcccgagtagctgggactacaggcacccgccaccatgcccggctcattttttgcatttttagtggagacagagtttcaccatgttggccaggatggtctccaactccagaccttgtgatctgcctgcctcagcctcccaaagtgctgggattacaggcgtgagccactgcacccagccggctttgtttacagtactcagcagctgccaaaatagtccccattcccaggcagggcaggctcccgggctcagtccagcggggcagatggccagcctgcacgtcaccccactaggcatgtccaggccctttctgcccctccctaaaggcacccctgtcctttctgtcccctccacactgagccaagccagcctccactcttgccccaggcctgccctctgctgggagccgggacactgagctcctgccacatgagcaggttgacctgcagggggcctccaagcaggtgccaaggcagaatcggatgtgaccaggagaacacccttgaaggataaagcgaatgtgcgaccaccatgcaggtctggcccatggaagggaggggagggggccccgacggggccacagtaaaggagtggaggggccccacaggcagggatggcccagctggccccctggggctgtgaatctgcaggtgcagtgcagcctcttgcctctctcagcccagcccttgcatctgcctcttggtgtgtctgtgaagacaaagtcaccgtggtccctgcagcacctggcttgaagcaggtgtgcagtccgtgtgaaagccttccctttagctattaggtattgagtcaaaaaaaaaaaaaagccttcccctgagcctgggggcctggccccactgaggataccaggcgggggaggctacaggaggctgccctctgcctggccatctgaccttcattttgacctattcccttccacaccagcccctttccctatgtagggtgcagtctttgttgcaactgctcacctctgccatggtcggatgagagcagccacggacaatgtctgtgcaattgtgcgttttttgttttgttttgttttgagatggagtcccactcttgttgcccaggctggagtgtaatggcaccatctcggctcactgcaacctccacctcccgagttctagcgattctcctgcctcagcctcccaagtagctgggattacaggcatgcatcaccatgtctggctaattgtgtatttttaatagagactggggtttcaccatgttggtcaggctgttcttgaactcctgacctcaggtgatccacccgcctcagcctcccaaaatgctgggattacagacgtgagccaccgtgcctggttgattgtgcgttctgataaagcttcatttacagaaatagcaggtaggcccctcgcagggtgcccagagcaggtgcactgtctcacctcttctcaggtgtcaccggggtgagaggctagtcctctgcctcctccttcctctctgcaggttggagaaatgacagcttcttgtactgggggttatgagacagtggcaggagggggacactcccagagtgctgccagaaagaggcgaggccccatctggatttgatggcatttttattgtggtgttgttttagagacagtgtctgtcgcccaggatggacgacatggtgcaatcatggctcactccagcctccaactcctgggcccaagcaatcctcccacttcagcctcctgagtagctgcagctataggcacaccaccatgcctggctcaatgggtattttgtggccattaaacttctggtcattcctttagattcccagaggctggatggaggtgagtggccagcccctgggtccagagatgagcgcggggcctggctgcagcctgtggggtctcccaggctggcctccaggtgtcctctcagcctgtccacaggcgctgcccaagcgtgtggcctacctggtgctgcctggcctgtctctacgcacctgtactggctctccctggattactggatcgcagtcgaatcccctgccagaatcctggtccccctttatcacaccggatcagccccaaagggcagggcttcttgcagcagttccagcctttgctgggggtttccagccctgttgagcaagccccaggtagggccctctgcagcccccgtgggggacctgtgtgccgagcagagctgccccgtgtgtaaacgcttagaactggcctccttcctgccatctgtgtcctgtttgtcatcacgcctgtggctctatgcttgtctccccgactgggccaccagccctgtgagggcaggatgaggcacgtccaagccacagtggctctcagtgtgcatgcagggtgctgttagcattggttctgtgttctggaatagtgagaacagtgtgccccaaatggccagtggcctttccgagggtcactgcagccgcatgttggccctctgtggagaacggaggatgcacagccatttcagagcacaacctgaggtctcctgagcttgctgtgcagcccagtctttctctccgtggcccctggtagctgtctttctcccaggaggaggagaaagacaccttcctgagcaggaggatgtgggtgaatagagaccaaagtgtcaatcactcttctgacagaggtgatagcagaatgaaaaactgatggaccccagatctttgcaaagagaacaaagtcagtttctagttatctttctttcttttttttctttttttctttttttttttttttttttttttttgagatggagtctcgctctgctgcccaggctggagtgcagtggtgtgatctcagctcactgcaaccgcctcccgggttcaagtgattctcctgcctcagcctcctgagtaaccaggactacaggcacacaccaccacgcccagctaatttttgttatttttagcagagacagggtttcaccatgttggccaggatggtcttgagctctctttttttttttttttttttttttgagacggagtctcgctctgtcacccaggctggagtgcaatggagtgatcttagctccctgcaacctctgcctcccaggttcaggctattctcctgcctcagcctcctgagtagctgggactaacaggtgcttgccaccaagcctggctaatttttgtatttttagtagagacagggtttcaccatattggccaggctgatctcgaaatcctgaccttgtggtctgcccgccttggcctcccaaagtgctgggattacaggcgtaagccaccacaccaggcccattttctagttatcttttacggattttttaaaatgagcctagaaaccaggtcatataattagtttattttttaatttcttatagagacagggtcttactatgttgcccagagtggtcctgaacgcctgggctcaagtgatcctcctgcctcagcctcccaaagtattgggattacaggtgtggccactgttccagccatagttcatattttaaaggatttttaagagtctcatttcactgatgttacttgcagtatatttatggaaaacattcctgtcttttttttttttttgagacggagtctcactctgttacccaggctggagtgcagtggcgtgatctcggctcactgcaagctccacctctggggttcacgccattctcctgcctcagcctcccgagtagctgggactacaggtgcctgccaccacacccggccaattttttgtatttttagtagagacagggtttcactgtgttagccaggatggtctcgatctcctgacctcgtgatctgcccgccccggcctcccaaagtgctgggattacaggcatgagccaccgcgcccggccagcattcctgtcttttaaagaaagatgagaccagatgcagtggtgtgcacctgtggtcccagctactcaggaggatgccttgagcctgggagttcaaggctgcagctgcagtgagccttgatcacgccactgcactccagcctgggcaattgaacaggaccctgtctctaaagaaataaaataaaggcagatgaatgtcatctagggtgtgtccaatgtgagagagaatactgaccaggtgacagaggtgatggactctctagctctgcagcagactgctgggcagagaagcttgggcaggcctggcactgaggcccagaagcttcatgctctttagagccagaggtgtcaagcccagctgcctgtgtcctggccgcactgtgaggcactgaggatgccctcacacgtgcatctgcatgtggcgtgcatgtggcaagcatgtgcaggtgctgtgtgggcacgatcatgcctgccctctactgtgctggagaggtaagaccatcagccgtttcacagaggagggaatgtggacctcacgggggtctcatgagcttgcgagccgatggccaggcagccggtgcagaaggttcatccattttgatgaaccgtgaattcatctgtactttattcattttaataactgaatcatacctcattgtatggctctaccatgttttattatccattcaggtgctaacggatggaagggttgtttctacctgttggccattgtggatgatgttgctatgcatattggggtacgagtatctggtttagtccctgttttcaattcttggtatacacctaggagtagaattgctgggtcatatggtagttctattttaacttttttttatttttaatttttgtgggtttttaagaattttttaatatttgtgggtgcatagcatgtttaattttttttttttttgagacggggtcttgctctgttgcccaggctggagtgcagtggcaggatcacagccctgtgcagcctcaacctcctgggctcaggtgatcctcccgcctcagcctcccaagtatctgggactacacgtgcggaccaccacgcctggctaatttttaagttttttgtagagatggggtcttgccatgtttcccagactggtatgggactcctgggctcaagcaatcctcccatcccaacctcccaaagtgctggaattacagtcatgagccaccaggtctgaccacatgtttaactttttgaagaactaccaaactgttttccacggcattcacaccagcaatgcaagagggttcccatttcatcacatccttgctaacacttgttattttccttaaaaaaaaaaaaaaaaaaagccagctgggcacggtggctcatgcatgtaatcccagcactttggaaggccaagggggtggagcacttgagctcaggagactagcctgggcaaaatatcgagaccccacctccactccatctctaccaaaaaaaaaaaaaaaaaaaaagctgggtgtgcggtggtgcacatctgtcgtcccagctacttgggggggctgaggcaggaggatcccttgagcccaggaggtcgagactgcagtgagctgcgaccgcgccactgcactccaggctgagcgacagagtgagaccctgtttcaaaaaaacaaaaaaaaagcacatttcaaacatacacaaaagcagagagaattcccctcggtcctccggcctgcaccccaccgccccccaccacaggggcattcaaaactgtctttttgcctctctgtaaggtaaggggggactcttgacgctccccagaccacacagccaaagtagggcgatcggatcatagggggtcccgagtcggacactgagctggcgtgcccactctcgagtcctgggaccccaaactaaaggagctgttccttttccccatggagggctgacggggcaaaatcccagggctgggaacatccgagcagctttgagtagcacaggtgggtttctacgtggctttctttaaagggaggcctgattctcggcttttcaggacccgccctccattttctcacttgcctgctctttcgtcctgcgaaactgggcagtggccggtgacagcgcagggtcagccctcggatggccaggtgggcgtgatcccaccctcctccgtggctgggtgggcgtggtcccaaagtcaattggatgtggtcccgcgtccctcccggcccagtgggcggggcctccccttctggggcctcccatcccacaccagcgagcagagaggagggtgggcggggaggccctacggggctggggcggggcggagcggaggtggttagctgtcgggaggtggggtgggcaggggccagggctctgttggtggcccggggcagccagtccctctgctcagggcttcagttcacactcacaagggaatcccagcgctcttctcctctggcggttgctggagggccttgtgaggtggccgtgggcactgtagcccccaggcactgcattgtggcctgggcgtgttggcctttgagcctttggccttgagcacttccccatcccccatggctcttggccattggaccccagttggccacagagccgcgggcaggtgggacaggcgggcactgggtgcctctttgcaccagccaggcccagcctgcagagtggagtgggccggtccctcctgccaggcaaaggaagggggcttcgggcccctccctgctgtggcctcctcccctctgctgcctcccactaggccctgggagacactgcctgcagatttatgaacagacagacctagagattagagattcaaaagccaaattcttacacaattcaagtattaacgcagatttggatttataatttgggactccaaggtctaccaagtaatttgctgtttcagaatagcccttttaatttggggtatatatttctaacactgttttttaaatatggagagtaaacaaaatggcccattatctgaccacacaaatactagtagtcattatagataaaccatagcagataaataatagtaaacaaagcaacaggctgtgtcataggaaatccccaccatgaagaaaggagcaaggtggaaagttctggctgcttcaggtctgcatggtccctctccaccatggttccccctgtcatcttcctgccagaataaggacactgtccttagggaagcaccatctcttgttttttccccacgagccctgtgggtcatggcacgtcctgccccgctgggaaacacagtgggccacgggtttccctgcaggcctgggacccttcccaagggtagcagcagaaggcagcacgattcccactcctgcagctgtggacaggggcacccccactgtcactgagccctgcaccgggttccatcacctgctcggggctctggcctttggccttttcctgtgagctgcatgttggccactgtgacctatctgtctcatcatctttttcttactggtttgtgtatgttcttggtaaactagcccttggtcttacacatcatttccaaggtactaaggactcttcaggggaaatacaacttgagcagagtggttccctcctcttgtggttcacaaggtgcaggtgcacacacacatagcccacagggcagtgtggacagggaccaggagactgcccctggggtccctggctgggggacactagtagggatgtcccttggcctctctgaggccttctgctgtctcttctgaggccggaaaggcgaagcactgccctcgccctgctagggaaggctcaggccaggctggccctatccggggaaggggctcaggtatctggaccttggtcatcgccaggttagggtttatgttgatgattatccaaaggcaaaattgatttccacagaaataacatctgctttgctgccgagctcagaggagaccccagacccctcccgcagccagagggctggagcctgctcagaggtgctttgaaggtgagttggccaacggaagccggggcagtgccagggtgggtacagattccggcccggtgcatgggcacaggtctgctgagcacatgtccactctgcctgtgtaaataggccacatggcctgaaatcccctagaagcctggtgtccgcatgacctccccctagggcggagcctctgcttccctgttctcttctgctctgtcctctggtgccctgaggctggcctccaggggtgtcccctctgtggccctaggcctgcctccttgcctgggtgtgcctttctaaaatggagcgtccagcagagagtgggatctcctatgccactgggagcccagggccccatcccagaaagacctctgagtgagcacaggggccctagaagaagtttccttgtgtccttcccgttttagggtctgtgacctgaacccctgggcttctgcctcaggcctcctgtgctctgctctctgcctgctgggtcccctcaccaggcttctgtctggttcccaggctacctgcctggagggtcacaccaggaggatttcaaacaggtttcaagtggggtcacttgccatcactgtgccccacgaggtacactgttgtgggcggcagggctggcctttctcatctgggacatgccacgttgctgttcccaaggggagtggtgagtgggtctgtcctggtgtgcctggcctggggactgccagtgtccttacttggacactcaatgaaaaggccacatgaatccctggggcgtccagagcatgggtgaccagcacgggctcaccacatgaggccaaggggctgcaccatacagcctctcctttggccacccgtgactacccccaactccgggccatggggcttccctacccctgggtgtcctctaagccagctgggagacaacagcctgagtccgtgtctgcttctgtattttgtgtggttttagaggatccctgggctgcctggggaagcacccagggccagggagtgtgaccctgcaggctccacacaggactgccagaggcacacacctgctctgtctacccgagggcaccagagggcacgagaaggctggctccctggcgctgacacgtcaggcaactgaggcacaaggctggcatttctgaaccttgcccctctgcaaacacaagggggcgatggtggcactccaagcaaaggggcgtgtgggtgctgcaggaggagcacagagcactggcgcccctcccctcccgccctgcagatgccggaggccccgcctctgctgttggcagctgtgttgctgggcctggtgctgctggtggtgctgctgctgcttctgaggcactggggctggggcctgtgccttatcggctggaacgagttcatcctgcagcccatccacaacctgctcatgggtgacaccaaggagcagcgcatcctgaaccacgtgctgcagcatgcggagcccgggaacgcacagagcgtgctggaggccattgacacctactgcgagcagaaggagtgggccatgaacgtgggcgacaagaaaggtggggtccgggccagcaggtgctcagctctgggacagggacccaggaccaggcatcaaagcccttacaggagaagctgttatcaccccatttccagggggctgggaaccctgggatatgcccagatagggctggggggctcctctggagtcccagggtgccagggtccctgatgacccctgcaggccctgctgcctgctgccccaggacaacaggcccccacactcacagggtctgacggtggtgcagttccccttgaactctgttctggccaccatgggacctgcctggggaccagtcagacaggttctcctgggcccgcctcccgcttgaacttcagcctggggcacaggatgtgttaccgggctcacggagtgactcagggaactagtgccgccccagggccccaaggtgggcggttcggtgattcagagagggcagctctgtgttaggacacactggggccagccaggaagggtggaaaagatagggaccagcgtgagcatagaggctaagggaccatgggagctccaagcgcgctcacagtggggaccaggtcctgggggctggggacaccagggaggtgaaatacccctccagcgggtagggagggtgggcagaggagggccagcggccaggcatttgggaggggctcctgctctttgggagaggtggggggccgtgcctggggatccaagttcccctctctccacctgtgctcacctctcctccgtccccaaccctgcacaggcaagatcgtggacgccgtgattcaggagcaccagccctccgtgctgctggagctgggggcctactgtggctactcagctgtgcgcatggcccgcctgctgtcaccaggggcgaggctcatcaccatcgagatcaaccccgactgtgccgccatcacccagcggatggtggatttcgctggcgtgaaggacaaggtgtgcatgcctgacccgttgtcagacctggaaaaagggccggctgtgggcagggagggcatgcgcactttgtcctccccaccaggtgttcacaccacgttcactgaaaacccactatcaccaggcccctcagtgcttcccagcctggggctgaggaaagacccccccagcagctcagtgagggtctcacagctctgggtaaactgccaaggtggcaccaggaggggcagggacagagtggggccttgtcatcccagaaccctaaagaaaactgatgaatgcttgtatgggtgtgtaaagatggcctcctgtctgtgtgggcgtgggcactgacaggcgctgttgtataggtgtgtagggatggcctcctgtctgtgaggacgtgggcactgacaggcgctgttccaggtcacccttgtggttggagcgtcccaggacatcatcccccagctgaagaagaagtatgatgtggacacactggacatggtcttcctcgaccactggaaggaccggtacctgccggacacgcttctcttggaggtgagccccaaccaggatggcatccgtgccagctgctgcccagagcccattcagtcagcctcagcctctccaaagagccaggcattccagtagagccctgtgtggacacagctcgctctggaggcaccacctgaggtctgggagtgtgggggactgaggaggccctgtggtgggtggagatgggtggggagctgggccaggggcctggctgggtggcctgttgggaactggggagccagctgcctgtgcaggtgcaaaatgggtggcagaagtggggtgcacaccccagaccagacaccagggcagaaacggcacaggaccaaggagatggggtggggaagggccgctctgggcccagcctgctctcccccaagcaagccactgctcgtgcaaagaaagcatgtgtctcctgcagatcttcctcctgaggccccatcttgtgcattcccccaacccagccccactggcgaggaccctgagtgccccgagtgaggctagacagcgggtggggctgtcctcgcttccctggggggcgtggggcactggtggcccttcacagactgatgcttaaggagcctcacatcagtgacacactgccccatccctccctggtggtcagcgacactgagtggctctgtgatcctccactgggcttgggacacccaccctcacggcctccccacctggtgctcgctcacctgcagctctcccagaaactggacactgctgttagcagccggactaggagcacgaggggcacagcccccatgcctggctaggtagggccgctggaccctggacacggattggaaggaaccagcactagcagaagcctgaggtgtgaaagggcagagaatgttccaggaacaatgggagtcagggcacacaggactttgggcaggtgaggatgaggttagacctgtcttctggagctgggctcaggggctcatgcctgtaacccttgcactttgggaggctacggcaggaggagcgcttgaggccaggagagttcgagaccagcctgggcaacatggcaaaagaaaaaatatatatatatattttagatggagtcttgctctgtcaccaggctggagtgcagtggcacgatcacggctcactgcaacctccacctcttgggttcaagcgattaccctgccttagcctcctgagtagctgggactacaggcgcgcgctgccacacccggctagttttttgtagtttagtagagatggggtctcaccacattggccaggatggtctcaatatcctgacttcgtgatccgcccgcctcggcctcccaaagtgctgggattacaggcgtgagccactgcgtccggccgtattccagcttttaaaacaacaaaaaacaacaaaaacttttctggaaagatccctgtcagccttgtggagtgtggagagggctgtggggagggcatttcagatgccctgaactcacgaggaggcactgaaccctggccgtggagagggaggacctgtagtggccaagggggtgggcattgggagggtgggagggagacctacaggccaagacagggtagctggaggggggctcacccctgacaaaggagcatgatgctggcaattgggtattgatggcagagagctggcactcagccagatgggcttcacttgggcaggaaagacacccacagctgggcctgcgttactgcggccgagtttcagcagctgtgatgtgggtgctaattacaggggcctgccttcatagaaaagtagcaaacattgcagtttagtaactaggaaactaatagttttctcagtgctgcttgcgcaaagctggtaattatctcaaaagaagcaaagtcatgaagtgggaagtcatgaattgggaatgggtgtccttgttaaacgcacatctgcacactcagggctggggccctgtgcccccttgtggagggttaggggacaacctggctcttgtgagggtctagccatcccctcagtgggttctgtgagcatcggaggcacggggggtgaggggctcaggagcaggttgcaattcaaaatcaagggctgctttgaggaggcctctccaccgggctgctgtagtcaccaagtccagcccatgcccaaaggaagaggaatgagttcccccttaaaaaaaaaaaaaaaaagaaaaagacagagtcttgctctgtgcccaggctggagtgcagtgatgacatcatagctcactgtagcctcaaactcctgagctccagtgatcctcccacctcagcctcctgagtagctaggactaaaggcatgcaccactacacctggctaatttaaaaattttttgtagaaatggggtctccctatgttgcccagactggtctcaaactcctggcctcaagcgatcctcttgcctcaacctcccaaagtgctgggagtacaggtgtgtgcttggtctgaggctccaactttttgttgttgtttctcgagacagtctctcgctctgtcgcccaggctggagtgcagtggcgcgatcttggctccctgcaacctctgtgaggctccaactcttgaagggaggagagtctaaggagggtgggccagatgaaaaccacctcagcatagtgtcacctgctcctctgacactgtcgcttctccatggcattagattttcagtcctgctcagacgctgatgcatgtttagccagttctccaggtggtctgagtagctggtaggaggcttgcagtgtcgggcgacaggcaggacaggtgctgccttctttcccctcttgaccagtttcgtaaaggagtgggcccctggcagcctccaaaggtgacccatgctcctttctgcccttccctccttctttcctgtttaactcgtgcaggtgcagtggtctggtgtctttcagtccgctgacgtcttctgtatccctgatgaccagattgggctcctgagtcccctggcgcaacccgagaagtccaggagcccaggcccctcactcatgcattccctggcccagactggaaggcagccgccctgctcaaggcctaggccattgtcctcctcccgggtggcgctttgttctacgtcttttcagctgacattgctaggacatttttttttttttctaaatgaaaacacatcatgattcatggtggtacttcctgctcaactccggaccttggggctgtcccctgacctcactgaccttgcagccgtgtggtgtccatactgtcacatgaaagccccctgctttctctgcagcatacaggctggaaacgaccgccacccaccaccaggacagctgcaagccctgtgggactctccaggcccatcccagaggcatgtggggtcggataccagtgtttcaaggcacctgcctgcaaattgattttattatactttagatgtttgagattgcttgttaacttttgtttggtgactaagtcaaatttccaagacaaggtgactggggtgtcccttgccctggtaggtccttcctccccataggcaaacacttcctctcaaggtttcttgtttatgtgatgtaagcaaacccttttctgatagcatagataggcaagcatcctatgaggtttctcccgatagtggaccccacgggccatgccctatggctgcgtgtccagtaacaactccttccttctgcacagaacccaggcagaggaactctgtgtcctcccagggcccaggcactggtgaagatggggggtctgcaaatgcaggagcttggggatgtccagaactgaccccaaggggcaggcttgttgatgggaggtctgccccacctcagccctgcagggtcaccctggtcaggccaatattgtctccagggaccataccagcaacccctctccttgggtgcctctccctcataggcctgagttcctggcactgggtgttgagggccccattgtttccactcacccagctagcatttattgagcacctactgtgtgccacatgctgttctaagggatggatactcctgagatggatacaggagttgatgagagaaaggtccctgtcctcacggggcccatgttctgaaggtggcacccaagtcttgtacagtcctttcctgcaggagtcacgctgggcagaaagtggaaacctggccccaggggctaggcacaggcgtggtgccgtggcctagtgaggagcacccatcctggtttggggcaggttctctgggcacctctgaccctcacctcccccaccccccggtctgtttgcaggaatgtggcctgctgcggaaggggacagtgctactggctgacaacgtgatctgcccaggtgcgccagacttcctagcacacgtgcgcgggagcagctgctttgagtgcacacactaccaatcgttcctggaatacagggaggtggtggacggcctggagaaggccatctacaagggcccaggcagcgaagcagggccctgactgcccccccccggcccccctctcgggctctctcacccagcctggtactgaaggtgccagacgtgctcctgctgaccttctgcggctccgggctgtgtcctaaatgcaaagcacacctcggccgaggcctgcgccctgacatgctaacctctctgaactgcaacactggattgttcttttttaagactcaatcatgacttctttactaacactggctagctatattatcttatatactaatatcatgttttaaaaatataaaatagaaattaagaatctaaatatttagatataactcgacttagtacatccttctcaactgccattcccctgctgcccttgacttgggcaccaaacattcaaagctccccttgacggacgctaacgctaagggcggggcccctagctggctgggttctgggtggcacgcctggcccactggcctcccagccacagtggtgcagaggtcagccctcctgcagctaggccaggggcacctgttagccccatggggacgactgccagcctgggaaacgaagaggagtcagccagcattcacacctttctgacaagcaggcgctggggacaggtggaccccgcagcagcaccagcccctctgggccccatgtggcacagagtggaagcatctccttccctactccccactgggccttgcttacagaagaggcaatggctcagaccagctcccgcatccctgtagttgcctccctggcccatgagtgaggatgcagtgctggtttctgtccacctacacctagagctgtccccatctcctccaaggggtcagactgctagccacctcagaggctccaagggcccagttcccaggcccaggacaggaatcaaccctgtgctagctgagttcacctgcaccgagaccagcccctagccaagattctactcctgggctcaaggcctggctagcccccagccagcccactcctatggatagacagaccagtgagcccaagtggacaagtttggggccacccagggaccagaaacagagcctctgcaggacacagcagatgggcacctgggaccacctccacccagggccctgccccagacgcgcagaggcccgacacaagggagaagccagccacttgtgccagacctgagtggcagaaagcaaaaagttcctttgctgctttaatttttaaattttcttacaaaaatttaggtgtttaccaatagtcttattttggcttatttttaatgctttttctcagtgtttttcttctgtttctgagtcacgaacagcaggcactgaaagcagtcccccagccactgccgaaggtcagtcccggaggtgctgcccaggctccaggcagatgcggcagccccggccacagccagcatgggctggagaaaggctctctactgcacaggggcctcacgtgactgcagggctctggggaggtggggcacctgtagcctgacccccaccttgctgcttccaaagcttccttgcccagggctgagccttgtggggcaccccccacactgtggtctgcctgcctgcagggtgcccagggagaccctccgcctttagaagtccaagttct

SEQ ID NO: 25025 - DNA, 2138 bp, Homo Sapiens
tctgtagtttaataatggaccaacatcaacatttgaataaaacagcagagtcagcatcttcagagaaaaagaaaacaagacgctgcaatggattcaagatgttcttggcagccctgtcattcagctatattgctaaagcactaggtggaatcattatgaaaatttccatcactcaaatagaaaggagatttgacatatcctcttctcttgctggtttaattgatggaagctttgaaattggaaatttgcttgtgattgtatttgtaagttactttggatctaaactacacagaccgaagttaattggaattggttgtctccttatgggaactggaagtattttgacagctttaccacatttcttcatgggatattataggtattctaaagaaacccatattaatccatcagaaaattcaacatcaagtttatcaacctgtttaattaatcaaaccttatcattcaatggaacatcacctgagatagtagaaaaagattgtgtaaaggaatctgggtcacacatgtggatctatgtcttcatggggaatatgcttcgtggcataggggaaacccccatagtaccattggggatttcatacattgatgattttgcaaaagaaggacattcttccttgtatttaggtagtttgaatgcaataggaatgattggtccagtcattggctttgcactgggatctctgtttgctaaaatatacgtggatattggatatgtagatctgagcactatcagaataactcctaaggactctcgttgggttggagcttggtggcttggtttccttgtgtctggactattttccattatttcttccataccattttttttcttgccgaaaaatccaaataaaccacaaaaagaaagaaaaatttcactatcattgcatgtgctgaaaacaaatgatgatagaaatcaaacagctaatttgaccaaccaaggaaaaaatgttaccaaaaatgtgactggttttttccagtctttgaaaagcatccttaccaatcccctgtatgttatatttctgcttttgacattgttacaagtaagcagctttattggttcttttacttacgtctttaaatatatggagcaacagtacggtcagtctgcatctcatgctaactttttgttgggaatcataaccattcctacggttgcaactggaatgtttttaggaggatttatcattaaaaaattcaaattgtctttagttggaattgccaaattttcatttcttacttcgatgatatccttcttgtttcaacttctatatttccctctaatctgcgaaagcaaatcagttgccggcctaaccttgacctatgatggaaataattcagtggcatctcatgtagatgtaccactttcttattgcaactcagagtgcaattgtgatgaaagtcagtgggaaccagtctgtgggaacaatggaataacttacctgtcaccttgtctagcaggatgcaaatcctcaagtggtattaaaaagcatacagtgttttataactgtagttgtgtggaagtaactggtctccagaacagaaattactcagcgcacttgggtgaatgcccaagagataatacttgtacaaggaaatttttcatctatgttgcaattcaagtcataaactctttgttctctgcaacaggaggtaccacatttatcttgttgactgtgaagattgttcaacctgaattgaaagcacttgcaatgggtttccagtcaatggttataagaacactaggaggaattctagctccaatatattttggggctctgattgataaaacatgtatgaagtggtccaccaacagctgtggagcacaaggagcttgtaggatatataattccgtattttttggaagggtctacttgggcttatctatagctttaagattcccagcacttgttttatatattgttttcatttttgctatgaagaaaaaatttcaaggaaaagataccaaggcatcggacaatgaaagaaaagtaatggatgaagcaaacttagaattcttaaataatggtgaacattttgtaccttctgctggaacagatagtaaaacatgtaatttggacatgcaagacaatgctgctgccaactaacattgcattgattca

SEQ ID NO: 25026 - DNA, 1080 bp, Homo Sapiens
ggactaaggtgaaagctgactgcccgcaccgccccaggcgcactgggtaggactgaaaggcagggactaaggtgacagctgactctgccggggcggagtgcgtgtcctcccaccgtgctggcgctgaactgactgtccgctgccaagggaagtgacagccgcagccgggctctcagccagcggccaggcgccccgcggaccatgctctccagtacgcagaacgcgggcggctcctatcagcgggtccgcggggcgcttgatacacagaaatgcagtccagagaaaagtgcctcatttttcagtaaagtgacatattcctggtttagcagagtaattactttaggctataagagacctttggaaagagaggatctttttgaactaaaggaaagtgattccttctgcactgcgtgtcccatctttgaaaaacaatggagaaaggaagttttaaggaatcaagagaggcaaaaagtaaaggtatcttgttataaagaggcacatatcaagaaaccatctctactctatgcattgtggaacacctttaaatccatcctgattcaagttgccttattcaaagtgtttgctgatattttgtccttcactagcccactcataatgaagcaaattatcattttctgtgaacacagctcagattttggctggaatggctatggctatgcagtggcacttcttgttgtagtctttttgcaaactctgattcttcagcaatatcaacgttttaacatgctcacctcagcaaaagttaagacagctgtaaatggactgatctacaaaaaggccttacttttatcaaatgtttctcgacaaaagttttccactggggaaattattaacttgatgtcagcaactcatggacttgacagcaaacctcaatctcctctggtctgccccttttcaaatcctaatggccgtatatctcctttggcaagagctgggtccagcagtgttagcaggggtggcagtccttgtgtttgttataccaataaatgctttagctgcaactaaaataaaaaagttaaaggtaaaaaaaaaaaaaaaaaaaaaaaaaaaaaaaaaaaa

SEQ ID NO: 25027 - DNA, 1677 bp, Homo Sapiens
atggcggctgtgagtctgcggctcggcgacttggtgtgggggaaactcggccgatatcctccttggccaggaaagattgttaatccaccaaaggacttgaagaaacctcgcggaaagaaatgcttctttgtgaaattttttggaacagaagatcatgcctggatcaaagtggaacagctgaagccatatcatgctcataaagaggaaatgataaaaattaacaagggtaaacgattccagcaagcggtagatgctgtcgaagagttcctcaggagagccaaagggaaagaccagacgtcatcccacaattcttctgatgacaagaatcgacgtaattccagtgaggagagaagtaggccaaactcaggtgatgagaagcgcaaacttagcctgtctgaagggaaggtgaagaagaacatgggagaaggaaagaagagggtgtcttcaggctcttcagagagaggctccaaatcccctctgaaaagagcccaagagcaaagtccccggaagcggggtcggcccccaaaggatgagaaggatctcaccatcccggagtctagtaccgtgaaggggatgatggccggaccgatggccgcgtttaaatggcagccaaccgcaagcgagcctgttaaagatgcagatcctcatttccatcatttcctgctaagccaaacagagaagccagctgtctgttaccaggcaatcacgaagaagttgaaaatatgtgaagaggaaactggctccacctccatccaggcagctgacagcacagccgtgaatggcagcatcacacccacagacaaaaagataggatttttgggccttggtctcatgggaagtggaatcgtctccaacttgctaaaaatgggtcacacagtgactgtctggaaccgcactgcagagaaatgtgatttgttcatccaggagggggcccgtctgggaagaacccccgctgaagtcgtctcaacctgcgacatcactttcgcctgcgtgtcggatcccaaggcggccaaggacctggtgctgggccccagtggtgtgctgcaagggatccgccctgggaagtgctacgtggacatgtcaacagtggacgctgacaccgtcactgagctggcccaggtgattgtgtccaggggggggcgctttctggaagcccccgtctcagggaatcagcagctgtctaatgacgggatgttggtgatcttagcggctggagacaggggcttatatgaggactgcagcagctgcttccaggcgatggggaagacctccttcttcctaggtgaagtgggcaatgcagccaagatgatgctgatcgtgaacatggtccaagggagcttcatggccactattgccgaggggctgaccctggcccaggtgacaggccagtcccagcagacactcttggacatcctcaatcagggacagttggccagcatcttcctggaccagaagtgccaaaatatcctgcaaggaaactttaagcctgatttctacctgaaatacattcagaaggatctccgcttagccattgcgctgggtgatgcggtcaaccatccgactcccatggcagctgcagcaaatgaggtgtacaaaagagccaaggcgctggaccagtccgacaacgatatgtccgccgtgtaccgagcctacatacattaagctgtggacaccccg

SEQ ID NO: 25028 - DNA, 5487 bp, Homo Sapiens
  misc_feature (4614)..(4614): n is a, c, g, or t
gtgggggccaggcagcacagatgaagcatttacctatctaggtaagtcaggaggagctcaaaaggagaagaaaacagtaggaggcaggggaagcagcctctgtctccatctctgccctttgaaacaaaagggtatttcttttctctcttcagcccccaacccagtggaggcccggcttgggacattgttcacttcccctcgcttcccctctagaagccccctttgccatccctgcaccttgtttcgggtgatgcccgagagggagctgtggccagcggggactggctcagaacccgtgacccgtgtcggcagctgtgacagcatgatgagcagcacctccacccgctctggatctagtgatagcagctacgacttcctgtccactgaagagaaggagtgtctgctcttcctggaggagaccattggctcactggacacggaggctgacagcggactgtccactgacgagtctgagccagccacaactcccagaggtttccgagcactgcccataacccaacccactccccggggaggtccagaggagaccatcactcagcaaggacgaacgccaaggacagtaactgagtccagctcatcccaccctcctgagccccagggcctaggcctcaggtctggctcctacagcctccctaggaatatccacattgccagaagccagaacttcaggaaaagcaccacccaggctagcagtcacaaccctggagaaccggggaggcttgcgccagagcctgagaaagaacaggtcagccagagcagccaacccaggcaggcacctgccagcccccaggaggctgcccttgacttggacgtggtgctcatccctccgccagaagctttccgggacacccagccagagcagtgtagggaagccagcctgcccgaggggccaggacagcagggccacacaccccagctccacacaccatccagctcccaggaaagagagcagactccttcagaagccatgtcccaaaaagccaaggaaacagtctcaaccaggtacacacaaccccagcctcctcctgcagggttgcctcagaatgcaagagctgaagatgctcccctctcatcaggggaggacccaaacagccgactagctcccctcacaacccctaagccccggaagctgccacctaatattgttctgaagagcagccgaagcagtttccacagtgacccccagcactggctgtcccgccacactgaggctgcccctggagattctggcctgatctcctgttcactgcaagagcagagaaaagcacgtaaagaagctctagagaagctggggctaccccaggatcaagatgagcctggactccacttaagtaagcccaccagctccatcagacccaaggagacacgggcccagcatctgtccccagctccaggtctggctcagcctgcagctccagcccaggcctcagcagctattcctgctgctgggaaggctctggctcaagctccggctccagctccaggtccagctcagggacctttgccaatgaagtctccagctccaggcaatgttgcagctagcaaatctatgccaattcctatccctaaggccccaagggcaaacagtgccctgactccaccgaagccagagtcagggctgactctccaggagagcaacacccctggcctgagacagatgaacttcaagtccaacactctggagcgctcaggcgtgggactgagcagctacctttcaactgagaaagatgccagccccaaaaccagcacttctctgggaaagggctccttcttggacaagatctcgcccagtgtcttacgtaattctcggccccgcccggcctccctgggcacggggaaagattttgcaggtatccaggtaggcaagctggctgacctggagcaggagcagagctccaagcgcctgtcctaccaaggacagagccgtgacaagcttcctcgccccccctgtgtcagtgtcaagatctccccaaagggtgtccccaatgaacacagaagggaggccctgaagaagctgggactgttgaaggagtagactctgcgaccagtacagaccctgtcctggctgaacaagaagagacacatgctccacttgggagcctttgccaccacgcaactcagggctcaagatgaatgggagggagagatttgagtccaagcatacatttatattcagtgttgtgccattgagttcccatgtggatcattctgaaggtgatctccacaagagggtgtgtgtgtgtgtgtttggtgtgtgtgtggagggggggcccgctggatacatcactgaagctattgatataacacaatgagtcactgttcagaattttgctcttgttagatgttttcttacattgggtagagtccagcctagtgagagctgagtgaaggggctggccagtcgtagacaaagtgacgtgtcaatgacttgaaaaaaagtcacatccagcaaatgcagggtcacatgaaatatgggcctcctggaatccctacagtggatggagactggctcataccttgccagatccctctctcagttccagccttctggacttggcctgggctaagaggagctgattcgttatctctcacccactgccctctcagtatcaccagtcccaaagacaggatacgtcctgtaacccaatctctcggttgattgatagcagaacagctcttgttggtctgagaaggcaggataagtgaccacatatttatgccactacctccaccagggagagtccttctccacaggcttgataaattcaatcaccaactgtgctgtcgtcctgcctctgcctactcccgttcttcctgctttcctgctccgtatctcagtctgcactgacccagggctgggctgacatcaagatgggagcgccagcccacgggctttataaacacccaagaaccgtttcagatcttctctgtgctgatgcaggtagttttaaatttttctcagttccagtgatagaaaacccacacaatacatcctctgccagtcttaatagatatcagaggtaagaggggcctcagagaagctctgacgcagtgctgctggggaagggaagtgactaaccccgggtcagcctgccatttagggaaagagctgaggttcttacccttgttgcatgctgccacctctccttagccagtgctcttgtacatccacacagcaccctaaggagccatagtcaccatcaaagactcaaccctaaggcccttcaagatctcaaagtgccttctgaagcatcagagattaaatattgttcaaactaatagttattgctgtggcttttaattttatctttggaagatagctatatggtaactcatcattaaccagaacacctctcccctcaaattccggtgtaccaaggtgtcgtcagttgttgctagcttgagcaaattgccgaaagagggtattatgggtgggtggtgtgggcttgcaaatacaagcttggaggagagacatggccagacatgactcctgcttccccttagaagtaaatcttacttatggttgagaactgcttggtgtccaggatgcccagatgtgaggggcagatgaagggaatgttgctggaaggtgccttttaaggctgctgagaatttctggactgtgtctgatggacgcagcaccatcaaagcccagaattctgaaaacgtgacaagttaacataagacaacaaatactccaccctgtcatggtatgtgaggtgtgggtgtggcggtttctgtgtacgtttgctcatacacgcacatccaaaagcctgtgcctcattcctggccatgggtgaggacttggtctgtcacggctgatgaggactcccacaaccggccaagttatgtcttattatacacccccagaaagagagaaagctgccttctggaggactgattccacatgctatattcagctgagttgatttctgtgtctatttcaacccataacctgaagaatgatcaccttattccttattcattaattttcttgattaatagggaaacttgggaatagctataaagtaaaacttgggtggaacctggggccctggcatcacacaagtgtgattaggatggtcaaggtcatcagagtacagcctattatattcccacatcctgagaaaggtcatttctcccacacacgacaaagtcacagacatcctgcacctgccactaggcatcctcatcctactgacatgcccatttctccagttttcttaatctgagactcccttcccttgttttttaaagataccgtgcttctccacatcctcatccttcaaggagcatattttgctcttaggatggtctttgggattcaagaatagaataataaatccaaacttggtcattcccattttgaagagatgcaagagggcccagtgaggacatccgcctccctgaaagtggtgctagacagagctgaggtcattgtatctgtgtatccacataggatttctcttaattcagcttgaattgatggggagggaggtaagagtagggtcagagttactcatcccttttcaaagaattgtgggtggaagtttgtaaaggccattcatttgattttcaaaatcaaagcgacantcttacttccacttggccttagatctctgctataccctgccatagccttgatgccactgggcacaagccacctgccaaatacaggagtggcctctcccagcctgggcatgataggggggtctgtgccctcagatgtgttgacagctgctcttctgaattgccacacctgtgctacacttgggaattctgtgctctgactctgcagggtaggaccacgtgccatctcacacagaggtcaaccgatgagcccactcactcgtacagtccttcttcacagtgggaagcgtgatctggcaggggccgccctgtaggctggggatgggctgctgtgtgaatgttgacgttcgtttcatggagaaatcggggaggtgaaagattgaagagcaggttcctgtcaatgttctgagttcgagctggaggtgtagattgaatagtctacatggtctgtgagtgtgtgagatgaacccttccatcctttgacacctggttgtatgtgtaggctaagaaggaaggaccctcctgtcagtgtgcaaagctgtaatctcatggactagaggagagggggccaaggggatggacaggagaagtcatgcagaatctaagcaggaatgcagatagaacacatcctaggctcttttccccccaggagagtgatgatggagcatatagatctggctcaaattcagcctccatcacttacccagtcaggaaccctggcgatatcactttaactttctgaacctcagagtcttcacctataagacggggaaaataataccaccctttcaagattgttgagataaataagtgatataaaacatgtaaagcttagttctggccacagtgtagctactcaataaatgataatactac

SEQ ID NO: 25029 - DNA, 9669 bp, Homo Sapiens
atggtaacaacggtagtggcagtgggtgataccttagctcaaccattagctgcagctgaagtgtttattgtagaaataacacttcaggatatcaatgacaatccaccagtatttccaacggacatgctggatctcacggtagaggagaacattggagatggctctaagattatgcagctgacagccatggatgctgatgagggtgcaaatgctctcgtcacatacactatcattagtggagctgatgatagttttcgcatcgacccagaatccggagatctgatagcaaccaggcggttggacagggaacgccgctccaaatattcactgctagttcgtgctgatgatggtcttcagtcctcggatatgagaattaatatcactgtcagtgatgtgaatgaccatacacccaaattttccagacccgtgtactcttttgacattcctgaggacacaatccctggttctttggtagcagccattttagccacggatgatgactctggtgtgaatggagaaattacatatattgtgaatgaagatgatgaagatggcatctttttcctgaatcctattactggggtctttaatttgactcgattattagattatgaagtacagcaatattatatcctcactgttcgagcagaagatggtgggggacaatttactaccatcagagtttatttcaatattctagatgtaaatgataatccacctattttcagcttgaattcatacagcacatctttaatggagaatctacctgtgggatctactgttcttgtgtttaatgttactgatgcagatgatggcatcaactctcaattgacttatagcattgcttcaggtgatagccttgggcagtttactgttgacaagaatggtgtactcaaagtcctaaaagctttggatcgggaaagtcagtccttctacaacttggttgttcaagtgcatgacctgccacagattccagcctccagattcacaagcactgctcaagtctccattattttgttggatgtaaatgataacccaccgacatttctttcccctaaattgacatacattccagaaaatacacctattgatactgttgttttcaaagctcaagcaactgacccagatagtggcccaaacagctatattgagtacactctgctgaaccctttgggaaacaagttcagtattgggaccattgatggtgaagtgaggctcactggagaactggacagagaagaagtttctaattatactctaacagtggtggctacagacaaaggtcaaccatctctctcttcatctacagaggttgtagttatggtacttgacatcaatgataacaaccccatctttgcacaagctttgtataaagtggagattaatgaaaacacacttactggaacagatataatacaagtgttcgcagcagatggagatgaaggcacaaatggacaggttcgctatggcattgttaatggtaataccaatcaggaatttcggatagactctgtcacaggtgccatcactgtcgctaaacctttggatagagaaaagacccctacctaccatttaactgttcaggcaacagatcgaggcagcacacccagaactgatacctccacggtcagcattgttctactggatattaatgactttgttcctgtatttgagctatctccatattctgtaaatgtccctgagaatttagggacactacccagaacaattcttcaggtggtggcaagagatgatgatcgaggatctaacagcaaactctcatatgttctgtttggtggtaatgaagacaatgcttttactctctcagccagtggagaacttggagtaacacagagtctggatcgggaaacaaaagagcgctttgtcttaatgattacagctacagattcaggatcccctgccttgactggaactggaacaatcaacgtcatagtagatgatgtcaatgacaatgtccccacatttgccagtaaagcgtatttcacaacaattcctgaggatgcaccaactggaacagatgttttattggtaaatgcctcagatgctgatgcttcaaagaatgcagttataaggatcatcggtggaaactctcagttcacgatcaacccatcgacaggacaaatcatcaccagcgcattgttagatagggaaacaaaagataattatactttggtagtggtctgcagtgatgcgggatccccagagcctctttccagttccaccagtgtgcttgtcactgtgactgatgtcaatgacaatccaccaagatttcagcatcacccatatgtcactcacatcccatctcctactcttccaggttcctttgtctttgcggttacagtcacagatgctgatattggaccaaattctgaactgcattattctctttcgggtagaaattctgaaaaatttcacattgacccactgaggggagccattatggccgccggaccactaaacggagcttcagaagtgacattttctgtgcatgtaaaagatggtggctcatttccaaagacagattctacaacagtgactgttagattcgtgaataaggccgatttccctaaagtgagagccaaagaacaaacgttcatgtttcctgaaaaccaaccagtcagctctcttgtcaccaccatcacaggatcctctttaagaggagaacctatgtcatattatatcgcaagtgggaatcttggcaatactttccagattgatcagttaacagggcaggtgtctattagtcaacctctggattttgaaaagatacaaaaatatgttgtatggatagaggccagagacggtggtttccctcctttctcctcttacgagaaacttgatataacagtattagatgtcaatgataatgccccaatttttaaggaagacccatttatatctgaaatattggaaaacctttcccctcgaaaaatacttactgtttcggcaatggacaaggacagtggacccaatggacagttagattatgaaattgttaatggcaacatggaaaatagtttcagtatcaatcatgctactggtgaaattagaagcgttagacctttggacagggaaaaagtatctcattatgtcctaaccataaaatcatcagacaaagggtccccgtctcagagtacttcagtaaaagtcatgattaacattttagatgaaaatgataatgcccctaggttttctcagatatttagtgcccatgttcctgaaaattcccccttaggatacacagttacccgtgtcacaacttctgatgaagacattgggatcaatgcaattagtagatattctataatggatgcaagtcttccatttacaattaatcccagcacaggggatattgtcataagcagacctttaaatagggaagatacagaccgttacagaattcgagtttccgcacatgattctgggtggactgtaagtacagatgtcacaatatttgtgacagacatcaatgacaatgctccaagatttagcagaacttcctattatttagattgccctgaacttactgagattggctccaaagtaactcaggtatttgcaacagatcctgatgagggatcaaatggacaagtgttttatttcataaaatcccaatcagaatatttcaggattaatgccaccactggagagattttcaataaacagatcttaaaataccaaaatgtcactggcttcagtaatgtgaatatcaacaggcatagttttatagtgacatcttcagatcgaggtaaaccttccttaattagtgagacaacagttaccatcaatatagtggacagtaatgacaatgcacctcaatttcttaaaagtaaatatttcactccagtcaccaaaaatgttaaggttggtacgaagttaatcagagttacagcaatagatgacaaagattttggactgaattcagaagtggagtatttcatttctaatgataaccatttaggaaaatttaagttggacaatgatacggggtggatttcagtagcatcctccctgatttctgacttgaaccaaaacttttttatcacagtcactgcaaaggataagggaaaccctccactttcttcccaagcaactgttcacataactgtcactgaggaaaactaccatacacctgaattctctcaaagccacatgagtgcaaccatccctgagagccatagcattgggtccattgtcagaactgtttctgcaagagatagagatgcagcgatgaatggcttgattaagtacagcatttcttcaggaaatgaagaaggcatttttgcaatcaattcttctacaggtatattaacactagccaaagctcttgattatgagctatgccagaaacacgaaatgacgattagtgctatagatggaggatgggttgcaagaactggttactgcagtgtgaccgtaaatgtgattgatgtgaatgataattctccagtattcctctctgatgactatttccctactgttttggaaaatgccccaagtggaacaacagttatccacctaaatgcaacagatgctgactctggaacaaatgctgtgattgcgtatactgtacagtcatctgacagtgacctctttgtcattgaccctaacacaggagtcataaccactcaaggcttcttggattttgaaaccaagcagagctaccatcttactgtgaaagccttcaatgtccccgatgaggaaaggtgtagctttgccactgttaatatacaattaaaagggacaaatgaatatgtgccccgttttgtttccaaactttactattttgaaatctcagaagcagctcctaaaggtactattgttggagaagtgtttgctagcgaccgtgatttgggcactgatggggaggtacactatttgatttttggtaatagtcgaaagaagggtttccagatcaataagaagactggacagatttatgtttctggaattcttgatcgagaaaaagaagaaagggtgtctttgaaggtattggccaagaactttggcagcattagaggtgcagatatagatgaggtcactgtaaatgtcaccgtgcttgatgcaaatgacccacccatttttactctaaacatctacagtgtgcagatcagtgaaggggtcccaataggaactcatgtgacctttgtcagtgcctttgactcagactccatccccagctggagcaggttttcttacttcatcggatcagggaatgaaaatggtgccttttctattaatccgcagacaggacagatcaccgttactgcagaattagatcgagaaacccttcccatctataatctctcagttttggctgttgattcagggaccccctcagctacaggtagtgcctctttattagtcaccctggaagatataaatgataacgggcccatgctgactgtcagtgaaggagaagtcatggaaaacaaacggccaggcactttggtgatgacccttcagtccactgaccctgatctccctccaaatcaaggtccctttacttattacttgctgagcacaggtcctgccaccagttatttcagtctgagcactgctggagttctgagcacaaccagagagattgacagagagcagattgcagacttctatctgtctgtggttaccaaggattctggtgttcctcaaatgtcttccacaggaactgtgcatatcacagttatagaccaaaatgacaatccttcacagtctcggacggtggagatatttgttaattattatggtaacttgtttcccggtgggattttaggctctgtgaagccacaggatccagatgtgttagacagcttccactgctcccttacttcaggagttaccagcctcttcagtattccagggggtacttgtgatctgaattcccagccaaggtccacagatggcacgtttgatctgactgtccttagcaatgatggagttcacagcacagtcacgagcaacatccgagttttctttgctggattttccaatgccacagtggataacagcatcttacttcgtctcggcgtaccaacagtaaaggacttcttgaccaaccactatcttcattttttacgcattgccagctcacagctgacaggcttagggactgctgtgcaactgtacagtgcatatgaagagaacaatagaacgtttcttttggcagctgtgaagcgaaatcataatcagtatgtgaatcccagtggcgtagccaccttctttgaaagcatcaaagagatccttctccggcagagtggagtaaaggtggaatctgtggatcatgactcctgtgtgcatggcccatgtcagaatggagggagctgtctacgaagattggctgtgagctccgtattaaaaagccgtgagagtcttccagtcatcatcgtggcaaatgaacctctgcagcctttcttatgcaagtgtctgccaggatatgcgggtagctggtgtgaaatagatatagatgaatgtcttccatcaccttgccacagtggtggaacctgtcacaatttagtgggaggattttcatgcagctgcccagatggcttcactggtagggcgtgtgagagagatatcaatgagtgcctgcagagtccttgcaagaatggtgccatctgccagaattttccaggaagcttcaactgtgtttgcaaaactggatacacaggtgtctttggaaaacactgcgagttgaacagttatggatttgaggagttatcatacatggaatttccaagcttggaccccaataacaactatatttatgtcaaatttgccacgattaaaagtcatgccttattgctttacaactatgacaaccagacaggcgaccgggctgagtttttggcccttgaaattgccgaagaaagactaagattctcttataatttaggcagtggtacatataagctcaccaccatgaagaaggtgtcagatggacattttcacactgtgattgccaggagagcaggaatggcagcctccttaactgtggactcctgttctgagaaccaagagccaggatattgtactgtcagtaatgtggcagtttcagatgactggactcttgatgttcagccaaatagagttacagttggaggtatcagatctctagaaccaatccttcagagaagaggacacgtggaaagccatgattttgttgggtgtataatggagtttgcagtcaatggaaggcctctggaacccagccaagctttggcagcacaaggcatcctagatcagtatggcgattttatttcttactgttttaaagaaaaaaaatgcaaaaaagtatgcttcactgttactcctgacactgccttatcattagaaggcaaagggcgcttggactaccacatgagtcagaatgagaagcgggaatatttgttaaggcaaagcttacgaggtgccatgttggagccttttggtgtgaacagtctggaagtaaaatttaggaccagaagcgagaatggcgttttaatccatatccaagaaagcagcaattacactactgtgaagattaagaatggcaaagtatattttacatccgatgcaggaattgctgggaaagtggagagaaatattcctgaagtatatgttgcagacggccactggcacacttttctaattgggaaaaatggaacagcaacagtattgtctgttgacagaatatataacagagatattatccaccctactcaggacttcggtggccttgatgtgcttactatatcacttggaggaattccacccaatcaagcacatcgagatgcccaaacagcaggttttgatggctgcattgcttctatgtggtatggtggagaaagtcttcctttcagcgggaagcatagcttggcctccatctcaaaaacagatccctcagtgaagattggctgccgtggcccgaacatttgtgccagcaacccctgctggggtgatttgctgtgcattaatcagtggtatgcctacaggtgtgtccctcctggggactgtgcctcccacccgtgccagaatggtggcagctgtgagccaggcctgcactccggcttcacctgtagctgcccagactcgcacacgggaaggacctgtgagatggtggtggcctgtcttggcgtcctctgtcctcaggggaaggtgtgcaaagctggaagtcctgcggggcatgtctgtgttctgagtcagggccctgaagagatctctctgcctttgtgggctgtgcctgccatcgtgggcagctgcgcaaccgtcttggccctcctggtccttagcctgatcctgtgtaaccagtgcagggggaagaaggccaaaaatcccaaagaggagaagaaaccgaaggagaagaagaaaaagggaagtgagaacgttgcttttgatgaccctgacaatatccctccctatggggatgacatgactgtgaggaagcagcctgaagggaacccaaaaccagatatcattgaaagggaaaacccctaccttatctatgatgaaactgatattcctcacaactcagaaaccatccccagcgcccctttggcatctccagagcaggagatagagcactatgacattgacaacgccagcagcatcgccccttcggatgcagacatcattcaacactacaagcagttccgcagccacacaccaaaattttcaatccagaggcacagtcccctaggctttgcaaggcaatcccccatgcccttaggagcaagcagtttgacttaccagccttcatatggtcaaggtttgagaaccagctccctaagccactcagcatgcccaactcccaaccctctgtctcgacacagtccagcccctttctccaaatcttctacgttctatagaaacagcccagcaagggaattgcatcttcctataagggatggtaatactttggaaatgcatggtgacacctgccaacctggcattttcaactatgccacaaggctgggaaggagaagcaagagtcctcaggccatggcatcacatggttctagaccagggagtcgcctaaagcagccgattgggcagattccactggaatcttctcctccagtcggactttctattgaagaagtggagaggctcaacacacctcgccctagaaacccaagtatctgcagtgcagaccatgggaggtcttcttcagaggaggactgcagaaggccactgtctagaacaaggaatccagcggatggcattccagctccagaatcctcttctgatagtgactcccatgaatctttcacttgctcagaaatggaatatgacagggagaagccaatggtatatacttccagaatgcccaaattatctcaagtcaatgaatctgatgcagatgatgaagataattatggagccagactgaagcctcgaaggtaccacggtcgcagggccgagggaggacctgtgggcacccaggcagcagcaccaggcactgctgacaacacactgcccatgaagctagggcagcaagcagggactttcaactgggacaaccttttgaactggggccctggctttggccattatgtagatgtttttaaagatttggcatctcttccagaaaaagcagcagcaaatgaagaaggcaaagctgggacaactaaaccagtccccaaagatggggaagcagaacagtatgtgtga

SEQ ID NO: 25030 - DNA, 1069 bp, Homo Sapiens
tgtccctggaattctgggacactggctggggtttgaggagagaagccagtacctacctggctgcaggatgaagctggccagtggcttcttggttttgtggctcagccttgggggtggcctggctcagagcgacacgagccctgacacggaggagtcctattcagactggggccttcggcacctccggggaagctttgaatccgtcaatagctacttcgattcttttctggagctgctgggagggaagaatggagtctgtcagtacaggtgccgatatggaaaggcaccaatgcccagacctggctacaagccccaagagcccaatggctgcggctcctatttcctgggtctcaaggtaccagaaagtatggacttgggcattccagcaatgacaaagtgctgcaaccagctggatgtctgttatgacacttgcggtgccaacaaatatcgctgtgatgcaaaattccgatggtgtctccactcgatctgctctgaccttaagcggagtctgggctttgtctccaaagtggaagcagcctgtgattccctggttgacactgtgttcaacaccgtgtggaccttgggctgccgcccctttatgaatagtcagcgggcagcttgcatctgtgcagaggaggagaaggaagagttatgaggaagaagtgattccttcctggttttgagtgacaccacagctgtcagccttcaagatgtcaagtcttcgagtcagcgtgactcattcgttcttccaacagtttggacaccacaaagcaggagaaagggaacatttttctacagctggaaagtgagtcctatcctttgaggaaatttgaaaaaagacatggagtggtttgaaagctactcttcatttaagactgctctccccaaccaagacacatttgcctggaaattcagttcttagcttaaagactaaaatgcaagcaaaccctgcaattcctggacctgatagttatattcatgagtgaaattgtggggagtccagccatttgggaggcaatgactttctgctggcccatgtttcagttgccagtaagcttctcacatttaa

SEQ ID NO: 25031 - DNA, 3151 bp, Homo Sapiens
atggcccgcgggacaacatggctgcgcccgcactagggctggtgtgtggacgttgccctgagctgggtctcgtcctcttgctgctgctgctctcgctgctgtgtggagcggcagggagccaggaggccgggaccggtgcgggcgcggggtcccttgcgggttcttgcggctgcggcacgccccagcggcctggcgcccatggcaattcggcagccgctcaccgatactcgcgggaggctaacgctccgggccccgtacccggagagcggcaactcgcgcactcaaagatggtccccatccctgctggagtatttacaatgggcacagatgatcctcagataaagcaggatggggaagcacctgcgaggagagttactattgatgccttttacatggatgcctatgaagtcagtaatactgaatttgagaagtttgtgaactcaactggctatttgacagaggctgagaagtttggcgactcctttgtctttgaaggcatgttgagtgagcaagtgaagaccaatattcaacaggcagttgcagctgctccctggtggttacctgtgaaaggcgctaactggagacacccagaagggcctgactctactattctgcacaggccggatcatccagttctccatgtgtcctggaatgatgcggttgcctactgcacttgggcagggaagcggctgcccacggaagctgagtgggaatacagctgtcgaggaggcctgcataatagacttttcccctggggcaacaaactgcagcccaaaggccagcattatgccaacatttggcagggcgagtttccggtgaccaacactggtgaggatggcttccaaggaactgcgcctgttgatgccttccctcccaatggttatggcttatacaacatagtggggaacgcatgggaatggacttcagactggtggactgttcatcattctgttgaagaaacgcttaacccaaaaggtcccccttctgggaaagaccgagtgaagaaaggtggatcctacatgtgccataggtcccaagagtactatgatccctattttcaagatgtggcatctgagatgttgagaagacacacagccagcaggtggaaggccttctcatctctagaaccatgctgctcaatacgtaggcatcagcaatatgcagctattgaacgtttgacatgtggcaagtttgaattgagatgtgctagtttaagaaaaatagattgcctcaacaccaacattgcctgtagctactccatgaggcaacatggacccagactccactgtgtggactgacctcccagaaggatcctcctgtccctgaaggccactctgccttcagctacaggccccagtgctgattgtgatacttaacaagggctttcagatgtctgaaacaagagtatagcataaagttaagaatgcggcttctggagagacagacttggtttcaaattcagctctgtgaccttgggtgcacagcaaagtcttcttctccccccgatgaaagaatgggaaggactcaggaaggctcaacttgcaaactccccagtatcaagtggctgccttcaaaatccaacccttctcttcccagctcatttccagtatgtattttcaaaggccatgtcatttttgaagtgcctgagaagaaaacagaactgccagcagactatgggacaaacgactaaatgccctccagacgttccagagtcctctgcctctcaggcttcagttcttcctgaaggaatctggagctggaaagcaggaagcaatttgctgtggaattttttccatcacagactccaagttcctcagcctttggactcttgaacttacaccagtgttttggcaggagcgctcgggcctttggccacagactgaaggctgcattgtcagctttcctacttttgaggttttgggactcagactgatccaccactggcttccttgctcttcaacttgaagacggcctatcgtgagactttacctcgtgattatgtgagtcaattctcctaataaactccccttcgtatgtacatataccctattacttctgtccctttagagaaccctgactaatacagtagagattgcctggacttattaataataatgactctgtttagttaatgtaacagacagataaagacaaatgagtgacacccatgcaattaatataattttggtggggagtgagaggagttggttctccactcacagtggaaagttttagcgtatactgctgcacatgacatgggagtattttgcacttccactggaaaaaagtaaggggaataaaaacccctggattctacttgctgacttgagagtgactaaagcgatttatctgaaggttccccagggtggattcatagtggactcaggccagattctctgctgatgctttgaacttatgtccagagcatcatctccaccacaaaagagcttgcctgctctgtgtcctggccaaagagatgcacgtgctctatcactgggttgtggctcttgagtaactcctggaattacccagctggaatttctattcctttggaccacaaatttcatatcttcacctgctgcctatatcatgctaaaagatggaaatgtctcaactaaaccatgtaggtggactagcctcattaacaagataagcaatgggccattttctcactggttattaactatgtacattatctatgaaataacatatctggtcatggttactactctattctgtagggtggaatagaaaaaggtagaggatatatatttcagttgcatttttaaaattgtttattttgttttttaattgacaaataatattaggttggtgcaaaagtaattgcagtttttgccattaaaggtagacaaggctgggcacggtggctcagcacgcttgtaatcccagcactttgggaggcagaggcgggcagatcacaaggtcaggagaccgagaccatcctggctaacacggtgaaaccccatctctactaaaaatacaaaaaattagccgggtgtggtggtgggcacctgtagtcccagctactcgggaggctgaggcaggagaatggcgtgaacctgggaggtggagcttgtagtgagctgcaccactgcactccagcctgggcaacagagcaagaccccatatc

SEQ ID NO: 25032 - DNA, 2945 bp, Homo Sapiens
cggacgcgtggggcggcgagagcagctgcagttcgcatctcaggcagtacctagaggagctgccggtgcctcctcagaacatctcctgatcgctacccaggaccaggcaccaaggacagggagtcccaggcgcacaccccccattctgggtcccccaggcccagacccccactctgccacaggttgcatcttgacctggtcctcctgcagaagtggcccctgtggtcctgctctgagactcgtccctgggcgcccctgcagcccctttctatgactccatctggatttggctggctgtggggacgcggtccgaggggcggcctggctctcagcgtggtggcagccagctctctggccaccatggcaaatgctgagatctgaggggacaaggctctacagcctcagccaggggcactcagctgttgcagggtgtgatggagaacaaagctatgtacctacacaccgtcagcgactgtgacaccagctccatctgtgaggattcctttgatggcaggagcctgtccaagctgaacctgtgtgaggatggtccatgtcacaaacggcgggcaagcatctgctgtacccagctggggtccctgtcggccctgaagcatgctgtcctggggctctacctgctggtcttcctgattcttgtgggcatcttcatcttagcagggccaccgggacccaaaggtgatcagggggatgaaggaaaggaaggcaggcctggcatccctggattgcctggacttcgaggtctgcccggggagagaggtaccccaggattgcccgggcccaagggcgatgatgggaagctgggggccacaggaccaatgggcatgcgtgggttcaaaggtgaccgaggcccaaaaggagagaaaggagagaaaggagacagagctggggatgccagtggcgtggaggccccgatgatgatccgcctggtgaatggctcaggtccgcacgagggccgcgtggaagtgtaccacgaccggcgctggggcaccgtgtgtgacgacggctgggacaagaaggacggagacgtggtgtgccgcatgctcggcttccgcggtgtggaggaggtgtaccgcacagctcgattcgggcaaggcactgggaggatctggatggatgacgttgcctgcaagggcacagaggaaaccatcttccgctgcagcttctccaaatggggggtgacaaactgtggacatgccgaagatgccagcgtgacatgcaacagacactgaaagtgggcagagcccaagttcggggtcctgcacagagcacccttgctgcatccctggggtggggcacagctcggggccaccctgaccatgcctcgaccacaccccgtccagcattctcagtcctcacacctgcatcccaggaccgtgggggccggtcgtcatttccctcttgaacatgtgctccgaagtataactctgggacctactgcccgtctctctcttccaccaggttcctgcatgaggagccctgatcaactggatcaccactttgcccagcctctgaacaccatgcaccaggcctcaatatcccagttccctttggccttttagttacaggtgaatgctgagaatgtgtcagagacaagtgcagcagcagcgatggttggtagtatagatcatttactcttcagacaattcccaaacctccattagtccaagagtttctacatcttcctccccagcaagaggcaacgtcaagtgatgaatttcccccctttactctgcctctgctccccatttgctagtttgaggaagtgacatagaggagaagccagctgtaggggcaagagggaaatgcaagtcacctgcaggaatccagctagatttggagaagggaatgaaactaacattgaatgactaccatggcacgctaaatagtatcttgggtgccaaattcatgtatccacttagctgcattggtccagggcatgtcagtctggatacagccttaccttcaggtagcacttaactggtccattcacctagactgcaagtaagaagacaaaatgactgagaccgtgtgcccacctgaacttattgtctttacttggcctgagctaaaagcttgggtgcaggacctgtgtaactagaaagttgcctacttcagaacctccagggcgtgagtgcaaggtcaaacatgactggcttccaggccgaccatcaatgtaggaggagagctgatgtggagggtgacatgggggctgcccatgttaaacctgagtccagtgctctggcattgggcagtcacggttaaagccaagtcatgtgtgtctcagctgtttggaggtgatgattttgcatcttccaagcctcttcaggtgtgaatctgtggtcaggaaaacacaagtcctaatggaacccttaggggggaaggaaatgaagattccctataacctctgggggtggggagtaggaataaggggccttgggcctccataaatctgcaatctgcaccctcctcctagagacagggagatcgtgttctgctttttacatgaggagcagaactgggccatacacgtgttcaagaactaggggagctacctggtagcaagtgagtgcagacccacctcaccttgggggaatctcaaactcataggcctcagatacacgatcacctgtcatatcaggtgagcactggcctgcttggggagagacctgggcccctccaggtgtaggaacagcaacactcctggctgacaactaagccaatatggccctaggtcattcttgcttccaatatgcttgccactccttaaatgtcctaatgatgagaaactctctttctgaccaattgctatgtttacataacacgcatgtactcatgcatcccttgccagagcccatatatgtatgcatatataaacatagcactttttactacatagctcagcacattgcaaggtttgcatttaagtt

SEQ ID NO: 25033 - DNA, 943 bp, Homo Sapiens
ctgggacttggctttctccggataagcggcggcaccggcgtcagcgatgaccgtgcagagactcgtggccgcggccgtgctggtggccctggtctcactcatcctcaacaacgtggcggccttcacctccaactgggtgtgccagacgctggaggatgggcgcaggcgcagcgtggggctgtggaggtcctgctggctggtggacaggacccggggagggccgagccctggggccagagccggccaggtggacgcacatgactgtgaggcgctgggctggggctccgaggcagccggcttccaggagtcccgaggcaccgtcaaactgcagttcgacatgatgcgcgcctgcaacctggtggccacggccgcgctcaccgcaggccagctcaccttcctcctggggctggtgggcctgcccctgctgtcacccgacgccccgtgctgggaggaggccatggccgctgcattccaactggcgagttttgtcctggtcatcgggctcgtgactttctacagaattggcccatacaccaacctgtcctggtcctgctacctgaacattggcgcctgccttctggccacgctggcggcagccatgctcatctggaacattctccacaagagggaggactgcatggccccccgggtgattgtcatcagccgctccctgacagcgcgctttcgccgtgggctggacaatgactacgtggagtcaccatgctgagtcgcccttctcagcgctccatcaacgcacacctgctatcgtggaacagcctagaaaccaagggactccaccaccaagtcacttcccctgctcgtgcagaggcacgggatgagtctgggtgacctctgcgccatgcgtgcgagacacgtgtgcgtttactgttatgtcggtcatatgtctgtacgtgtcgtgggccaacctcgttctgcctccagc

SEQ ID NO: 25034 - DNA, 1462 bp, Homo Sapiens
aacacaggctggctgtgaagatgaacattaatccatgcctggtgctttgtgagtgctcactgagtattagccttgatgcagacccactggtttctccttttgccactgggccctgccctggagctcccagggaggtggtggcgatgcagagcgacgtgggtcagggattccccatgcagtccaactggagggctcccgtgcatgcgtgcacatcaggggcggtaaggaagggctggccggggtgtgggaggaggcgacacaagatgggaggtggccctgtctcttgggagcaaaggcagaaggaggtggaggcagctcagggctcggaggagaggggtccgggctccttggctgtgtccctgctgtctctcgctgtgggtattcaccgaatctctcccatcctcggttttcacatctgctgcatgcaggtcctcatggttctcaagtgaggcaggtggtgagcccatcaggccagtgcccagggcttattctggggacagctcctggagaggaagggctgcctccctaaggactcctgccctgccctgggtgcaaggggttccacctgctgcccctcccccactccccagctcgcctcaggcggatagttcccctctcactccaaataagagccacaatgctgacagtggcccccaaggccctgcccagcggtccccagcttcctctagctacatctcccggccctccccttcacccactcctgtaggcgcctcgaacgcgcctcagccctgctcctcccctgcctgcagcgttcctccccaggtctcccccggctctctcacctgcttccggttttgctcagactgcgctgcctcagtgcgcccttctgtcaccatcctgtgtatagtcggaaacccctgctccctttccctgcactgaatcttccgtgtgctccttttctccatggcatttgttagctttggctatcctgtctaatttgcgtatgtatttattttttattttgctgcctgttccctcattcccccaactccccaatggcagggagttctgttttggtcactgctgaatccctggtgacctgagcagtgatgatgcagagttgttgtgatatttgtggaatgaatgaatgcaggattttttgttttaccttcacttggcacaaatgctgtggttctgttcaccactcccccctgaagtaatgaaagctatgggcccatccctgtgctgagtggagctggggacacagtgggggctaggacagactgtatccctgccttgtggaacccacagtccagtgggagaggcgacattacccacatagtcatgcaggtgacagagcctgcccacggcttcaacctgcctccagccccacctgctccaagcagacagatggggcgagtgtagggagtgtgtttaaaagaaaaaagaaacaaaaagtctctctcttttttttttttgaagtacccagaccttttcagga

SEQ ID NO: 25035 - DNA, 2052 bp, Homo Sapiens
  misc_feature (1667)..(1667): n is a, c, g, or t
gcacctttgggcccagggtgaccggatcctgggtcccaaggagagaagccccaggtccccgacccttcctgctcttcctgcccggccttggaagccaggcccatctctctggggtccgtctgtcgcgtggcggagaggctgggtgtggatggtgacccagagcaccggggtgggggtgagtgtccgaggagtacccaggtccagaggcccctcttgcggggaaggtgacccacagcccctggcgcgggcaggcagctggcacaggataaggccagaggggcagcagggagaaccggctgggcgagttgtcagcagaatccagggctgggccctgggcaccactggctccaggctttcccgaggccccaggcggggtagcctcacctgggggccacctgactctgctagaggaccccagggtgctgccccatgccaggccccagggacatgagccaggatctggagccggaagcctcagctagctgcagcccctacctctgggtagggtctctgagggagggcctcctccttcctcctgtcctccaaccagactcggcccatgtccaaggaatctgtccaggccagcaaaggtggggatggggccagccccaagggatggatgaggcactcatggaagcagatggcacagtgaggcagcaatggctgcactgagccgggcactgggtccactcagaaccccagctcctcctctgtggattgggctcttcctagtagccacaggaagtcaacaaagcttggcccagcccttgccaggaaacaccacagaggccacaccacgaagtctgagggcctccgggtccttgtgtggaccccatgctaaagcaccatacctgtgcgaggccacccatgaacctgctgcagccaggattcgtgcccaagtccccgacacgcgctggagcagggttgggggtcagcggttctacagccgtgtcctgagccccctgcaccgtggaccctcagggcacactgaggcctctgctcagaggtcccacatggggaagctgaaggagccgcagcctcaggaccacaagccagggttaggtgcttcctaacctctttgcttcagagagggccgggagtggtggctcatgcctgtaatcccagcacattgggaggctgaggagggaggattgcttgagcccaggagttcgagaccagccagaaaaacaaggtgaaaccacgtctctgcaaaaaatacaaaaattagccaggtgtggtggtgcacgcctgtggtctcagctactctggaggctgaggcagaaggattgcttgagcccaggaggtcgaggctgcagtgagctatgattacaccactgcactccagcctgggcgatagagtgagaccctgtctcaaaaataaaaatacaaaaatataattcacataccatacaatttcccttcaaggccaggcgcggtggctcatgcctgaatcccmrgcactttgggaggccaagaagggaggatcacttaagcccaggagttcaagaccagccagaaaaacaaggtgaagccacgtctatgcaagaaatacaaaaattagccgagtgtgatggtgcacacctgtggtcccagctactctggaggctgaggtggaagtattgcttgagcccaggaggtcgaggctgccgtgagctatgattgcaccnctgcactccagcctgggtgacagagtgagaccctttctcagaaatgaaaataaatgtaattcacacaccatataattgctcttcaaagccaggtgcggcagctcatgcctgtaatgctcccagcattttgggaggccaaggcaggtggatcacgaggtcaagagattgagaccatcctggccaacatggtgactagtaaaaatacaaaaattagctgggcgtggtggtgcacgcctatagtcccagctactcaggaagctgtagcaggagaatcacttaaacctggggggaggtgaaggttgcagtaagccgagatggtgccactgcactccagcctgggcaacagggcaagactccatgtcaaaagaaaaaaaaaaaaaaaaaa

SEQ ID NO: 25036 - DNA, 1380 bp, Homo Sapiens
ccgggtcgacaatacgttgcagcaaggggtgatcgaggggtatttgcatggcgcgcatagtatccatacgcctgtgaatccgacagagccaccgagcgtctgactgcactttagtcaggtgactgataggacttctcgacaaatcctacgcccgacacggacaatagtggccgactgacaggagtccatatgcgtcgtttgtttttttccttgctgatgttctgcgttttgcccgcctgggcagacggccatgaccagttgtacaaggtcgccggctgggccgaacaacgtgcgcatttcaatgacgccctcagcgccgcccagcagcgctaccgcaacagcctgccgccggcggtgtaccaggcgctggtggacaacagcaataaacgctttgccgccaaggcggtggaccagcgtgccgaagcacagttgcgcaaaaacctggcggaccctaagccggccctggcgtttttccaatcgccccttggccgcaagattgtcgccgccgagttgctcgccacgcgccgtgatcaattggcgaaaaacgcccaaggcctgccgaaaatcgaagccgacgcgactcgcagcctgatcatcggccacctggcccaggccctgccggcccgtgaagccggcgcggaagtcagcctggcgattgctggtgtggcggccgatagtctgagccagatgattcccggcctgttgggcggcgggcaggcccaaggcatgttgaacggccagcgtgagcggttgatgcagcagatcgacaaagatctgaacaacacgctgctgtacgtctatcgggatttgtccgacccggagctggaagaattcgcgacgtttgccgagtcgccggagggcaaggcgtattaccaggcggcccttgccgctattcgtgccgggctggctgtcggccaaagcacctcaagcctcgccccctgaccccttgtaggcgctggcttgcctgctcctacagtggggtgagtcaggtcaggtggtgggtgagatagctgaagtattgctggcgaatctctggaatctcattggccaggtgatgcctgccacgcggcagcatcaacacctcgggctggtcgaacttgctccgtagcacctgcaggttgtgctgccagtccaccgtcatatcttcctcaccctgcacaatcaccggccgacgtgggctacgcggtgcggcttcgatgcgtttgatccagcgcgccaaggcgccgacccaggcggtcggcagttggcgcggctgcagcgggtcggcttccaggaacggcttgaacgccggatcgtgggtgttctcgctgaatcgccgcgcaatgcctttgacgaacgggcgcagcaggtaatagctgacctgcgaccacccccaggcac

SEQ ID NO: 25037 - DNA, 3402 bp, Homo Sapiens
gccgccccgccccgagaccgggcccgggggcgcggggcggcgggatgcggcgcccggggcggcgatgaccgcggagcgcacgccgcgggcccggccctgaccccgccgcccgcccgctgagccccccgccgaggtccggacaggccgagatgacgccgagccccctgttgctgctcctgctgccgccgctgctgctgggggccttcccaccggccgccgccgcccgaggccccccaaagatggcggacaaggtggtcccacggcaggtggcccggctgggccgcactgtgcggctgcagtgcccagtggagggggacccgccgccgctgaccatgtggaccaaggatggccgcaccatccacagcggctggagccgcttccgcgtgctgccgcaggggctgaaggtgaagcaggtggagcgggaggatgccggcgtgtacgtgtgcaaggccaccaacggcttcggcagcctgagcgtcaactacaccctcgtcgtgctggatgacattagcccagggaaggagagcctggggcccgacagctcctctgggggtcaagaggaccccgccagccagcagtgggcacgaccgcgcttcacacagccctccaagatgaggcgccgggtgatcgcacggcccgtgggtagctccgtgcggctcaagtgcgtggccagcgggcaccctcggcccgacatcacgtggatgaaggacgaccaggccttgacgcgcccagaggccgctgagcccaggaagaagaagtggacactgagcctgaagaacctgcggccggaggacagcggcaaatacacctgccgcgtgtcgaaccgcgcgggcgccatcaacgccacctacaaggtggatgtgatccagcggacccgttccaagcccgtgctcacaggcacgcaccccgtgaacacgacggtggacttcggggggaccacgtccttccagtgcaaggtgcgcagcgacgtgaagccggtgatccagtggctgaagcgcgtggagtacggcgccgagggccgccacaactccaccatcgatgtgggcggccagaagtttgtggtgctgcccacgggtgacgtgtggtcgcggcccgacggctcctacctcaataagctgctcatcacccgtgcccgccaggacgatgcgggcatgtacatctgccttggcgccaacaccatgggctacagcttccgcagcgccttcctcaccgtgctgccagacccaaaaccgccagggccacctgtggcctcctcgtcctcggccactagcctgccgtggcccgtggtcatcggcatcccagccggcgctgtcttcatcctgggcaccctgctcctgtggctttgccaggcccagaagaagccgtgcacccccgcgcctgcccctcccctgcctgggcaccgcccgccggggacggcccgcgaccgcagcggagacaaggaccttccctcgttggccgccctcagcgctggccctggtgtggggctgtgtgaggagcatgggtctccggcagccccccagcacttactgggcccaggcccagttgctggccctaagttgtaccccaaactctacacagacatccacacacacacacacacacactctcacacacactcacacgtggagggcaaggtccaccagcacatccactatcagtgctagacggcaccgtatctgcagtgggcacgggggggccggccagacaggcagactgggaggatggaggacggagctgcagacgaaggcaggggacccatggcgaggaggaatggccagcaccccaggcagtctgtgtgtgaggcatagcccctggacacacacacacagacacacacactacctggatgcatgtatgcacacacatgcgcgcacacgtgctccctgaaggcacacgtacgcacacgcacatgcacagatatgccgcctgggcacacagataagctgcccaaatgcacgcacacgcacagagacatgccagaacatacaaggacatgctgcctgaacatacacacgcacacccatgcgcagatgtgctgcctggacacacacacacacacggatatgctgtctggacgcacacacgtgcagatatggtatccggacacacacgtgcacagatatgctgcctggacacacagataatgctgccttgacacacacatgcacggatattgcctggacacacacacacacacacgcgtgcacagatatgctgtctggacacgcacacacatgcagatatgctgcctggacacacacttccagacacacgtgcacaggcgcagatatgctgcctggacacacgcagatatgctgtctagtcacacacacacgcagacatgctgtccggacacacacacgcatgcacagatatgctgtccggacacacacacgcacgcagatatgctgcctggacacacacacagataatgctgcctcaacactcacacacgtgcagatattgcctggacacacacatgtgcacagatatgctgtctggacatgcacacacgtgcagatatgctgtccggatacacacgcacgcacacatgcagatatgctgcctgggcacacacttccggacacacatgcacacacaggtgcagatatgctgcctggacacacacacagataatgctgcctcaacactcacacacgtgcagatattgcctggacacacacatgtgcacagatatgctgtctggacatgcacacacgtgcagatatgctgtccggatacacacgcacgcacacatgcagatatgctgcctgggcacacacttccggacacacatgcacacacaggtgcagatatgctgcctggacacacgcagactgacgtgcttttgggagggtgtgccgtgaagcctgcagtacgtgtgccgtgaggctcatagttgatgagggactttccctgctccaccgtcactcccccaactctgcccgcctctgtccccgcctcagtccccgcctccatccccgcctctgtcccctggccttggcggctatttttgccacctgccttgggtgcccaggagtcccctactgctgtgggctggggttgggggcacagcagccccaagcctgagaggctggagcccatggctagtggctcatccccagtgcattctccccctgacacagagaaggggccttggtatttatatttaagaaatgaagataatattaataatgatggaaggaagactgggttgcagggactgtggtctctcctggggcccgggacccgcctggtctttcagccatgctgatgaccacaccccgtccaggccagacaccaccccccaccccactgtcgtggtggccccagatctctgtaattttatgtagagtttgagctgaagccccgtatatttaatttattttgttaaacacaaaa

SEQ ID NO: 25038 - DNA, 1998 bp, Homo Sapiens
cgggccgcccccggcccccattcgggccgggcctcgctgcggcggcgactgagccaggctgggccgcgtccctgagtcccagagtcggcgcggcgcggcaggggcagccttccaccacggggagcccagctgtcagccgcctcacaggaagatgctgcgtcggcggggcagccctggcatgggtgtgcatgtgggtgcagccctgggagcactgtggttctgcctcacaggagccctggaggtccaggtccctgaagacccagtggtggcactggtgggcaccgatgccaccctgtgctgctccttctcccctgagcctggcttcagcctggcacagctcaacctcatctggcagctgacagataccaaacagctggtgcacagctttgctgagggccaggaccagggcagcgcctatgccaaccgcacggccctcttcccggacctgctggcacagggcaacgcatccctgaggctgcagcgcgtgcgtgtggcggacgagggcagcttcacctgcttcgtgagcatccgggatttcggcagcgctgccgtcagcctgcaggtggccgctccctactcgaagcccagcatgaccctggagcccaacaaggacctgcggccaggggacacggtgaccatcacgtgctccagctaccagggctaccctgaggctgaggtgttctggcaggatgggcagggtgtgcccctgactggcaacgtgaccacgtcgcagatggccaacgagcagggcttgtttgatgtgcacagcgtcctgcgggtggtgctgggtgcgaatggcacctacagctgcctggtgcgcaaccccgtgctgcagcaggatgcgcacrgctctgtcaccatcacagggcagcctatgacattccccccagaggccctgtgggtgaccgtggggctgtctgtctgtctcattgcactgctggtggccctggctttcgtgtgctggagaaagatcaaacagagctgtgaggaggagaatgcaggagctgaggaccaggatggggagggagaaggctccaagacagccctgcagcctctgaaacactctgacagcaaagaagatgatggacaagaaatagcctgaccatgaggaccagggagctgctacccctccctacagctcctaccctctggctgcaatggggctgcactgtgagccctgcccccaacagatgcatcctgctctgacaggtgggctccttctccaaaggatgcgatacacagaccactgtgcagccttatttctccaatggacatgattcccaagtcatcctgctgccttttttcttatagacacaatgaacagaccacccacaaccttagttctctaagtcatcctgcctgctgccttatttcacagtacatacatttcttagggacacagtacactgaccacatcaccaccctcttcttccagtgctgcgtggaccatctggctgccttttttctccaaaagatgcaatattcagactgactgaccccctgccttatttcaccaaagacacgatgcatagtcaccccggccttgtttctccaatggccgtgatacactagtgatcatgttcagccctgcttccacctgcatagaatcttttcttctcagacagggacagtgcggcctcaacatctcctggagtctagaagctgtttcctttcccctccttcctccctgccccaagtgaagacagggcagggccaggaatgctttggggacaccgaggggactgccccccacccccaccatggtgctattctggggctggggcagtcttttcctggcttgcctctggccagctcctggcctctggtagagtgagacttcagacgttctgatgccttccggatgtcatctctccctgccccaggaatggaagatgtgaggacttctaatttaaatgtgggactcggagggattttgtaaactgggggtatattttggggaaaataaatgtctttgtaaaaaaaaaaaaaaaaaaaaaa

SEQ ID NO: 25039 - DNA, 2110 bp, Homo Sapiens
cttctttgaaaaggattatcacctgatcaggttctctctgcatttgcccctttagattgtgaaatgtggctcaaggtcttcacaactttcctttcctttgcaacaggtgcttgctcggggctgaaggtgacagtgccatcacacactgtccatggcgtcagaggtcaggccctctacctacccgtccactatggcttccacactccagcatcagacatccagatcatatggctatttgagagaccccacacaatgcccaaatacttactgggctctgtgaataagtctgtggttcctgacttggaataccaacacaagttcaccatgatgccacccaatgcatctctgcttatcaacccactgcagttccctgatgaaggcaattacatcgtgaaggtcaacattcagggaaatggaactctatctgccagtcagaagatacaagtcacggttgatgatcctgtcacaaagccagtggtgcagattcatcctccctctggggctgtggagtatgtggggaacatgaccctgacatgccatgtggaagggggcactcggctagcttaccaatggctaaaaaatgggagacctgtccacaccagctccacctactccttttctccccaaaacaatacccttcatattgctccagtaaccaaggaagacattgggaattacagctgcctggtgaggaaccctgtcagtgaaatggaaagtgatatcattatgcccatcatatattatggaccttatggacttcaagtgaattctgataaagggctaaaagtaggggaagtgtttactgttgaccttggagaggccatcctatttgattgttctgctgattctcatccccccaacacctactcctggattaggaggactgacaatactacatatatcattaagcatgggcctcgcttagaagttgcatctgagaaagtagcccagaagacaatggactatgtgtgctgtgcttacaacaacataaccggcaggcaagatgaaactcatttcacagttatcatcacttccgtaggactggagaagcttgcacagaaaggaaaatcattgtcacctttagcaagtataactggaatatcactatttttgattatatccatgtgtcttctcttcctatggaaaaaatatcaaccctacaaagttataaaacagaaactagaaggcaggccagaaacagaatacaggaaagctcaaacattttcaggccatgaagatgctctggatgacttcggaatatatgaatttgttgcttttccagatgtttctggtgtttccaggattccaagcaggtctgttccagcctctgattgtgtatcggggcaagatttgcacagtacagtgtatgaagttattcagcacatccctgcccagcagcaagaccatccagagtgaactttcatgggctaaacagtacattcgagtgaaattctgaagaaacattttaaggaaaaacagtggaaaagtatattaatctggaatcagtgaagaaaccaggaccaacacctcttactcattattcctttacatgcagaatagaggcatttatgcaaattgaactgcaggtttttcagcatatacacaatgtcttgtgcaacagaaaaacatgttggggaaatattcctcagtggagagtcgttctcatgctgacggggagaacgaaagtgacaggggtttcctcataagttttgtatgaaatatctctacaaacctcaattagttctactctacactttcactatcatcaacactgagactatcctgtctcacctacaaatgtggaaactttacattgttcgatttttcagcagactttgttttattaaatttttattagtgttaagaatgctaaatttatgtttcaattttatttccaaatttctatcttgttatttgtacaacaaagtaataaggatggttgtcacaaaaacaaaactatgccttctcttttttttcaatcaccagtagtatttttgagaagacttgtgaacacttaaggaaatgactattaaagtcttatttttatttttttcaaggaaagatggattcaaataaattattctgtttttgcttttaaaaaaaaaaaaaa

SEQ ID NO: 25040 - DNA, 1915 bp, Homo Sapiens
ggcaacatggctcagcaggcttgccccagagccatggcaaagaatggacttgtaatttgcatcctggtgatcaccttactcctggaccagaccaccagccacacatccagattaaaagccaggaagcacagcaaacgtcgagtgagagacaaggatggagatctgaagactcaaattgaaaagctctggacagaagtcaatgccttgaaggaaattcaagccctgcagacagtctgtctccgaggcactaaagttcacaagaaatgctaccttgcttcagaaggtttgaagcatttccatgaggccaatgaagactgcatttccaaaggaggaatcctggttatccccaggaactccgacgaaatcaacgccctccaagactatggtaaaaggagcctgccaggtgtcaatgacttttggctgggcatcaatgacatggtcacggaaggcaagtttgttgacgtcaacggaatcgctatctccttcctcaactgggaccgtgcacagcctaacggtggcaagcgagaaaactgtgtcctgttctcccaatcagctcagggcaagtggagtgatgaggcctgtcgcagcagcaagagatacatatgcgagttcaccatccctaaataggtctttctccaatgtgtcctccaagcaagattcatcataacttataggttcatgatctctaagatcaagtaaaaatcataatttttacttattaaaaaattgcaacacaagatcaatgtccatagcaatatgatagcatcagccaattttgctaacacatttctttgggattttgcccttcctggggtataggggatcagaaatattgatccatgtgcacgcagataaaatggcttctgctaaacagactaaaatctttctctctagtctttctcacttgtacaaacccagtttgttttcaaaaaatcacagtagcaatgcaactcatcactctagaaaagcaagcttaggctacctgaaagattttcccttggaagtttagcgtatgtttgactaacaaaaattccctacatcagagactctaggtgctatataatccaaaaacttttcagcctgttgctcattctgtcccatgctggcaataataccttgtcagcccattacccttattttgaattgctccatctcctggtgggacttgtatcttgtctgccatatcagaacacaaacccctgaagaggttctgatttgattttttttttttcttcatgcctaccctttttttggaagtttccagccgcaatttgaaatgaaatgacaaggtgtatatttgatcaattttcattcccaccattgcattacaacctctaacttaaatgggtaaccctaaggcatatcaaagaagcagattgcatgataaacggaaatagaaaaaaagaacctacatttattttgctttagcatccttactctcaccttttatgagattgagagtggacttacatttccttttttacattttcgtatatttattttttttagccatcattatatgtttaagtctattatgggcaaccaatctttggaagctgaaaactgaatttaaagaatgctatcttggaaaattgcatacgtctgtgcaattttttattctgcctagtgctattctgcttgtttaactagattgtacaaaataacttcattgcttaatatcaaattacaaagtttagacttggagggaaatgggctttttagaagcaaacaattttaaatatattttgttcttcaaataaatagtgtttaaacattgaatgtgttttgtgaacaatatcccactttgcaaactttaactacacatgcttggaattaagttttagctgttttcattgctcaataataaagcctgaattctgatcaataaaaaaaaaaaaaaaaaaaaaaaaaaaaa

SEQ ID NO: 25041 - DNA, 2737 bp, Homo Sapiens
ggctgcgcccaggccggcgggcccagcagctgcgaaccgccggcgcaccacctgtttccgcgcccggggacttccccggcggggctcagaagtgtggggtcggtcgcttggcttcccctggcgtcagcgacccagggtaacctcctccactgctgcgtgccgtgcaggcctgcctgtgtgagagccacgtgtgccgcgctctgggcacagccttggaaagtcaggaccgcgacggcagcagagcagaaaccttacagaaacatgaagccctcaaccatctgctactcagttattcggggctgacggcggcttctagaacatccaggtgttctgcagatgcgagaactcatcctgtagtcaccagatggagtcccaaacagccaagcagatgtaaggcctgtgctgtggctctgaggccctgaatacagaagggtcactttcttagtggccaaagagcagttgttgacattgatgtctaattattgaacacgaccagtcattttactgagctgcagtgaggaaacactgaccatagaagatcaagccaaatgagggattgcaaatttcctgattcttttgaattaggattccagatgggggcctcatttctacagcccccaacattcctatagccgttatcactgccatcaccactgccaccagcatcttcttgcagattccacccctgctccccagagacttcctgctttgaaagtgagcagaaaggaagctctcagaaaaatctctagtggtggctgccgtcgctccagacaatcggaatcctgccttcaccaccatgggctggctttttctaaaggttttgttggcgggagtgagtttctcaggatttctttatcctcttgtggatttttgcatcagtgggaaaacaagaggacagaagccaaactttgtgattattttggccgatgacatggggtggggtgacctgggagcaaactgggcagaaacaaaggacactgccaaccttgataagatggcttcggagggaatgaggtttgtggatttccatgcagctgcctccacctgctcaccctcccgggcttccttgctcaccggccggcttggccttcgcaatggagtcacacgcaactttgcagtcacttctgtgggaggccttccgctcaacgagaccaccttggcagaggtgctgcagcaggcgggttacgtcactgggataataggcaaatggcatcttggacaccacggctcttatcaccccaacttccgtggttttgattactactttggaatcccatatagccatgatatgggctgtactgatactccaggctacaaccaccctccttgtccagcgtgtccacagggtgatggaccatcaaggaaccttcaaagagactgttacactgacgtggccctccctctttatgaaaacctcaacattgtggagcagccggtgaacttgagcagccttgcccagaagtatgctgagaaagcaacccagttcatccagcgtgcaagcaccagcgggaggcccttcctgctctatgtggctctggcccacatgcacgtgcccttacctgtgactcagctaccagcagcgccacggggcagaagcctgtatggtgcagggctctgggagatggacagtctggtgggccagatcaaggacaaagttgaccacacagtgaaggaaaacacattcctctggtttacaggagacaatggcccgtgggctcagaagtgtgagctagcgggcagtgtgggtcccttcactggattttggcaaactcgtcaagggggaagtccagccaagcagacgacctgggaaggagggcaccgggtcccagcactggcttactggcctggcagagttccagttaatgtcaccagcactgccttgttaagcgtgctggacatttttccaactgtggtagccctggcccaggccagcttacctcaaggacggcgctttgatggtgtggacgtctccgaggtgctctttggccggtcacagcctgggcacagggtgctgttccaccccaacagcggggcagctggagagtttggagccctgcagactgtccgcctggagcgttacaaggccttctacattaccggtggagccagggcgtgtgatgggagcatggtgcctgagctgcagcataagtttcctctgattttcaacctggaagacgataccgcagaagctgtgcccctagaaagaggtggtgcggagtaccaggctgtgctgcccgaggtcagaaaggttcttgcagacgtcctccaagacattgccaacgacaacatctccagcgcagattacactcaggacccttcagtaactccctgctgtaatccctaccaaattgcctgccgctgtcaagccgcataacagaccaatttttattccacgaggaggagtacctggaaattaggcaagtttgcttccaaatttcatttttaccctctttacaaacacacgctttagtttagtcttggagtttagttttggagttagccttgcatatcccttctgtatcctgtcccccctccacgccgacccgagagcagctgagctgcgctggctctgggcagggagtgtgccttaatgggaagcacacgggctttggagtcaggcacaggtgccagctccagcttttgaacttgggcaattgtttaacctaacctgcaagttgattttgagggttaaataaaggcatacatgaaaatgcctggcaactttaaaaaaaaaaaa

SEQ ID NO: 25042 - DNA, 2579 bp, Homo Sapiens
cctgtgttaagctgaggtttcccctagatctcgtatatccccaacacatacctccacgcacacacatccccaagaacctcgagctcacaccaacagacacacgcgcgcatacacactcgctctcgcttgtccatctccctcccgggggagccggcgcgcgctcccacctttgccgcacactccggcgagccgagcccgcagcgctccaggattctgcggctcggaactcggattgcagctctgaacccccatggtggttttttaaacacttcttttccttctcttcctcgttttgattgcaccgtttccatctgggggctagaggagcaaggcagcagccttcccagccagcccttgttggcttgccatcgtccatctggcttataaaagtttgctgagcgcagtccagagggctgcgctgctcgtcccctcggctggcagaagggggtgacgctgggcagcggcgaggagcgcgccgctgcctctggcgggctttcggcttgaggggcaaggtgaagagcgcaccggccgtggggtttaccgagctggatttgtatgttgcaccatgccttcttggatcggggctgtgattcttcccctcttggggctgctgctctccctccccgccggggcggatgtgaaggctcggagctgcggagaggtccgccaggcgtacggtgccaagggattcagcctggcggacatcccctaccaggagatcgcaggggaacacttaagaatctgtcctcaggaatatacatgctgcaccacagaaatggaagacaagttaagccaacaaagcaaactcgaatttgaaaaccttgtggaagagacaagccattttgtgcgcaccacttttgtgtccaggcataagaaatttgacgaatttttccgagagctcctggagaatgcagaaaagtcactaaatgatatgtttgtacggacctatggcatgctgtacatgcagaattcagaagtcttccaggacctcttcacagagctgaaaaggtactacactgggggtaatgtgaatctggaggaaatgctcaatgacttttgggctcggctcctggaacggatgtttcagctgataaaccctcagtatcacttcagtgaagactacctggaatgtgtgagcaaatacactgaccagctcaagccatttggagacgtgccccggaaactgaagattcaggttacccgcgccttcattgctgccaggacctttgtccaggggctgactgtgggcagagaagttgcaaaccgagtttccaaggtcagcccaaccccagggtgtatccgtgccctcatgaagatgctgtactgcccatactgtcgggggcttcccactgtgaggccctgcaacaactactgtctcaacgtcatgaagggctgcttggcaaatcaggctgacctcgacacagagtggaatctgtttatagatgcaatgctcttggtggcagagcgactggaggggccattcaacattgagtcggtcatggacccgatagatgtcaagatttctgaagccattatgaacatgcaagaaaacagcatgcaggtgtctgcaaaggtctttcagggatgtggtcagcccaaacctgctccagccctcagatctgcccgctcagctcctgaaaattttaatacacgtttcaggccctacaatcctgaggaaagaccaacaactgctgcaggcacaagcttggaccggctggtcacagacataaaagagaaattgaagctctctaaaaaggtctggtcagcattaccctacactatctgcaaggacgagagcgtgacagcgggcacgtccaacgaggaggaatgctggaacgggcacagcaaagccagatacttgcctgagatcatgaatgatgggctcaccaaccagatcaacaatcccgaggtggatgtggacatcactcggcctgacactttcatcagacagcagattatggctctccgtgtgatgaccaacaaactaaaaaacgcctacaatggcaatgatgtcaatttccaggacacaagtgatgaatccagtggctcagggagtggcagtgggtgcatggatgacgtgtgtcccacggagtttgagtttgtcaccacagaggcccccgcagtggatcccgaccggagagaggtggactcttctgcagcccagcgtggccactccctgctctcctggtctctcacctgcattgtcctggcactgcagagactgtgcagataatcttgggtttttggtcagatgaaactgcattttagctatctgaatggccaactcacttcttttcttacactcttggacaatggaccatgccacaaaaacttaccgttttctatgagaagagagcagtaatgcaatctgcctccctttttgttttcccaaagagtaccgggtgccagactgaactgcttcctctttccttcagctatctgtggggaccttgtttattctagagagaattcttactcaaatttttcgtaccaggagattttcttaccttcatttgcttttatgctgcagaagtaaaggaatctcacgttgtgagggttttttttttctcatttaaaat

SEQ ID NO: 25043 - DNA, 2048 bp, Homo Sapiens
cggggtgtacgaaagagaaacccggagggcgccggggactgggccggggtctgcagggctcagctgagcccatgagctcccagagctaacccctgaacacccaggcgggcaaagggctgatgtcggtagtccccatcctggaggggcaggctctgcgcatctgctcctggcatggcgctgcggcacctcgccctcctggctggccttctcgtgggagtcgccagcaagtccatggagaacacggcccagctgcccgagtgctgtgtggatgtggtgggcgtcaacgccagctgcccaggcgcaagtctgtgtggtccaggctgttacaggcgctggaacgcggacgggagcgccagctgcgtccgctgtgggaacggaaccctcccagcctacaacggctccgagtgtagaagctttgctggcccgggtgcgccattccccatgaacagaagctcagggacccccgggcggccacatcctggggctccgcgcgtggccgcctccctcttcctgggcacgttcttcattagctccggcctcatcctctccgtagctgggttcttctacctcaagcgctccagtaaactccccagggcctgctacagaagaaacaaagctccggccctgcagcctggcgaagccgctgcaatgatccccccgccacagtcctcagacgtggggtctgcaggaaaggaggacccaccacgacagggcagacccccaatacctgctcctccttgaagtccagctccacccgaggacagacgcagccggcctccgccaggccctcctgagcagccatcgcttcagtggtgctgggtcaggcggacccaagagtcagcccgtacggaagccgcgctacgtcaggcgggagcggcccctggacagggccacggatcccgctgccttcccgggggaggcccgtatcagcaatgtctgacctggaggccgagaccacgccacgcacttggcggcagggacccggaggccgaccccttggcgggaaccagcacaaagtgttggcatcgcccggcgcccgggacagtcctgggcacagcctcggctctgggtccctccgcctcccagcgacggacgccaaagggtcccgggccgcctgaggctcctccccaccacagccatctcgtttatcggaccaggagcaggcatccatgagacctcagagcttcagatcgaggccttggggggtccgggcccccccaggaaacacggtgaggccccagcgcctgcagccaaagctggcacgatctatggggcaggtgccgctctgcctagaaaagccaggggctctgctgccgtgccctccagagcccacagcgggcaggactcctccagcaccaccacacccagtggcccgagacccctctgagaacagtgaggctggtcctcgtgccgttccagccggtgcccggccagtggggaggacacagcctaggaaccagctgcctgagaccagggtgcctctgggctgtcctcccgcgtggcggagaccccaagcacgcagccacccatttccggagctgcaggatagagcttcctcttgatctctgtttttaagcagaaattcattgtgcagaaaagtcctccagagctctgtggccccgctcggatccgctggacccccatgcctggctgatccctgcccacgtggggcaggcccacatctaacccccacaagtcactgcctcactgcacctgccaaggctgccctggcgctgagtcctggggtccctcccggagttcctgggagaaaggcgccgtcgtggccgcctcccgcacgccaggcccgggctccaccgtgggtctcagacgccctgcggcaccggcaccgtctgctttagcatgggacccccatctgaggggtggcctggccttcggggtccccacgctcctttgcgaagtccactgtgggtgccatcatggtctccgggacctgggccagcgggaacgtgggggcactgggtgtgctgatataaagtcggcattactcaaaaaaaaaaaaaaaaaaaaaaaaaaaaaaaaaaaaaaaa

SEQ ID NO: 25044 - DNA, 3106 bp, Homo Sapiens
  misc_feature (1683)..(1683): n is a, c, g, or t
aggctcccgcgcgcggctgagtgcggactggagtgggaacccgggtccccgcgcttagagaacacgcgatgaccacgtggagcctccggcggaggccggcccgcacgctgggactcctgctgctggtcgtcttgggcttcctggtgctccgcaggctggactggagcaccctggtccctctgcggctccgccatcgacagctggggctgcaggccaagggctggaacttcatgctggaggattccaccttctggatcttcgggggctccatccactatttccgtgtgcccagggagtactggagggaccgcctgctgaagatgaaggcctgtggcttgaacaccctcaccacctatgttccgtggaacctgcatgagccagaaagaggcaaatttgacttctctgggaacctggacctggaggccttcgtcctgatggccgcagagatcgggctgtgggtgattctgcgtccaggcccctacatctgcagtgagatggacctcgggggcttgcccagctggctactccaagaccctggcatgaggctgaggacaacttacaagggcttcaccgaagcagtggacctttattttgaccacctgatgtccagggtggtgccactccagtacaagcgtgggggacctatcattgccgtgcaggtggagaatgaatatggttcctataataaagaccccgcatacatgccctacgtcaagaaggcactggaggaccgtggcattgtggaactgctcctgacttcagacaacaaggatgggctgagcaaggggattgtccagggagtcttggccaccatcaacttgcagtcaacacacgagctgcagctactgaccacctttctcttcaacgtccaggggactcagcccaagatggtgatggagtactggacggggtggtttgactcgtggggaggccctcacaatatcttggattcttctgaggttttgaaaaccgtgtctgccattgtggacgccggctcctccatcaacctctacatgttccacggaggcaccaactttggcttcatgaatggagccatgcacttccatgactacaagtcagatgtcaccagctatgactatgatgctgtgctgacagaagccggcgattacacggccaagtacatgaagcttcgagacttcttcggctccatctcaggcatccctctccctcccccacctgaccttcttcccaagatgccgtatgagcccttaacgccagtcttgtacctgtctctgtgggacgccctcaagtacctgggggagccaatcaagtctgaaaagcccatcaacatggagaacctgccagtcaatgggggaaatggacagtccttcgggtacattctctatgagaccagcatcacctcgtctggcatcctcagtggccacgtgcatgatcgggggcaggtgtttgtgaacacagtatccataggattcttggactacaagacaacgaagattgctgtccccctgatccagggttacaccgtgctgaggatcttggtggagaatcgtgggcgagtcaactatggggagaatattgatgaccagcgcaaaggcttaattggaaatctctatctgaatgattcacccctgaaaaacttcagaatctatagcctggatatgaagaagagcttctttcagaggttcggcctggacaaatggngttccctcccagaaacacccacattacctgctttcttcttgggtagcttgtccatcagctccacgccttgtgacacctttctgaagctggagggctgggagaagggggttgtattcatcaatggccagaaccttggacgttactggaacattggaccccagaagacgctttacctcccaggtccctggttgagcagcggaatcaaccaggtcatcgtttttgaggagacgatggcgggccctgcattacagttcacggaaaccccccacctgggcaggaaccagtacattaagtgagcggtggcaccccctcctgctggtgccagtgggagactgccgcctcctcttgacctgaagcctggtggctgctgccccacccctcactgcaaaagcatctccttaagtagcaacctcagggactgggggctacagtctgcccctgtctcagctcaaaaccctaagcctgcagggaaaggtgggatggctctgggcctggctttgttgatgatggctttcctacagccctgctcttgtgccgaggctgtcgggctgtctctagggtgggagcagctaatcagatcgcccagcctttggccctcagaaaaagtgctgaaacgtgcccttgcaccggacgtcacagccctgcgagcatctgctggactcaggcgtgctctttgctggttcctgggaggcttggccacatccctcatggccccattttatccccgaaatcctgggtgtgtcaccagtgtagagggtggggaaggggtgtctcacctgagctgactttgttcttccttcacaaccttctgagccttctttgggattctggaaggaactcggcgtgagaaacatgtgacttcccctttcccttcccactcgctgcttcccacagggtgacaggctgggctggagaaacagaaatcctcaccctgcgtcttcccaagttagcaggtgtctctggtgttcagtgaggaggacatgtgagtcctggcagaagccatggcccatgtctgcacatccagggaggaggacagaaggcccagctcacatgtgagtcctggcagaagccatggcccatgtctgcacatccagggaggaggacagaaggcccagctcacatgtgagtcctggcagaagccatggcccatgtctgcacatccagggaggaggacagaaggcccagctcacatgtgagtcctggcagaagccatggcccatgtctgcacatccagggaggaggacagaaggcccagctcagtggcccccgctccccaccccccacgcccgaacagcaggggcagagcagccctccttcgaagtgtgtccaagtccgcatttgagccttgttctggggcccagcccaacacctggcttgggctcactgtcctgagttgcagtaaagctataaccttgaatcacaa

SEQ ID NO: 25045 - DNA, 2456 bp, Homo Sapiens
cgccgccgttggggctggaagttcccgccaggtccgtgccgggcgagagagatgctgcccggcccgcctcggctttgaggcgagagaagtgtcccagacccatttcgccttgctgacggcgtcgagccctggccagacatgtccacagggttctccttcgggtccgggactctgggctccaccaccgtggccgccggcgggaccagcacaggcggcgttttctccttcggaacgggaacgtctagcaacccttctgtggggctcaattttggaaatcttggaagtacttcaactccagcaactacatctgctccttcaagtggttttggaaccgggctctttggatctaaacctgccactgggttcactctaggaggaacaaatacaggtgccttgcacaccaagaggcctcaagtggtcaccaaatatggaaccctgcaaggaaaacagatgcatgtggggaagacacccatccaagtctttttaggagtccccttctccagacctcctctaggtatcctcaggtttgcacctccagaacccccggagccctggaaaggaatcagagatgctaccacctacccgcctggatggagtctcgctctgtcgccaggctggagtgcagtggcacgatctcggctcactgcaacctccgcctcccgggttcaagcgagtctcctgcctcagcctctgagtgtctggggctacaggtgcctgcaggagtcctggggccagctggcctcgatgtacgtcagcacgcgggaacggtacaagtggctgcgcttcagcgaggactgtctgtacctgaacgtgtacgcgccggcgcgcgcgcccggggatccccagctgccagtgatggtctggttcccgggaggcgccttcatcgtgggcgctgcttcttcgtacgagggctctgacttggccgcccgcgagaaagtggtgctggtgtttctgcagcacaggctcggcatcttcggcttcctgagcacggacgacagccacgcgcgcgggaactgggggctgctggaccagatggcggctctgcgctgggtgcaggagaacatcgcagccttcgggggagacccaggaaatgtgaccctgttcggccagtcggcgggggccatgagcatctcaggactgatgatgtcacccctagcctcgggtctcttccatcgggccatttcccagagtggcaccgcgttattcagacttttcatcactagtaacccactgaaagtggccaagaaggttgcccacctggctggatgcaaccacaacagcacacagatcctggtaaactgcctgagggcactatcagggaccaaggtgatgcgtgtgtccaacaagatgagattcctccaactgaacttccagagagacccggaagagattatctggtccatgagccctgtggtggatggtgtggtgatcccagatgaccctttggtgctcctgacccaggggaaggtttcatctgtgccctaccttctaggtgtcaacaacctggaattcaattggctcttgccttataatatcaccaaggagcaggtaccacttgtggtggaggagtacctggacaatgtcaatgagcatgactggaagatgctacgaaaccgtatgatggacatagttcaagatgccactttcgtgtatgccacactgcagactgctcactaccaccgagaaaccccaatgatgggaatctgccctgctggccacgctacaacaaggatgaaaagtacctgcagctggattttaccacaagagtgggcatgaagctcaaggagaagaagatggctttttggatgagtctgtaccagtctcaaagacctgagaagcagaggcaattctaagggtggctatgcaggaaggagccaaagaggggtttgcccccaccatccaggccctggggagactagccatggacatacctggggacaagagttctacccaccccagtttagaactgcaggagctccctgctgcctccaggccaaagctagagcttttgcctgttgtgtgggacctgcactgccctttccagcctgacatcccatgatgcccctctacttcactgttgacatccagttaggccaggccctgtcaacaccacactgtgctcagctctccagcctcaggacaacctctttttttcccttcttcaaatcctcccacccttcaatgtctccttgtgactccttcttatgggaggtcgacccagactgccactgcccctgtcactgcacccagcttggcatttaccatccatcctgctcaaccttgttcctgtctgttcacattggcctggaggcctagggcaggttgtgacatggagcaaacttttggtagtttgggatcttctctcccacccacacttatctcccccagggccactccaaagtctatacacaggggtggtctcttcaataaagaagtgttgattagaaaaaaaaaaa

SEQ ID NO: 25046 - DNA, 1091 bp, Homo Sapiens
caagcaggtcatccccttggtgaccttcaaagagaagcagagagggcagaggtggggggcacagggaaagggtgacctctgagattccccttttcccccagactttggaagtgacccaccatggggctcagcatctttttgctcctgtgtgttcttgggctcagccaggcagccacaccgaagattttcaatggcactgagtgtgggcgtaactcacagccgtggcaggtggggctgtttgagggcaccagcctgcgctgcgggggtgtccttattgaccacaggtgggtcctcacagcggctcactgcagcggcagcaggtactgggtgcgcctgggggaacacagcctcagccagctcgactggaccgagcagatccggcacagcggcttctctgtgacccatcccggctacctgggagcctcgacgagccacgagcacgacctccggctgctgcggctgcgcctgcccgtccgcgtaaccagcagcgttcaacccctgcccctgcccaatgactgtgcaaccgctggcaccgagtgccacgtctcaggctggggcatcaccaaccacccacggaacccattcccggatctgctccagtgcctcaacctctccatcgtctcccatgccacctgccatggtgtgtatcccgggagaatcacgagcaacatggtgtgtgcaggcggcgtcccggggcaggatgcctgccagggtgattctgggggccccctggtgtgtgggggagtccttcaaggtctggtgtcctgggggtctgtggggccctgtggacaagatggcatccctggagtctacacctatatttgcaagtatgtggactggatccggatgatcatgaggaacaactgacctgtttcctccacctccacccccaccccttaacttgggtacccctctggccctcagagcaccaatatctcctccatcacttcccctagctccactcttgttggcctgggaacttcttggaactttaactcctgccagcccttctaagacccacgagcggggtgagagaagtgtgcaatagtctggaataaatataaatgaaggaggggcaaaaaaaaaaaaaa

SEQ ID NO: 25047 - DNA, 2449 bp, Homo Sapiens
ggcgcggccacatcctttaaatatggtctttcttgggcgcgcgcgacaatgtgaggagtggggtggagcgtgtgtggtgtgtggctgcggcctgggcaagagccgccgcggaccatgagctgagtaagttctggagggatcctgcctcttggagccttcgcagccaggcagctgtgaactgtgagctagagtgaagcagaaatctaggaagatgagctccaagatggtcataagtgaaccaggactgaattgggatatttcccccaaaaatggccttaagacatttttctctcgagaaaattataaagatcattccatggctccaagtttaaaagaactacgtgttttatccaacagacgtataggagaaaatttgaatgcctcagcaagttctgtagaaaatgagccggcagttagttcagcaactcaagcaaaggaaaaagttaaaaccacaattggaatggttcttcttccaaaaccaagagttccttatcctcgtttctctcgtttctcacagagagagcagaggagttatgtggacttgttggttaaatacgcaaagattcctgcaaattccaaagctgttggaataaataaaaatgactacttgcagtacttggatatgaaaaaacatgtgaacgaagaagttactgagttcctaaagtttttgcagaattctgcaaagaaatgtgcgcaggattataatatgctttctgatgatgcccgtctcttcacagagaaaattttaagagcttgcattgaacaagtgaaaaagtattcagaattctatactctccacgaggtcaccagcttaatgggattcttcccattcagagtagagatgggattaaagttagaaaaaactcttctcgcattgggcagtgtaaaatatgtgaaaacagtatttccctcaatgcctataaagttgcagctgtcaaaggacgatatagctaccattgaaacgtcagaacaaacagctgaagctatgcattatgatattagtaaagatccaaatgcagagaagcttgtttccagatatcaccctcagatagctctaactagtcagtcattatttaccttattaaataatcatggaccaacgtacaaggaacagtgggaaattccagtgtgtattcaagtaatacctgttgcaggttcaaaaccagttaaagtaatatatattaattcaccacttccccaaaagaaaatgactatgagagagagaaatcaaatctttcatgaagttccattaaaatttatgatgtccaaaaacacatctgttccagtctctgcagtctttatggacaaacctgaagagtttatatctgaaatggacatgtcctgtgaagtcaacgagtgccgaaaaattgagagtcttgaaaacttgtatttggattttgatgatgatgtcacagaacttgaaacttttggagtaaccaccaccaaagtatcaaaatcaccaagtccagcaagtacttccacagtacctaacatgacagatgctcctacagcccccaaagcaggaactacaactgtggcaccaagtgcaccagacatttctgctaattctagaagtttatctcagattctgatggaacaattgcaaaaggagaaacagctggtcactggtatggatggtggccctgaggaatgcaaaaataaagatgatcagggatttgaatcatgtgaaaaggtatcaaattctgacaagcctttgatacaagatagtgacttgaaaacatctgatgccttacagttagaaaattctcaggaaattgaaacttctaataaaaatgatatgactatagatatactacatgctgatggtgaaagacctaatgttctagaaaacctagacaactcaaaggaaaagactgttggatcagaagcagcaaaaactgaagatacagttctctgcagcagtgatacagatgaggagtgtttaatcattgatacagaatgtaaaaaaaccagttataacagtgtttaatttagataagtttgagggaaaataatcagtaggcaagaggaacatttttcctgtagtagctagagtgccttgaaaaaatgtgttggctatgtgaaggaatatttcaactaaaatggaatggtatgcttttcacccttaaagtttgaggaggatcttgatatgttttaacattatcatggcagggaaatatataaagaagaaaaatatttttacattaaaccttttctaaaaattgtaaatagaaaaataatttggttttttatcaagaacaacacttatcgttatgtattgtgttagttatattgccagtctgttgcgactgactcaaaaagttaaatgttgccactgctgaagatgattatgagcatcgcaaactttgtttctgacccattttgacagtttttatatactcctttaaaatgatgaatgttacaggttaataaagttaatacctttaaa

SEQ ID NO: 25048 - DNA, 1218 bp, Homo Sapiens
cccacgcgtccggcgccgtggcctcgcgtccatctttgccgttctctcggacctgtcacaaaggagtcgcgccgccgccgccgccccctccctccggtgggcccgggaggtagagaaagtcagtgccacagcccgaccgcgctgctctgagccctgggcacgcggaacgggagggagtctgagggttggggacgtctgtgagggaggggaacagccgctcgagcctggggcgggcggaccggactggggccggggtaggctctggaaagggcccgggagagaggtggcgttggtcagaacctgagaaacagccgagaggttttccaccgaggcccgcgcttgagggatctgaagaggttcctagaagagggtgttccctctttcgggggtcctcaccagaagaggttcttgggggtcgcccttctgaggaggctgcggctaacagggcccagaactgccattggatgtccagaatcccctgtagttgataatgttgggaataagctctgcaactttctttggcattcagttgttaaaaacaaataggatgcaaattcctcaactccaggttatgaaaacagtacttggaaaactgaaaactacctaaatgatcgtctttggttgggccgtgttcttagcgagcagaagccttggccagggtctgttgttgactctcgaagagcacatagcccacttcctagggactggaggtgccgctactaccatgggtaattcctgtatctgccgagatgacagtggaacagatgacagtgttgacacccaacagcaacaggccgagaacagtgcagtacccactgctgacacaaggagccaaccacgggaccctgttcggccaccaaggaggggccgaggacctcatgagccaaggagaaagaaacaaaatgtggatgggctagtgttggacacactggcagtaatacggactcttgtagataagtaagtatctgactcacggtcacctccagtggaatgaaaagtgttctgcccggaaccatgactttaggactccttcagttcctttaggacatactcgccaagccttgtgctcacagggcaaaggagaatattttaatgctccgctgatggcagagtaaatgataagatttgatgtttttgcttgctgtcatctactttgtctggaaatgtctaaatgtttctgtagcagaaaacacgataaagctatgatctttattagag

SEQ ID NO: 25049 - DNA, 2128 bp, Homo Sapiens
ctgtcgtctttgcttcagccgcagtcgccactggctgcctgaggtgctcttacagcctgttccaagtgtggcttaatccgtctccaccaccagatctttctccgtggattcctctgctaagaccgctgccatgccagtgacggtaacccgcaccaccatcacaaccaccacgacgtcatcttcgggcctggggtcccccatgatcgtggggtcccctcgggccctgacacagcccctgggtctccttcgcctgctgcagctggtgtctacctgcgtggccttctcgctggtggctagcgtgggcgcctggacggggtccatgggcaactggtccatgttcacctggtgcttctgcttctccgtgaccctgatcatcctcatcgtggagctgtgcgggctccaggcccgcttccccctgtcttggcgcaacttccccatcaccttcgcctgctatgcggccctcttctgcctctcggcctccatcatctaccccaccacctatgtccagttcctgtcccacggccgttcgcgggaccacgccatcgccgccaccttcttctcctgcatcgcgtgtgtggcttacgccaccgaagtggcctggacccgggcccggcccggcgagatcactggctatatggccaccgtacccgggctgctgaaggtgctggagaccttcgttgcctgcatcatcttcgcgttcatcagcgaccccaacctgtaccagcaccagccggccctggagtggtgcgtggcggtgtacgccatctgcttcatcctagcggccatcgccatcctgctgaacctgggggagtgcaccaacgtgctacccatccccttccccagcttcctgtcggggctggccttgctgtctgtcctcctctatgccaccgcccttgttctctggcccctctaccagttcgatgagaagtatggcggccagcctcggcgctcgagagatgtaagctgcagccgcagccatgcctactacgtgtgtgcctgggaccgccgactggctgtggccatcctgacggccatcaacctactggcgtatgtggctgacctggtgcactctgcccacctggtttttgtcaaggtctaagactctcccaagaggctcccgttccctctccaacctctttgttcttcttgcccgagttttctttatggagtacttctttcctccgcctttcctctgttttcctcttcctgtctcccctccctcccacctttttctttccttcccaattccttgcactctaaccagttcttggatgcatcttcttccttccctttcctcttgctgtttccttcctgtgttgttttgttgcccacatcctgttttcacccctgagctgtttctctttttcttttctttcttttttttttttttttttaagacggattctcactctgtggcccaggctggagtgcagtggtgcgatctcagctcactgcaacccccgcctcctgggttcaagcgattctcctcccccagcctcccaagtagctgggaggacaggtgtgagctgccgcacccagcctgtttctctttttccactcttcttttttctcatctcttttctgggttgcctgtcggctttcttatctgcctgttttgcaagcaccttctcctgtgtccttgggagccctgagacttctttctctccttgcctccacccacctccaaaggtgctgagctcacatccacaccccttgcagccgtccatgccacagccccccaaggggccccattgccaaagcatgcctgcccaccctcgctgtgccttagtcagtgtgtacgtgtgtgtgtgtgtgtgtttggggggtggggggtgggtagctggggattgggccctctttctcccagtggaggaaggtgtgcagtgtacttcccctttaaattaaaaaacatatatatatatatatttggaggtcagtaatttccaatgggcgggaggcattaagcaccgaccctgggtccctaggccccgcctggcactcagccttgccagagattggctccagaatttttgccaggcttacagaacacccactgcctagaggccatcttaaaggaagcaggggctggatgcctttcatcccaactattctctgtggtatgaaaaag

SEQ ID NO: 25050 - DNA, 2162 bp, Homo Sapiens
gcggcggctatgccgcttgctctgctcgtcctgttgctcctggggcccggcggctggtgccttgcagaacccccacgcgacagcctgcgggaggaacttgtcatcaccccgctgccttccggggacgtagccgccacattccagttccgcacgcgctgggattcggagcttcagcgggaaggagtgtcccattacaggctctttcccaaagccctggggcagctgatctccaagtattctctacgggagctgcacctgtcattcacacaaggcttttggaggacccgatactgggggccacccttcctgcaggccccatcaggtgcagagctgtgggtctggttccaagacactgtcactgatgtggataaatcttggaaggagctcagtaatgtcctctcagggatcttctgcgcctctctcaacttcatcgactccaccaacacagtcactcccactgcctccttcaaacccctgggtctggccaatgacactgaccactactttctgcgctatgctgtgctgccgcgggaggtggtctgcaccgaaaacctcaccccctggaagaagctcttgccctgtagttccaaggcaggcctctctgtgctgctgaaggcagatcgcttgttccacaccagctaccactcccaggcagtgcatatccgccctgtttgcagaaatgcacgctgtactagcatctcctgggagctgaggcagaccctgtcagttgtatttgatgccttcatcacggggcagggaaagaaagactggtccctcttccggatgttctcccgaaccctcacggagccctgccccctggcttcagagagccgagtctatgtggacatcaccacctacaaccaggacaacgagacattagaggtgcacccacccccgaccactacatatcaggacgtcatcctaggcactcggaagacctatgccatctatgacttgcttgacaccgccatgatcaacaactctcgaaacctcaacatccagctcaagtggaagagacccccagagaatgaggcccccccagtgcccttcctgcatgcccagcggtacgtgagtggctatgggctgcagaagggggagctgagcacactgctgtacaacacccacccataccgggccttcccggtgctgctgctggacaccgtaccctggtatctgcggctgtatgtgcacaccctcaccatcacctccaagggcaaggagaacaaaccaagttacatccactaccagcctgcccaggaccggctgcaaccccacctcctggagatgctgattcagctgccggccaactcagtcaccaaggtttccatccagtttgagcgggcgctgctgaagtggaccgagtacacgccagatcctaaccatggcttctatgtcagcccatctgtcctcagcgcccttgtgcccagcatggtagcagccaagccagtggactgggaagagagtcccctcttcaacagcctgttcccagtctctgatggctctaactactttgtgcggctctacacggagccgctgctggtgaacctgccgacaccggacttcagcatgccctacaacgtgatctgcctcacgtgcactgtggtggccgtgtgctacggctccttctacaatctcctcacccgaaccttccacatcgaggagccccgcacaggtggcctggccaagcggctggccaaccttatccggcgcgcccgaggtgtccccccactctgattcttgccctttccagcagctgcagctgccgtttctctctggggaggggagcccaagggctgtttctgccacttgctctcctcagagttggcttttgaaccaaagtgccctggaccaggtcagggcctacagctgtgttgtccagtacaggagccacgagccaaatgtggcatttgaatttgaattaacttagaaattcatttcctcacctgtagtggccacctctatattgaggtgctcaataagcaaaagtggtcggtggctgctgtattggacagcacagaaaaagatttccatcaccacagaaaggtcggctggcagcactggccaaggtgatggggtgtgctacacagtgtatgtcactgtgtagtggatggagtttactgtttgtggaataaaaacggctgtttccgtggaaaaaaaaaaaa

SEQ ID NO: 25051 - DNA, 1141 bp, Homo Sapiens
gggctgggccccgccgcagctccagctggccggcttggtcctgcggtcccttctctgggaggcccgaccccggccgcgcccagcccccaccatgccacccgcggggctccgccgggccgcgccgctcaccgcaatcgctctgttggtgctgggggctcccctggtgctggccggcgaggactgcctgtggtacctggaccggaatggctcctggcatccggggtttaactgcgagttcttcaccttctgctgcgggacctgctaccatcggtactgctgcagggacctgaccttgcttatcaccgagaggcagcagaagcactgcctggccttcagccccaagaccatagcaggcatcgcctcagctgtgatcctctttgttgctgtggttgccaccaccatctgctgcttcctctgttcctgttgctacctgtaccgccggcgccagcagctccagagcccatttgaaggccaggagattccaatgacaggcatcccagtgcagccagtatacccatacccccaggaccccaaagctggccctgcacccccacagcctggcttcatgtacccacctagtggtcctgctccccaatatccactctacccagctgggcccccagtctacaaccctgcagctcctcctccctatatgccaccacagccctcttacccgggagcctgaggaaccagccatgtctctgctgccccttcagtgatgccaaccttgggagatgccctcatcctgtacctgcatctggtcctgggggtggcaggagtcctccagccaccaggccccagaccaagccaagccctgggccctactggggacagagccccagggaagtggaacaggagctgaactagaactatgaggggttggggggagggcttggaattatgggctatttttactgggggcaagggagggagatgacagcctgggtcacagtgcctgttttcaaatagtccctctgctcccaagatcccagccaggaaggctggggccctactgtttgtcccctctgggctggggtggggggagggaggaggttccgtcagcagctggcagtagccctcctctctggctgccccactggccacatctctggcctgctagattaaagctgtaaagacaaaa

SEQ ID NO: 25052 - DNA, 4374 bp, Homo Sapiens
tatagtcccagctactcatggggctgatgcaggttgaggcaggaggttcatgagcccaggaggttggagctgtaatgagctaggattctgcctctgcactcctagctggatgacagagcaagaccctgtctcaaaaaagaaaaaaaaaaaaaaaagaatgcatgaaccagacatgacagttcctggcctcaaagatcttccaaaggaaatgatttttttttaaccaccaatgctgcaggaaaaagcaacatatttaagttatccaataacacctatccaataattgtaaatcattatcatgacatggtagagttgtttatatttcttttccttttaggtgaaacaccattcaaagtcgtagtcaaatctctttcacctaaagagttggtccggatacatgtccctaaacctttggacaggaatgatggaacatttttgatgagatataggatgtatgaaactgtcgatgaaggcctgaagatagaggtcctttatggtgatgaacatgtggctcagtctccctatattttgaaaggaccagtgtaccatgagtactgtgagtgtccggaagatcctcaggcctggcagaagactctttcttgtccaaccaaggaaccacagattgcaaaagattttgcttcctttcccagcatcaatctccagcaaatgctaaaagaagtccccaaaaggtttggggatgagagaggtgccattgttcattacacgattctcaataaccatgtttaccggagatctttagggaaatacacagacttcaagatgttctctgatgagattttgttatcattgacaagaaaggtccttctcccagatttagaattttatgttaatcttggagattggcccttggagcatcgaaaagtcaatggaacccctagccccatacctatcatttcatggtgtggctctctggattcaagagatgttgtccttccaacgtatgacatcacccactccatgcttgaagccatgcggggtgttacaaatgatctcctctctattcagggaaatacagggccttcctggatcaataaaacagagagagctttcttcagaggtagagacagccgagaggagaggctccagttggtacagctgtccaaagaaaatcctcagctactagatgcaggaattacaggatatttctttttccaagagaaagaaaaggagcttggaaaagccaagttgatgggtttctttgatttctttaagtacaagtatcaagtaaatgtggatgggaccgtggctgcttacagatatccatatctcatgctgggcgacagtctggttttaaagcaggactcgccatattatgaacatttctacatggcactagaaccttggaagcattatgttccaattaaaagaaatctgagtgatttattagagaaagttaaatgggctaaggaaaatgatgaagaagccaagaagattgcaaaagaaggacagttgatggctagggacctactacagccacacaggctttactgctactattaccaagtactgcagaaatatgccgagcgccagtccagcaaacccgaagtacgtgatggaatggaacttgttcctcagccagaagatagcacagccatctgccagtgccacaggaaaaagccttcaagagaagaactttgagtcagcccagaatcacactcctgtgtatcccggctacactttaaggaaagattgaatctaagctgtgaaggacagtatagaagactgcaccaagtggactagttctcccggtggctttatatatgtagatggatatagcagtactggttgagtatccctcatctgaaatgcttaggaccaggagtgtttcaggcttcagattttttaagatttgggaatatttgcatgtacataatgaggtatcttggggatgagatccaagtctaaacacaaaattcatttatattttatatataccttgttcacataccctgaaggtaattttatataatatttttaataatttgtgcatgaaacaaagtttgtatacattgaactgtcagaaagcaaaggtgtcactatcttagcgacccaagtggtggtgtcagcactcaaaaagttttggattttggggtatttcagattttagatttttgtatgaggaatgttcaacctgtatttgaacaagcattaccaaatatcattgaatattaatatcttttgcgtaaaaactgctattatcagcatcatagtttctctaaaaagaaaacttggggatcatagccgatagagagacttgctaaaatataaatcagcctctgcaaaactgtttacatatttattggtttacatattttattggtttatttctatcccctgttcactttttctcttccacttccaattatgaagagaaaatatttgttcagggttgtccccccgccccccgtcactgcataatttctcctcttacaagctgcttttggctttcattaataacagcttccttttagaaggtctgataaggatatttaaggaagaagagaatgactctgttattaaaggtggcatggagactgtggagggaatattttttaaagcactactcatatcctttaaactaaattttgccaaagcccgagacaacattaaggagaaattgtaccttaagttagtaattccaaatctatctgagttgtatacccatcaaagacaatacagttattaacatagatgaaggtatgctataggcatcattcattatctctatattgaataggtgaaagataactgtagtcaggtgaaaggcattcatcatttttaagctgaaaaggggatccttgaaaacactgaaaacctctacaacaatcttcaggaagcctgctatcttgggattcactaataataggccaagaacaaaggcaagcatccattcctcactccaccacttttctatttcagtgggtgtcattgctacgatgaagactttggaaatttcctttctcttttaggacagggtcaggatttaggactcatagcctgaaagctcattacatactccttgtaaccatcagtccaaggttcagttcactaaagtgcatgttctaaaacaagagctatcctcattccaaattttaaaatatgtactctggccggttgcagtggctcacgcctgtaatcccagcactttggcaggccgagatgggcggatcttttgaggtcaggagtttgagaccagcctggccaacatggtgaaaccccgtctctactaaaaatacaaaaattagccaggcatggtggcatttgcctgtaatcccagctactcgggaggctgaggcaggagaatcacttgaacctgggaggcagaggttgcagtgagctgagattacaccactgcactccagcctgggtgacagagtgagactccatctcaaaaactgaaaataaaaataaaaatatgtattctcctaactgaaatatttacttaatctggaaaacaatgtaactatttttaaagtggttacatctattcttgctgaagaacaataaacagaattttttgactaagcataaccaaatttcagaacagtctaatcaatgccaagtatccaaggcaaactctaatacccatccattgtgcaaaaccacaagcacgcaagtattaaataagagcaagctgtcctgagcccatacctaatgaatttgtgtcttaaatattgtacattgtgtttgaggcttgtcaaaactgggattatggcaagaaaggttgcctaactcatacctttctgcctcaaattccaggtgctaaaggctaatggcattttaaacatcttacatttttaaaaatttatattgcctctgccaaacaggcctaatagttaaaagcaagttgagacaaaccaggcagattcagtgtgtggaacaggaaggatgtgctttaaaaaaaggtggaatccctcaaaaaattctatagggagacagcagccttaatctacataattcttcatctcgccaattcagccgcagcctttaaagagttagtgttaatggctttctggtttgaaaacaaaaatgcatctatgtggttgaaagtttgggaggagattcaccaatatctgaggagaagatggagtgaagggaattcttactttttgctttatacctttctataatatttagatttttttttactgtaagtatggatcaaattgcaaaataaagaaaaatgccaaccttagaaaagacaataaatgcacaaaagatataaacaggaacagcaaatatttatattttttccattttgctctttttaaatctatgtttagaactttatatcttgggacttatgtatatatataccttttaaataaaataaattttctaaataaaaagttg

SEQ ID NO: 25053 - DNA, 1976 bp, Homo Sapiens
ccttgcttggtgcttggcacacacaaatccagtgggctacacaggttttccagaagccccacgaggtggtaatggtgctgctgattcagaccctgggggccctcatgccctcgctgccctcctgcctcagcaacggcgtggagagggcagggcccgagcaggagctcaccaggctgctggagttctacgacgccaccgcccacttcgccaagggcttggagatggcactgctcccccacctacatgaacacaatctggtaaaagtcacggagctggtggatgctgtgtatgatccatacaaaccctaccagctgaagtatggcgacatggaagagagcaacctcctcatccagatgagtgctgtgcctctggagcatggggaagtgattgactgtgtgcaggagctgagccactccgtgaacaagctgtttggtctggcgtctgcagccgttgacagatgcgtcagattcaccaatggcctggggacctgcggcctgttgtcagccctgaaatccctctttgccaagtatgtgtctgatttcaccagcactctccagtccatacgaaagaagtgcaaactggaccacattcctcccaactccctcttccaggaagattggacggcttttcagaactccattaggataatagccacctgtggagagcttttgcggcattgtggggacttcgagcagcagctagccaacaggattttgtccacagctgggaagtatctatctgattcctgcagcccccggagcctggctggttttcaggagagcatcttgacagacaagaagaactctgccaagaacccatggcaagaatataattacctccagaaagataaccctgctgaatatgccagtttaatggaaatactttatacccttaaggaaaaagggtcaagcaaccacaacctgctggctgcacctcgagcagcgctgactcggcttaaccagcaggcccaccagctggctttcgattccgtgttcctgcgcatcaaacaacagctgttgcttatttcgaagatggacagctggaatacggctggcatcggagaaaccctcacagatgaactgcccgcctttagtctcacccctctcgagtacatcagcaacatcgggcagtacatcatgtccctccccctgaatcttgagccatttgtgactcaggaggactctgccttagagttggcattgcacgctggaaagctgccatttcctcctgagcagggggatgaattgcccgagctggacaacatggctgacaactggctgggctcgatcgccagagccacaatgcagacctactgtgatgcgatcctacagatccctgagctgagcccacactctgccaagcagctggccactgacatcgactatctgatcaacgtgatggatgccctgggcctgcagccgtcccgcaccctccagcacatcgtgacgctactgaagaccaggcctgaggactatagacaggtcagcaaaggcctgccccgtcgcctggccaccaccgtggccaccatgcggagtgtgaattactgaccccaccacacaccggaccaccaagagagccagggctgctgtttcgtgactcaccagcacagatttgctcagaaactctgcccaagattgggcagaagttactttaaaaagacttggttcagctggtcacggtggctcacgcctgtaatcccagcactttgggaggccaagccagatggatcatgaggccaggagttcgagaccagcctgaccaacatggtgaaaccccatctctactaaaaatacaaaaattaacagcagagcgagactctgtctcaaaaaaaaaaaaaaaaagacttggttcatttgtataatcaaaaagagttgtaaattaaagatgtattatttatcagagaagactttttagataatttttttaaaggatcagatcttgaaaatggaataaataactactgtgaaatgcaaaaa

SEQ ID NO: 25054 - DNA, 823 bp, Homo Sapiens
ctgcaggtagacatctccactgcccaggaatcactgagcgtgcagacagcacagcctcctctgaaggccggccataccagagtcctgcctcggcatgggcctcaccattgaggcagctccactgtctgtgctggtctgagggtgctgcctgtcatgggggcagccatctcccagggggccctcatcgccatcgtctgcaacggtctcgtgggcttcttgctgctgctgctctgggtcatcctctgctgggcctgccattctcgtctgccgacgttgactctctctctgaatccagtcccaactccagccctggcccctgtcctgagaaggccccaccaccccagaagcccagccatgaaggcagctacctgctgcagccctgaaggcccctggcctagcctggagcccaggacctaagtccacctcacctagagcctggaattaggatcccagagttcagccagcctggggtccagaactcaagagtccgcctgcttggagctggacccagcggcccagagtctagccagcttggctccaataggagctcagtggccctaaggagatgggcctggggtgggggcttatgagttggtgctagagccagggccatctggactatgctccatcccaagggccaagggtcaggggccgggtccactctttccctaggctgagcacctctaggccctctaggttggggaagcaaactggaacccatggcaataataggagggtgtccaggctgggcccctcccctggtcctcccagtgtttgctggataataaatggaactatggctctaaaaaaaaaaaaaaaaaaa

SEQ ID NO: 25055 - DNA, 1333 bp, Homo Sapiens
cggccacagctggcatgctctgcctgatcgccatcctgctgtatgtcctcgtccagtacctcgtgaaccccggggtgctccgcacggaccccagatgtcaagaatatgaacacgtggctgctgttcctccccctgttcccggtgcaggtgcagaccctgatagtcgtgatcatcgggatgctcgtgctcctgctggactttcttggcttggtgcacctgggccagctgctcatcttccacatctacctgagtatgtcccccaccctaagcccccgatccccccaaggctgggtggtcagagctgctcatcttacacctctacttgagtatgtccctaaccctgagccccccacgcctggggccagagtctttgtcccccgtgtgcgcatgtgttcagggtcagcctctcccagaagtgagatcatggacaaaaagggcaaatcacaggaagaaattaaatccatgaggacccagcaggcccagcaagaagctgaactcacgccgagacctgcaggagtggtgccaggtgcttgaagtaacaagtttaaaatgttcagagacaatggaatggaatctattaggcaagaacaggacattatgaaataaggacaggtggacttccaaaaacacaagtagaaattctaacaatgaaatatattacaggcaggtcacccactaaccaaacaactgaagcgagagctggtggtcttgcttggtctcacagtgggcacagcggtaggcggtcagtcatgttgctgaacgacggagggtaaactccccagccccaagaaaacctgtgttggaagtaacaacaacctccctgctcctggcaccagccgttttggtcatggtgggccagctgcaaagcgtcttccattctctgggcagtggtggccccgaggctgtggcctctcagggggtttctgtggacacgggcagcagagtgtgtccaggccagcccccaagaatgccctgctcctgacagcttggccaacccctggtcagggcagagggagttgggtgggtcaggctctgggctcacctccatctccagagcatcccctgcctgcagttgtggcaagaacgcccagctcagaatgaacacaccccaccaagagcctccttgttcataaccacaggttaccctacaaaccactgtccccacacaaccctggggatgttttaaaacacacacctctaacgcatatcttacagtcactgttgtcttgcctgagggttgaattttttttaatgaaagtgcaatgaaaatcactggattaaatcctacggacacagagctgaaaaaaaaaaaaaaaaaaaaaaaaaaaaaaaa

SEQ ID NO: 25056 - DNA, 1808 bp, Homo Sapiens
cactcattcattccaaagggtctctcaaggcaatggtaatgtgcaaggaggtgatacctaaatgaatgaccaaaagaacatgcttctgcttttgtgtgtctcctacattttagacatttgtttgtttctcttggtagcctttaaattccttgaagcccaggaccatgtctcacttacctttgtgtttccactaactagtctacctcctggaattggcagatactcagtgaaagcctgtgaaataagtgatgtctatttctagcatattattctgagatttaatgatagatttagtgattgaatgagatttccattttcaaatacagcaaaagcataactattttcattcattcatattcattcaacttcattctcaaaattaggtcctgagttaactaataattacctttgaaatgtgtgggttatttgaggcaatcaggtggtgacattgagctctcagccagagtttgtttctggaattgattcagttccattgcattgatttttgttctcagaagccaaggtttcccatgaaaaatcattcccacttgaattgggctgtgattcttgctgcgtttaagtaaaggaagcctcttggttctagttctgcaaacttacacactgaactgggacaagtttttgtttagagtaatggctgggaaaagaggaacctttcattttattcagaagtcaaaaacaaaggcctcccagccacctggagatgttttgttgcagacaccagcctggctctgtctttatgcctaacaattgagcatccagtcttctttgtgctgggaccattgctcagctctgcaaggggaaaagagggagaaagccagagctgccaggcttcttgcactggggccgggggagggttcctgggaagcaggtgctctctggcttcttggtacgtgaggctctcggagctgcctctcctctgaccctcaggtcctcaccgagtttgctccaggagtatattgaaaacatacccagtgctctctcaagcacccactgcttagagggcccagatttcttttccttctttcccttgcagagctggagactgcatcgggcatctggtgtttaaactaaacaggaaaactgactaaaggtccacagtgctcattgtgtagactagctgccctccgatgggtgctctgattatcagtggttccagtgcagggcctgtcactaaacaggcctcacttcctccttgggggctttcccatgggaggtgtggctttttactctacatggaaatgactctctgcagccacagaacacagtcattttctgaattatcccagtctctcatgcgccctggattcctccagatgccttatatctcttgtgcaaagttgtctaaaatttggttcccagcttccaagccttgccttttggccttcctggaagtatttttgttgatgagtcgtctgtcattattctctaaaatgatttgctttttgtttctttcattcctatttccaccccacatatacacacatgcttcttaacttaggggattacatgccaataaatctattgttgaaaatgcactaatactatcgcaaagacgaaaattcacaggctgaaccgttgtaagtccatatgctcctcaacttacatgtgtgatggagttatgcccaaataagtccatcgtcaagttgaaaaatcaaaatcaagccatcttaggttgaggaccatttgtttgtacctccaaagatgtcatatctttaaacatactccctagcttttctttttactttttattttgaagtaattatagaatcacagaaagttgcaaaaaa

SEQ ID NO: 25057 - DNA, 610 bp, Homo Sapiens
gcactgctgctgtcccatcagctgctctgaagctccatggtgcccagaatcttcgctcctgcttatgtgtcagtctgtctcctcctcttgtgtccaagggaagtcatcgctcccgctggctcagaaccatggctgtgccagccggcacccaggtgtggagacaagatctacaaccccttggagcagtgctgttacaatgacgccatcgtgtccctgagcgagacccgccaatgtggtcccccctgcaccttctggccctgctttgagctctgctgtcttgattcctttggcctcacaaacgattttgttgtgaagctgaaggttcagggtgtgaattcccagtgccactcatctcccatctccagtaaatgtgaaagcagaagacgttttccctgagaagacatagaaagaaaatcaactttcactaaggcatctcagaaacataggctaaggtaatatgtgtaccagtagagaagcctgaggaatttacaaaatgatgcagctccaagccattgtatggcccatgtgggagactgatgggacatggagaatgacagtagattatcaggaaataaataaagtggtttttccaatgtacacacctgtaaaa

SEQ ID NO: 25058 - DNA, 2010 bp, Homo Sapiens
ggaaaaactgttctcttctgtggcacagagaaccctgcttcaaagcagaagtagcagttccggagtccagctggctaaaactcatcccagaggataatggcaacccatgccttagaaatcgctgggctgtttcttggtggtgttggaatggtgggcacagtggctgtcactgtcatgcctcagtggagagtgtcggccttcattgaaaacaacatcgtggtttttgaaaacttctgggaaggactgtggatgaattgcgtgaggcaggctaacatcaggatgcagtgcaaaatctatgattccctgctggctctttctccggacctacaggcagccagaggactgatgtgtgctgcttccgtgatgtccttcttggctttcatgatggccatccttggcatgaaatgcaccaggtgcacgggggacaatgagaaggtgaaggctcacattctgctgacggctggaatcatcttcatcatcacgggcatggtggtgctcatccctgtgagctgggttgccaatgccatcatcagagatttctataactcaatagtgaatgttgcccaaaaacgtgagcttggagaagctctctacttaggatggaccacggcactggtgctgattgttggaggagctctgttctgctgcgttttttgttgcaacgaaaagagcagtagctacagatactcgataccttcccatcgcacaacccaaaaaagttatcacaccggaaagaagtcaccgagcgtctactccagaagtcagtatgtgtagttgtgtatgtttttttaactttactataaagccatgcaaatgacaaaaatctatattactttctcaaaatggaccccaaagaaactttgatttactgttcttaactgcctaatcttaattacaggaactgtgcatcagctatttatgattctataagctatttcagcagaatgagatattaaacccaatgctttgattgttctagaaagtatagtaatttgttttctaaggtggttcaagcatctactctttttatcatttacttcaaaatgacattgctaaagactgcattattttactactgtaatttctccacgacatagcattatgtacatagatgagtgtaacatttatatctcacatagagacatgcttatatggttttatttaaaatgaaatgccagtccattacactgaataaatagaactcaactattgcttttcagggaaatcatggatagggttgaagaaggttactattaattgtttaaaaacagcttagggattaatgtcctccatttataatgaagattaaaatgaaggctttaatcagcattgtaaaggaaattgaatggctttctgatatgctgttttttagcctaggagttagaaatcctaacttctttatcctcttctcccagaggctttttttttcttgtgtattaaattaacatttttaaaacgcagatattttgtcaaggggctttgcattcaaactgcttttccagggctatactcagaagaaagataaaagtgtgatctaagaaaaagtgatggttttaggaaagtgaaaatatttttgtttttgtatttgaagaagaatgatgcattttgacaagaaatcatatatgtatggatatattttaataagtatttgagtacagactttgaggtttcatcaatataaataaaagagcagaaaaatatgtcttggttttcatttgcttaccaaaaaaacaacaacaaaaaaagttgtcctttgagaacttcacctgctcctatgtgggtacctgagtcaaaattgtcatttttgttctgtgaaaaataaatttccttcttgtaccatttctgtttagttttactaaaatctgtaaatactgtatttttctgtttattccaaatttgatgaaactgacaatccaatttgaaagtttgtgtcgacgtctgtctagcttaaatgaatgtgttctatttgctttatacatttatattaataaattgtacatttttctaatt

SEQ ID NO: 25059 - DNA, 2473 bp, Homo Sapiens
gagcggagtaaaatctccacaagctgggaacaaacctcgtcccaactcccacccaccggcgtttctccagctcgatctggaggctgcttcgccagtgtgggacgcagctgacgcccgcttattagctctcgctgcgtcgccccggctcagaagctccgtggcggcggcgaccgtgacgagaagcccacggccagctcagttctcttctactttgggagagagagaaagtcagatgccccttttaaactccctcttcaaaactcatctcctgggtgactgagttaatagagtggatacaaccttgctgaagatgaagaatatacaatattgaggatatttttttcttttttttttcaagtcttgatttgtggcttacctcaagttaccatttttcagtcaagtctgtttgtttgcttcttcagaaatgttttttacaatctcaagaaaaaatatgtcccagaaattgagtttactgttgcttgtatttggactcatttggggattgatgttactgcactatacttttcaacaaccaagacatcaaagcagtgtcaagttacgtgagcaaatactagacttaagcaaaagatatgttaaagctctagcagaggaaaataagaacacagtggatgtcgagaacggtgcttctatggcaggatatgcggatctgaaaagaacaattgctgtccttctggatgacattttgcaacgattggtgaagctggagaacaaagttgactatattgttgtgaatggctcagcagccaacaccaccaatggtactagtgggaatttggtgccagtaaccacaaataaaagaacgaatgtctcgggcagtatcagatagcagttgaaaatcaccttgtgctgctccatccactgtggattatatcctatggcagaaaagctttataattgctggcttaggacagagcaatactttacaataaaagctctacacattttcaaggagtatgctggattcatggaactctaattctgtacataaaaattttaaagttatttgtttgctttcaggcaagtctgttcaatgctgtactatgtccttaaagagaatttggtaacttggttgatgtggtaagcagataggtgagttttgtataaatcttttgtgtttgagatcaagctgaaatgaaaacactgaaaaacatggattcatttctataacacatttatttaagtatataacacgttttttggacaagtgaagaatgtttaatcattctgtcatttgttctcaatagatgtaactgttagactacggctatttgaaaaaatgtgcttattgtactatattttgttattccaattatgagcagagaaaggaaatataatgttgaaaataatgttttgaaatcatgacccaaagaatgtattgatttgcactatccttcagaataactgaaggttaattattgtatatttttaaaaattacacttataagagtataatcttgaaatgggtagcagccactgtccattacctatcgtaaacattggggcaatttaataacagcattaaaatagttgtaaactctaatcttatacttattgaagaataaaagatatttttatgatgagagtaacaataaagtattcatgatttttcacatacatgaatgttcatttaaaagtttaatcctttgagtgtctatgctatcaggaaagcacattatttccatatttgggttaattttgcttttattatattggtctaggaggaagggactttggagaatggaactcttgaggactttagccaggtgtatataataaaggtacttttgtgctgcattaaattgcttggaaagtgttaacattatattatataagagtatcctttatgaaattttgaatttgtataacagatgcattagatattcattttatataatggccacttaaaataagaacatttaaaatataaactatgaagattgactatcttttcaggaaaaaagctgtatatagcacagggaaccctaatcttgggtaattctagtataaaacaaattatacttttatttaaatttcccttgtagcaaatctaattgccacatggtgccctatatttcatagtatttattctctatagtaactgcttaagtgcagctagcttctagatttagactatatagaatttagatattgtattgttcgtcattataatatgctaccacatgtagcaataattacaatattttattaaaataaatatgtgaaatattgtttcatgaaagacagatttccaaatctctcttctcttctctgtactgtctacctttatgtgaagaaattaattatatgccattgccaggtagaagtttggaataattgtttagtctctcctattagatgtggacaattttgtttttgtttttgttttcagggrtgaaataaaatatattatttctcccttaaaaaaaaaaaaaaaaaaaaaaaaaaaaaaaaa

SEQ ID NO: 25060 - DNA, 457 bp, Homo Sapiens
atctgagtgagctaactgacacaatgaaactgtcaggcatgtttctgctcctctctctggctcttttctgctttttaacaggtgtcttcagtcagggaggacaggttgactgtggtgagttccaggaccccaaggtctactgcactcgggaatctaacccacactgtggctctgatggccagacatatggcaataaatgtgccttctgtaaggccatagtgaaaagtggtggaaagattagcctaaagcatcctggaaaatgctgagttaaagccaatgtttcttggtgacttgccagcttttgcagccttcttttctcacttctgcttatacttttgctggtggattcctttaattcataaagacatacctactctgcctgggtcttgaggagttcaatgtatgtctatttctcttgattcacttgtcaataaagtacattctgcaaaagcaaaaa

SEQ ID NO: 25061 - DNA, 3442 bp, Homo Sapiens
ggaaagagtgctggtactacaaccaggaagtgacagataatgtgctttaaactacattagaaaagcttctcatagcaaaactgagagattgaagcagtgattatttttacatagttgtcattaaatatttggagctctgctgtgcatagagatggcaacatacttagaatacacagctttctgggccagaaattgatcttctgacttttgagccttatctgattactgcttggttcatctttattttgttaaactactctgtaggctgaaagggagagactctccttggtttgcagagcctgactagacaggaattctggcaactgctccagcagaactatggcactgagctaggtttaaatgctgaggagatggaaaacttgtcactgtcgattgaggatgtgcagccaagaagtccaggaagaagcagcttggatgactctggggagagagatgaaaaattatccaagtcaatcagttttaccagtgaatcaattagtcgggtttcagaaacagagtcattcgatggaaattcatcaaaaggaggattaggcaaagaggagtcccaaaatgagaaacagaccaaaaagagtctcttaccaactttggaaaagaagttaactagagtgccatcaaagtcactggacttgaataaaaatgaatatctttctctggacaaaagcagcacttcagattctgttgatgaagaaaatgttcctgagaaagatcttcatggaagactttttatcaaccgtatttttcatatcagtgctgacagaatgtttgaattgctctttaccagttcacgctttatgcagaaatttgccagttctagaaatataatagatgtagtatctaccccttggactgcagaacttggaggtgatcagctgagaacgatgacctacactatagtccttaatagtccacttactggaaaatgcactgctgccactgaaaagcagacactgtataaagaaagtcgggaagcacgattttatttggtagattcagaagtactgacacatgatgtcccctaccatgattacttctataccgtgaacagatactgtatcatccgatcttcaaaacagaaatgcaggctaagagtttccacagatttgaaatacagaaaacagccatggggccttgtcaaatctttaattgaaaagaattcctggagttctttggaggactatttcaaacagcttgaatcagatttgttaattgaagaatctgtattaaatcaggccattgaagaccctggaaaacttactggcctacgaaggagaaggcgaaccttcaaccgaacagcagaaacagttcctaaactttcctctcagcattcctctggagatgtgggcttaggtgccaaaggggatattacaggaaagaaaaaggaaatggaaaactataacgtcactcttattgtggtaatgagtatttttgtgttgttattagttttgttgaatgtgacactgtttctgaagctgtcaaagatagaacatgctgctcagtccttttaccgtctccgcctccaagaagagaaatctttaaatttagcctctgatatggtgtcaagagcagaaactattcagaagaataaagatcaggcccatcgtttaaagggagtgctccgagactccatagtgatgcttgaacagctgaagagctcactcattatgcttcagaaaacgtttgatctactaaataagaataagactggcatggctgttgaaagctagtgatctgaaggactaaaaccgcagagatacttggaacttaaagaaaatacctggaagaaaaccagacgaatgaaggattttggcatagaacatttctatgttttttcattattgagatttctaatatgaacatttctttcagtaacatttatttgataattagtttctgctggccttaataatccatcctttcacttcttatagatatttttaagctgtgaatttcttcagtgaaccatgaaatatattatagaactgaatttctctgatacaaaaagaaaatgacacaccctgaattgagtggtatggtctcatttctacagtgaagtctgatgctttgttagcacagaatccgtacatgtccaataggtcgcttttgtaactgagataagaccaagaggataaacaggacaatataagaagaaacctctatgtcattactgattttaaaggttctgttttcaggcatataacatttccaggtttgtgtactgtaaagattataatgtcttcatttatttagcatgcaaatttaatagtcaaactttttgaatctgcatgttgatgatgattatcagaaagggtcttctgccatgctgtatctttatgaaagaaatagttgttttttcttaaggtaactatcagaggtgggattatcttgcctcctcacttagaataccaacagtcaaaaggaagaaccatcctctgagttttaaaaaccagaaggttatgttaaaatctgggcatttagtgacagatcaaatgcatacttgaactaagattggcttcagcttagcagtctttcatggtggaagtgacacatctggttgaaaataatttgtgtattttcagtaaccatgtatggcttccttctttatgtatgtgtgtgacttgttttaattggtaagttataagccagacatagattttagctctttaataaaaacttcaggggcacgtatgtcccagtacaagtgtactgactatcaagttttaactcagatgcaagctttggctctttcataaaaagtttttatgcatatgtgtctccatacaagtggctcattaaaataagaactttgtaaactgacttaaaatcagatattttttcaagagttagggaaagttgaagtgttttactgttttgtctcttgagccctttctctggggaaaaaatacatatccatctatctatctatatataaactgtgtatacattcttactgtttgaacaactattgcctttaattaaatgtttcatttttctccagagtccccaaagccacatggcattattatagtcatttttgagatgcctgtagagaatgaaagtattgactccgttagagggaaaatgggtttctctgggtgaattccaacgaagcatacctaggggtaacagtgaacctacctgggtttgttttgttttggtaaggatttatgtagtgtctggctgtaagcaagaatgagtggattataaacttgaagatttctctgttaaagtcacaaaaatgatcgacaaacaatatttttgtgatgtttatttaaacgttgtattttataacatacttcaaggaagagtatcgaagtaagttgctttataaattaagactaaattcgtatggatgcagaattcaattaataaaatttgagcctgttacgtaaattgaatattaataaaattgaaaatttcaaaa

SEQ ID NO: 25062 - DNA, 2974 bp, Homo Sapiens
gatcagtgtgtgagggaactgccatcatgaggtctgacaagtcagctttggtatttctgctcctgcagctcttctgtgttggctgtggattctgtgggaaagtcctggtgtggccctgtgacatgagccattggcttaatgtcaaggtcattctagaagagctcatagtgagaggccatgaggtaacagtattgactcactcaaagccttcgttaattgactacaggaagccttctgcattgaaatttgaggtggtccatatgccacaggacagaacagaagaaaatgaaatatttgttgacctagctctgaatgtcttgccaggcttatcaacctggcaatcagttataaaattaaatgatttttttgttgaaataagaggaactttaaaaatgatgtgtgagagctttatctacaatcagacgcttatgaagaagctacaggaaaccaactacgatgtaatgcttatagaccctgtgattccctgtggagacctgatggctgagttgcttgcagtcccttttgtgctcacacttagaatttctgtaggaggcaatatggagcgaagctgtgggaaacttccagctccactttcctatgtacctgtgcctatgacaggactaacagacagaatgacctttctggaaagagtaaaaaattcaatgctttcagttttgttccacttctggattcaggattacgactatcatttttgggaagagttttatagtaaggcattaggaaggcccactacattatgtgagactgtgggaaaagctgagatatggctaatacgaacatattgggattttgaatttcctcaaccataccaacctaactttgagtttgttggaggattgcactgtaaacctgccaaagctttgcctaaggaaatggaaaattttgtccagagttcaggggaagatggtattgtggtgttttctctggggtcactgtttcaaaatgttacagaagaaaaggctaatatcattgcttcagcccttgcccagatcccacagaaggtgttatggaggtacaaaggaaaaaaaccatccacattaggagccaatactcggctgtatgattggataccccagaatgatcttcttggtcatcccaaaaccaaagcttttatcactcatggtggaatgaatgggatctatgaagctatttaccatggggtccctatggtgggagttcccatatttggtgatcagcttgataacatagctcacatgaaggccaaaggagcagctgtagaaataaacttcaaaactatgacaagcgaagatttactgagggctttgagaacagtcattaccgattcctcttataaagagaatgctatgagattatcaagaattcaccatgatcaacctgtaaagcccctagatcgagcagtcttctggatcgagtttgtcatgcgccacaaaggagccaagcacctgcgatcagctgcccatgacctcacctggttccagcactactctatagatgtgattgggttcctgctgacctgtgtggcaactgctatattcttgttcacaaaatgttttttattttcctgtcaaaaatttaataaaactagaaagatagaaaagagggaatagatctttccaaattcaagaaagacctgatggggtaatcctgttaattccagccacatagaatttggtgaaaaccttgctattttcatattatctattctgttattttatcttagctatatagcctagaattccatgatcatgaggttgtgagtatatctcattctttcgttgtattttcctaggtgtctttactctcttctctcactttgtgacacaaggacatgaatacatctaaattttcctatttctgatatgactgttttgatgatgtcattacttctataaccttaagtgatagggtgacatgcaatatgattattcctggtgtgcgcccaaacacatggatataaagaggtaaaaaacttaaaattcacaaaattcagtaaaccacacaaatcaggtaagtgttctatgagattagctggctatgagaaacataatgatgtttctttttcaatttaaataagcctttctacatagccagcatcagtgatctcagaaaataaattgctaataatgatgacatggcattatgcttagaaaagtttgctgtatttccatagacctcatctagatgtcatggcctacatttctgccatcactcaaccaatacttttttctgttttcttgatgataaaaagacctttctcatgattgccatcaaataacaaaagaaactattttttttctcacatagagaacatgtcagtaagatattcaaggtgaacagatatttttgggattagtaactatttgaaatatgtggtgataattactgagtttataaaatttatttgatagtacacttaaagaagatttatatgtttattctttaaaaatgatgaatactcataattcttatctctataatcaaaagtataatttactgtagaaaaataaagagatgcttgttctgaaagtaagatcagtgaactgcttttcagtctcaatctttgagaattgtaaattcatcaaataattgcttacatagtaaaaatttaaggtattagaaaacctgcataacaaatagtattatatattaaatattttgatatgtaaagctctacacaaagctaaatatagtgtaataatgtttacactagtaagcaaatatgttaatcttctcatttttttactgtcatataatcttagtgatatgcctattaatagttttaaataaataaattggcttatctggctttttgaaaattttgaaattcttacagatgttgattaggtatatctacaaattaatttcaattttaaaatgatgatataaaaataaatataagtatttttcttgtgtatgtatacaataaatataaataaaattgtttactgttttgaaagtttcttaagtttta

SEQ ID NO: 25063 - DNA, 1664 bp, Homo Sapiens
caaagccctaccctcaccattcaccaggtcctgtgggaagagcagcgtggaggtgggctgaggttagaaggtgcagagcgtggaagaagattgtgagctgagtattggacatctgttcttgaatagtccctgggcctgccataggaaaggaagttctccagggttacagttcttatccgcgtgaatacacatggctctgttacgaaaaattaatcaggtgctgctgttccttctgatcgtgaccctctgtgtgattctgtataagaaagttcataaggggactgtgcccaagaatgacgcagatgatgaatccgagactcctgaagaactggaagaagagattcctgtggtgatttgtgctgcagcagggaggatgggtgccactatggctgccatcaatagcatctacagcaacactgacgccaacatcttgttctatgtagtgggactccggaatactctgactcgaatacgaaaatggattgaacattccaaactgagagaaataaactttaaaatcgtggaattcaacccgatggtcctcaaagggaagatcagaccagactcatcgaggcctgaattgctccagcctctgaactttgttcgattttatctccctctacttatccaccaacacgagaaagtcatctatttggacgatgatgtaattgtacaaggtgatatccaagaactgtatgacaccaccttggccctgggccacgcggcggctttctcagatgactgcgatttgccctctgctcaggacataaacagactcgtgggacttcagaacacatatatgggctatctggactaccggaagaaggccatcaaggaccttggcatcagccccagcacctgctctttcaatcctggtgtgattgttgccaacatgacagaatggaagcaccagcgcatcaccaagcaattggagaaatggatgcaaaagaatgtggaggaaaacctctatagcagctccctgggaggaggggtggccacctccccaatgctgattgtgtttcatgggaaatattccacaattaaccccctgtggcacataaggcacctgggctggaatccagatgccagatattcggagcattttctgcaggaagctaaattactccactggaatggaagacataaaccttgggacttccctagtgttcacaacgacttatgggaaagctggtttgttcctgaccctgcagggatatttaaactcaatcaccatagctgatataactctacccttaaaatattccctgtatagaaatgtggaattgtccctttgtagccaactataacattgttctttatgaatattacctttgatacatatgatccacaatataaaaaccaaaaactactgtgtgcaaattataccttggaccatataggcattgattaacttctttaagtacatgtgataactatggaaatcaagattatgtgactgaaaaacataaaggaagagacccatctagataacagcaatcaacctgcttaattctgaatgacaattatatccacaaatttttaaaacttctacatgtatttttcacatgaagatctccttaacaggttgccaaccttttcttttataaaactattacatttaaaatatggacgtctgaaaaataaaatattcatcatttttaaaa

SEQ ID NO: 25064 - DNA, 2837 bp, Homo Sapiens
gggaagggatgcaaggaagccctccggcgctgcgctccgaggcgggagacagcgtcccgctgaaaatgtgtgtctgacatgcaagctcagtggggcagagacccgtggattgctgtgccctgccctccggacctggatcatgaaggtgttgggaagaagcttcttctgggtgctgtttcccgtccttccctgggcggtgcaggctgtggagcacgaggaggtggcgcagcgtgtgatcaaactgcaccgcgggcgaggggtggctgccatgcagagccggcagtgggtccgggacagctgcaggaagctctcagggcttctccgccagaagaatgcagttctgaacaaactgaaaactgcaattggagcagtggagaaagacgtgggcctgtcggatgaagagaaactgtttcaggtgcacacgtttgaaattttccagaaagagctgaatgaaagtgaaaattccgttttccaagctgtctacggactgcagagagccctgcagggggattacaaagatgtcgtgaacatgaaggagagcagccggcagcgcctggaggccctgagagaggctgcaataaaggaagaaacagaatatatggaacttctggcagcagaaaaacatcaagttgaagcccttaaaaatatgcaacatcaaaaccaaagtttatccatgcttgacgagattcttgaagatgtaagaaaggcagcggatcgtctggaggaagagatagaggaacatgcttttgacgacaataaatcagtcaagggggtcaattttgaggcagttctgagggtggaggaagaagaggccaattctaagcaaaatataacaaaacgagaagtggaggatgacttgggtcttagcatgctgattgactcccagaacaaccagtatattttgaccaagcccagagattcaaccatcccacgtgcagatcaccactttataaaggacattgttaccataggaatgctgtccttgccttgtggctggctatgtacagccataggattgcctacaatgtttggttatattatttgtggtgtacttctgggaccttcaggactaaatagtattaagtctattgtgcaagtggagacattaggagaatttggggtgttttttactctttttcttgttggcttagaattttctccagaaaagctaagaaaggtgtggaagatttccttacaagggccgtgttacatgacactgttaatgattgcatttggcttgctgtgggggcatctcttgcggatcaaacccacgcagagcgtcttcatttccacgtgtctgtccttgtcaagcacacccctcgtgtccaggttcctcatgggcagtgctcggggtgacaaagaaggcgacattgactacagcaccgtgctcctcggcatgctggtgacgcaggacgtgcagctcgggctcttcatggccgtcatgccgactctcatacaggcgggcgccagtgcatcttctagcattgtcgtggaagttctccgaatcctggttttgattggtcagattcttttttcactagcggcggtttttcttttatgtcttgttataaagaagtatctcattggaccctattatcggaagctgcacatggaaagcaaggggaacaaagaaatcctgatcttgggaatatctgcctttatcttcttaatgttaacggtcacggagctgctggacgtctccatggagctgggctgtttcctggctggagcgctcgtctcctctcagggccccgtggtcaccgaggagatcgccacctccatcgaacccatccgcgacttcctggccatcgttttcttcgcctccatagggctccacgtgttccccacgtttgtggcgtacgagctcacggtgctggtgttcctcaccttgtcagtggtggtgatgaagtttctcctggcggcgctggtcctgtctctcattctgccgaggagcagccagtacatcaagtggatcgtctctgcggggcttgcccaggtcagcgagttttcctttgtcctggggagccgggcgcgaagagcgggcgtcatctctcgggaggtgtacctccttatactgagtgtgaccacgctcagcctcttgctcgccccggtgctgtggagagctgcaatcacgaggtgtgtgcccagaccggagagacggtccagcctctgatggctcggagatgatggaccgtggaagggaagcgtctgtggggagtgagcgcttagatggccagcagctgctccttctgggaagctcgcaccttggcaacagaacagccctctagcagagcgtcagtgcagtcgtgttatcccggcttttacagaatattcttgtcctattttagaattttccggagtagtttatttgcagtctgttgattatgtgcagtagacccgggacactgcgttttaccgatcaccttgaatgtggtgcctggatgtgccttttttttttttccctgaaattattattaattttctattgtgagttcatcagttcatagtttttttagtaaagaagcaaaattaaaaggcttttaaaaatgtacaacttcagaattataatctgttagtcaaatatttgttattaaacatttctgtaatatgaagttgtaatcctggccgtgagcttggaagcttacttttgattcttaaagcctatgttttctaaaatgagacaaatacggatgtctatttgccttttattgtaacttttaaatgaaataatttcatgtcaatttctattagatatatcacttaaaatatttggttttaaatcacaagaatatgtattctttaataaagataatttatgatcatggtaaaaaaaaaaa

SEQ ID NO: 25065 - DNA, 2319 bp, Homo Sapiens
gccaggccctatctccctgccaggaggccggagtgggggaggtcagacggggcggttggagggggagggatgccacgcgcttctgcctcaggtgttcctgcgttgtttgtcagtggagagcagggagtggggccagccagcagaaacagtgggctgtacaacatcaccttcaaatatgacaattgtaccacctacttgaatccagtggggaagcatgtgattgctgacgcccagaatatcaccatcagccagtatgcttgccatgaccaagtggcagtcaccattctttggtccccaggggccctcggcatcgaattcctgaaaggatttcgggtaatactggaggagctgaagtcggagggaagacagtgccaacaactgattctaaaggatccgaagcagctcaacagtagcttcaaaagaactggaatggaatctcaacctttcctgaatatgaaatttgaaacggattatttcgtaaaggttgtcccttttccttccattaaaaacgaaagcaattaccaccctttcttctttagaacccgagcctgtgacctgttgttacagccggacaatctagcttgtaaacccttctggaagcctcggaacctgaacatcagccagcatggctcggacatgcaggtgtccttcgaccacgcaccgcatggctcggacatgcaggtgtccttcgaccacgcaccgcacaacttcggcttccgtttcttctatcttcactacaagctcaagcacgaaggacctttcaagcgaaagacctgtaagcaggagcaaactacagagatgaccagctgcctccttcaaaatgtttctccaggggattatataattgagctggtggatgacactaacacaacaagaaaagtgatgcattatgccttaaagccagtgcactccccgtgggccgggcccatcagagccgtggccatcacagtgccactggtagtcatatcggcattcgcgacgctcttcactgtgatgtgccgcaagaagcaacaagaaaatatatattcacatttagatgaagagagctctgagtcttccacatacactgcagcactcccaagagagaggctccggccgcggccgaaggtctttctctgctattccagtaaagatggccagaatcacatgaatgtcgtccagtgtttcgcctacttcctccaggacttctgtggctgtgaggtggctctggacctgtgggaagacttcagcctctgtagagaagggcagagagaatgggtcatccagaagatccacgagtcccagttcatcattgtggtttgttccaaaggtatgaagtactttgtggacaagaagaactacaaacacaaaggaggtggccgaggctcggggaaaggagagctcttcctggtggcggtgtcagccattgccgaaaagctccgccaggccaagcagagttcgtccgcggcgctcagcaagtttatcgccgtctactttgattattcctgcgagggagacgtccccggtatcctagacctgagtaccaagtacagactcatggacaatcttcctcagctctgttcccacctgcactcccgagaccacggcctccaggagccggggcagcacacgcgacagggcagcagaaggaactacttccggagcaagtcaggccggtccctatacgtcgccatttgcaacatgcaccagtttattgacgaggagcccgactggttcgaaaagcagttcgttcccttccatcctcctccactgcgctaccgggagccagtcttggagaaatttgattcgggcttggttttaaatgatgtcatgtgcaaaccagggcctgagagtgacttctgcctaaaggtagaggcggctgttcttggggcaaccggaccagccgactcccagcacgagagtcagcatgggggcctggaccaagacggggaggcccggcctgcccttgacggtagcgccgccctgcaacccctgctgcacacggtgaaagccggcagcccctcggacatgccgcgggactcaggcatctatgactcgtctgtgccctcatccgagctgtctctgccactgatggaaggactctcgacggaccagacagaaacgtcttccctgacggagagcgtgtcctcctcttcaggcctgggtgaggaggaacctcctgcccttccttccaagctcctctcttctgggtcatgcaaagcagatcttggttgccgcagctacactgatgaactccacgcggtcgcccctttgtaacaaaacgaaagagtctaagcattgccactttaaaaaaaaaaaaaaaaaaaaaaaaaaaaaaaa

SEQ ID NO: 25066 - DNA, 2521 bp, Homo Sapiens
gaagctctttcgcggcgctacggcgttggcaccagtctctagaaaagaagtcagctctggttcggagaagcagcggctggcgtgggccatccggggaatgggcgccctcgtgacctagtgttgcggggcaaaaagggtcttgccggcctcgctcgtgcaggggcgtatctgggcgcctgagcgcggcgtgggagccttgggagccgccgcagcagggggcacacccggaaccggcctgagcgcccgggaccatgaacggggaggccatctgcagcgccctgcccaccattccctaccacaaactcgccgacctgcgctacctgagccgcggcgcctctggcactgtgtcgtccgcccgccacgcagactggcgcgtccaggtggccgtgaagcacctgcacatccacactccgctgctcgacagtgaaagaaaggatgtcttaagagaagctgaaattttacacaaagctagatttagttacattcttccaattttgggaatttgcaatgagcctgaatttttgggaatagttactgaatacatgccaaatggatcattaaatgaactcctacataggaaaactgaatatcctgatgttgcttggccattgagatttcgcatcctgcatgaaattgcccttggtgtaaattacctgcacaatatgactcctcctttacttcatcatgacttgaagactcagaatatcttattggacaatgaatttcatgttaagattgcagattttggtttatcaaagtggcgcatgatgtccctctcacagtcacgaagtagcaaatctgcaccagaaggagggacaattatctatatgccacctgaaaactatgaacctggacaaaaatcaagggccagtatcaagcacgatatatatagctatgcagttatcacatgggaagtgttatccagaaaacagccttttgaagatgtcaccaatcctttgcagataatgtatagtgtgtcacaaggacatcgacctgttattaatgaagaaagtttgccatatgatatacctcaccgagcacgtatgatctctctaatagaaagtggatgggcacaaaatccagatgaaagaccatctttcttaaaatgtttaatagaacttgaaccagttttgagaacatttgaagagataacttttcttgaagctgttattcagctaaagaaaacaaagttacagagtgtttcaagtgccattcacctatgtgacaagaagaaaatggaattatctctgaacatacctgtaaatcatggtccacaagaggaatcatgtggatcctctcagctccatgaaaatagtggttctcctgaaacttcaaggtccctgccagctcctcaagacaatgattttttatctagaaaagctcaagactgttattttatgaagctgcatcactgtcctggaaatcacagttgggatagcaccatttctggatctcaaagggctgcattctgtgatcacaagaccactccatgctcttcagcaataataaatccactctcaactgcaggaaactcagaacgtctgcagcctggtatagcccagcagtggatccagagcaaaagggaagacattgtgaaccaaatgacagaagcctgccttaaccagtcgctagatgcccttctgtccagggacttgatcatgaaagaggactatgaacttgttagtaccaagcctacaaggacctcaaaagtcagacaattactagacactactgacatccaaggagaagaatttgccaaagttatagtacaaaaattgaaagataacaaacaaatgggtcttcagccttacccggaaatacttgtggtttctagatcaccatctttaaatttacttcaaaataaaagcatgtaagtgactgtttttcaagaagaaatgtgtttcataaaaggatatttatatctctgttgctttgactttttttatataaaatccgtgagtattaaagctttattgaaggttctttgggtaaatattagtctccctccatgacactgcagtattttttttaattaatacaagtaaaaagtttgaattttgctacatagttcaatttttatgtctcttttgttaacagaaaccacttttaaaggatagtaattattcttgtttataacagtgccttaaggtatgatgtatttctgatggaagccattttcacattcatgttcttcatggattatttgttacttgtctaagatgcaatttgattttatgaagtatataccctttacccaccagagacagtacagaatccctgccctaaaatcccaggcttaattgccctacaaagggttattaatttaaaactccattattaggattacattttaaagttttatttatgaattccctttaaaaatgatatttcaaaggtaaaacaatacaatataaagaaaaaaataaatatattaataccggcttcctgtccccatttttaacctcagccttccctactgtcaccaacaaccaagctaaataaagtcaacagcctgatgtgt

SEQ ID NO: 25067 - DNA, 3114 bp, Homo Sapiens
  misc_feature (2947)..(2947): n is a, c, g, or t
  misc_feature (3004)..(3004): n is a, c, g, or t
  misc_feature (3066)..(3066): n is a, c, g, or t
gcgcctgaggctgacggctggcaagcagggcaccgcggtgcgctgaagctagagattccgaaagggggttcgggtagttcgctccggagaagtctgagaagggtggctccggtgatcccagccctagctgtttcccatattcctttatccacctgcctttgaaggagaccagactccggctccgcccggcccgtgccgggtggtctgcggccccgagtccgtgaccaagccctccgagtgatcggcctgccctcgggtgcacccgcgggtcccaacgtgggggatccctccatccgcaaagccagggtcctaaagatcgctctgggaaaagggaaggatgccgctcttcttccggaagcggaaacccagtgaggaggctcggaaacgcctggagtaccagatgtgtttggcaaaagaagctggggcagatgacattctcgacatctctaaatgtgagctctcagagattccatttggagcttttgcaacatgcaaagttctgcagaagaaggtgctgatcgtccacacgaatcacctcacttccctgcttcccaaatcctgcagcctcctgagtctggcaaccatcaaggttctagatctccacgataatcagctgacagcccttcctgacgatctggggcagctgactgccctccaggtcttaaacgtggaaaggaatcaactgatgcagctcccacgttccattgggaacctgacccagctccagactctcaatgttaaagacaacaagctgaaggagcttccagacaccgtgggggagcttcgaagcctgcgtaccctcaacatcagtggaaacgagatccagagattgccgcagatgctggctcacgttcgaaccctggagatgctgagccttgacgcctcggccatggtctacccgccgcgggaggtgtgtggtgccggcactgcggccatcttgcagttcctctgcaaagagtcagggctggaatactaccccccttctcagtacttgctgccaattctggagcaagatggaatcgagaactctcgggacagccctgatgggcccacggacagattctcaagggaggagttagagtggcagaacaggttctcagactatgagaagaggaaggaacagaagatgctggagaaactcgagtttgaacggcgcctggaactggggcagcgggagcacacccagctccttcagcagagcagcagccagaaggatgagatccttcagacggtcaaggaggagcagtcccggctggagcagggcctgagtgagcaccagcgccacctcaacgcagagcggcagcggctgcaggagcagctgaagcagacggaacagaacatttccagccggatccagaagctgctgcaggacaatcagagacaaaagaaaagctccgagattttgaaatcgctggaaaatgaaagaataagaatggaacagttgatgtccataacccaggaggagactgagagcctgcggcgacgtgacgttgcctccgccatgcagcagatgctgactgagagctgtaagaaccggctcatccagatggcctacgaatctcagaggcagaacttggtccagcaggcctgttccagcatggccgaaatggatgaacgattccagcagattctgtcgtggcagcaaatggatcagaacaaagccatcagccagatcctgcaggagagcgcgatgcagaaggctgcgttcgaggcactccaggtgaagaaagacctgatgcatcggcagatcaggagccagattaagttaatagaaactgagttattgcagctgacacagctggagttaaagaggaagtccctggacacagagtcactccaggagatgatctcggagcagcgctgggccctcagctccctgctccagcagctgctcaaagagaagcagcagcgagaggaagagctccgggaaatcctgacggagttagaagccaaaagtgaaaccaggcaggaaaattactggctgattcagtatcaacggcttttgaaccagaagcccttgtccttgaagctgcaagaagaggggatggagcgccagctggtggccctcctggaggagctgtcggctgagcactacctgcccatctttgcgcaccaccgcctctcactggacctgctgagccaaatgagcccaggggacctggccaaggtgggcgtctcagaagctggcctgcagcacgagatcctccggagagtccaggaactgctggatgcagccaggatccagccagagctgaaaccaccaatgggtgaggtcgtcacccctacggccccccaggagcctcctgagtctgtgaggccatccgctccccctgcagagctggaggtgcaggcctcagagtgtgtcgtgtgcctggaacgggaggcccagatgatcttcctcaactgtggccacgtctgctgctgccagcagtgctgccagccactgcgcacctgcccgctgtgccgccaggacatcgcccagcgcctccgcatctaccacagcagctgagtgctgcccgcccacctgggcctggtcctagccctgcctcggccactgtgagccccgggctcctgctcagccttgtgccagccagactcgtatgaggctccccctgccctgggccccttccccactgcccaggagcccccatcctaagctccaagcatgtctgggccaggcagaggtgctcctcatccatgacaccaccagtctgaatggtcctgggggctggggctggagaggccgctgcaccaccacccgagcctgggagccagcgtcccagcctaatcacggatctgctgcctcccagctgtcttgactgaaggccaccgcccctgcaggagcttgggtcctcatctgggggccatgcacaggcccgtcccaccctgcatgtgggaagggagcaggagggcctggctgggtgaggggaggccttcctgggaaggngtgtggtgcaggcctgtgctcacagtggcaccagcaaccctgggtctccctctctgntgctccccagaaccccggggccctcctgctctccacaactgtccctccttaccccatgtagntcgatccgaagcaggagtgtcaataaacctgtcttcgtgaaaaaaaaa

SEQ ID NO: 25068 - DNA, 2933 bp, Homo Sapiens
tgggggccccccaggctcgcgcgtggagcgaagcagcatgggcagtcggtgcgcgctggccctggcggtgctctcggccttgctgtgtcaggtctggagctctggggtgttcgaactgaagctgcaggagttcgtcaacaagaaggggctgctggggaaccgcaattgctgccgcgggggcgcggggccaccgccgtgcgcctgccggaccttcttccgcgtgtgcctcaagcactaccaggccagcgtgtcccccgagccgccctgcacctacggcagcgccgtcacccccgtgctgggcgtcgactccttcagtctgcccgacggcgggggcgccgactccgcgttcagcaaccccatccgcttccccttcggcttcacctggccgggcaccttctctctgattattgaagctctccacacagattctcctgatgacctcgcaacagaaaacccagaaagactcatcagccgcctggccacccagaggcacctgacggtgggcgaggagtggtcccaggacctgcacagcagcggccgcacggacctcaagtactcctaccgcttcgtgtgtgacgaacactactacggagagggctgctccgttttctgccgtccccgggacgatgccttcggccacttcacctgtggggagcgtggggagaaagtgtgcaaccctggctggaaagggccctactgcacagagccgatctgcctgcctggatgtgatgagcagcatggattttgtgacaaaccaggggaatgcaagtgcagagtgggctggcagggccggtactgtgacgagtgtatccgctatccaggctgtctccatggcacctgccagcagccctggcagtgcaactgccaggaaggctgggggggccttttctgcaaccaggacctgaactactgcacacaccataagccctgcaagaatggagccacctgcaccaacacgggccaggggagctacacttgctcttgccggcctgggtacacaggtgccacctgcgagctggggattgacgagtgtgaccccagcccttgtaagaacggagggagctgcacggatctcgagaacagctactcctgtacctgcccacccggcttctacggcaaaatctgtgaattgagtgccatgacctgtgcggacggcccttgctttaacgggggtcggtgctcagacagccccgatggagggtacagctgccgctgccccgtgggctactccggcttcaactgtgagaagaaaattgactactgcagctcttcaccctgttctaatggtgccaagtgtgtggacctcggtgatgcctacctgtgccgctgccaggccggcttctcggggaggcactgtgacgacaacgtggacgactgcgcctcctccccgtgcgccaacgggggcacctgccgggatggcgtgaacgacttctcctgcacctgcccgcctggctacacgggcaggaactgcagtgcccccgtcagcaggtgcgagcacgcaccctgccacaatggggccacctgccacgagaggggccaccgctatgtgtgcgagtgtgcccgaggctacgggggtcccaactgccagttcctgctccccgagctgcccccgggcccagcggtggtggacctcactgagaagctagagggccagggcgggccattcccctgggtggccgtgtgcgccggggtcatccttgtcctcatgctgctgctgggctgtgccgctgtggtggtctgcgtccggctgaggctgcagaagcaccggcccccagccgacccctgccggggggagacggagaccatgaacaacctggccaactgccagcgtgagaaggacatctcagtcagcatcatcggggccacgcagatcaagaacaccaacaagaaggcggacttccacggggaccacagcgccgacaagaatggcttcaaggcccgctacccagcggtggactataacctcgtgcaggacctcaagggtgacgacaccgccgtcagggacgcgcacagcaagcgtgacaccaagtgccagccccagggctcctcaggggaggagaaggggaccccgaccacactcaggggtggagaagcatctgaaagaaaaaggccggactcgggctgttcaacttcaaaagacaccaagtaccagtcggtgtacgtcatatccgaggagaaggatgagtgcgtcatagcaactgaggtgtaaaatggaagtgagatggcaagactcccgtttctcttaaaataagtaaaattccaaggatatatgccccaacgaatgctgctgaagaggagggaggcctcgtggactgctgctgagaaaccgagttcagaccgagcaggttctcctcctgaggtcctcgacgcctgccgacagcctgtcgcggcccggccgcctgcggcactgccttccgtgacgtcgccgttgcactatggacagttgctcttaagagaatatatatttaaatgggtgaactgaattacgcataagaagcatgcactgcctgagtgtatattttggattcttatgagccagtcttttcttgaattagaaacacaaacactgcctttattgtcctttttgatacgaagatgtgctttttctagatggaaaagatgtgtgttattttttggatttgtaaaaatatttttcatgatatctgtaaagcttgagtattttgtgatgttcgttttttataatttaaattttggtaaatatgtacaaaggcacttcgggtctatgtgactatatttttttgtatataaatgtatttatggaatattgtgcaaatgttatttgagttttttactgttttgttaatgaagaaattcctttttaaaatatttttccaaaataaattttatgaatgacaaaaaaaaaaaaaaaaaaaaaaaaaaaaaaaaaaaaaaaaaaaaaaaaaaaaaaaaaa

SEQ ID NO: 25069 - DNA, 1538 bp, Homo Sapiens
cccacgcgtccgaagctggccctgcacggctgcaagggaggctcctgtggacaggccaggcaggtgggcctcaggaggtgcctccaggcggccagtgggcctgaggccccagcaagggctagggtccatctccagtcccaggacacagcagcggccaccatggccacgcctgggctccagcagcatcagcagcccccaggaccggggaggcacaggtggcccccaccacccggaggagcagctcctgcccctgtccgggggatgactgattctcctccgccaggccacccagaggagaaggccaccccgcctggaggcacaggccatgaggggctctcaggaggtgctgctgatgtggcttctggtgttggcagtgggcggcacagagcacgcctaccggcccggccgtagggtgtgtgctgtccgggctcacggggaccctgtctccgagtcgttcgtgcagcgtgtgtaccagcccttcctcaccacctgcgacgggcaccgggcctgcagcacctaccgaaccatctataggaccgcctaccgccgcagccctgggctggcccctgccaggcctcgctacgcgtgctgccccggctggaagaggaccagcgggcttcctggggcctgtggagcagcaatatgccagccgccatgccggaacggagggagctgtgtccagcctggccgctgccgctgccctgcaggatggcggggtgacacttgccagtcagatgtggatgaatgcagtgctaggaggggcggctgtccccagcgctgcgtcaacaccgccggcagttactggtgccagtgttgggaggggcacagcctgtctgcagacggtacactctgtgtgcccaagggagggccccccagggtggcccccaacccgacaggagtggacagtgcaatgaaggaagaagtgcagaggctgcagtccagggtggacctgctggaggagaagctgcagctggtgctggccccactgcacagcctggcctcgcaggcactggagcatgggctcccggaccccggcagcctcctggtgcactccttccagcagctcggccgcatcgactccctgagcgagcagatttccttcctggaggagcagctggggtcctgctcctgcaagaaagactcgtgactgcccagcgccccaggctggactgagcccctcacgccgccctgcagcccccatgcccctgcccaacatgctgggggtccagaagccacctcggggtgactgagcggaaggccaggcagggccttcctcctcttcctcctccccttcctcgggaggctccccagaccctggcatgggatgggctgggatcttctctgtgaatccacccctggctacccccaccctggctaccccaacggcatcccaaggccaggtgggccctcagctgagggaaggtacgagctccctgctggagcctgggacccatggcacaggccaggcagcccggaggctgggtggggcctcagtgggggctgctgcctgacccccagcacaataaaaatgaaacgtg

SEQ ID NO: 25070 - DNA, 1266 bp, Homo Sapiens
gctggggacatgagaggcacaccgaagacccacctcctggccttctccctcctctgcctcctctcaaaggtgcgtacccagctgtgcccgacaccatgtacctgcccctggccacctccccgatgcccgctgggagtacccctggtgctggatggctgtggctgctgccgggtatgtgcacggcggctgggggagccctgcgaccaactccacgtctgcgacgccagccagggcctggtctgccagcccggggcaggacccggtggccggggggccctgtgcctcttggcagaggacgacagcagctgtgaggtgaacggccgcctgtatcgggaaggggagaccttccagccccactgcagcatccgctgccgctgcgaggacggcggcttcacctgcgtgccgctgtgcagcgaggatgtgcggctgcccagctgggactgcccccaccccaggagggtcgaggtcctgggcaagtgctgccctgagtgggtgtgcggccaaggagggggactggggacccagccccttccagcccaaggaccccagttttctggccttgtctcttccctgccccctggtgtcccctgcccagaatggagcacggcctggggaccctgctcgaccacctgtgggctgggcatggccacccgggtgtccaaccagaaccgcttctgccgactggagacccagcgccgcctgtgcctgtccaggccctgcccaccctccaggggtcgcagtccacaaaacagtgccttctagagccgggctgggaatggggacacggtgtccaccatccccagctggtggccctgtgcctgggccctgggctgatggaagatggtccgtgcccaggcccttggctgcaggcaacactttagcttgggtccaccatgcagaacaccaatattaacacgctgcctggtctgtctggatcccgaggtatggcagaggtgcaagacctagtcccctttcctctaactcactgcctaggaggctggccaaggtgtccagggtcctctagcccactccctgcctacacacacagcctatatcaaacatgcacacgggcgagctttctctccgacttcccctgggcaagagatgggacaagcagtcccttaatattgaggctgcagcaggtgctgggctggactggccatttttctgggggtaggatgaagagaaggcacacagagattctggatctcctgctgccttttctggagtttgtaaaattgttcctgaatacaagcctatgcgtga

SEQ ID NO: 25071 - DNA, 2379 bp, Homo Sapiens
gttgctccggcggcgctcggggagggagccagcagcctagggcctaggcccgggccaccatggcgctgcctccaggcccagccgccctccggcacacactgctgctcctgccagcccttctgagctcaggttggggggagttggagccacaaatagatggtcagacctgggctgagcgggcacttcgggagaatgaacgccacgccttcacctgccgggtggcaggggggcctggcacccccagattggcctggtatctggatggacagctgcaggaggccagcacctcaagactgctgagcgtgggaggggaggccttctctggaggcaccagcaccttcactgtcactgcccatcgggcccagcatgagctcaactgctctctgcaggaccccagaagtggccgatcagccaacgcctctgtcatccttaatgtgcaattcaagccagagattgcccaagtcggcgccaagtaccaggaagctcagggcccaggcctcctggttgtcctgtttgccctggtgcgtgccaacccgccggccaatgtcacctggatcgaccaggatgggccagtgactgtcaacacctctgacttcctggtgctggatgcgcagaactacccctggctcaccaaccacacggtgcagctgcagctccgcagcctggcacacaacctctcggtggtggccaccaatgacgtgggtgtcaccagtgcgtcgcttccagccccaggcccctcccggcacccatctctgatatcaagtgactccaacaacctaaaactcaacaacgtgcgcctgccacgggagaacatgtccctcccgtccaaccttcagctcaatgacctcactccagattccagagcagtgaaaccagcagaccggcagatggctcagaacaacagccggccagagcttctggacccggagcccggcggcctcctcaccagccaaggtttcatccgcctcccagtgctgggctatatctatcgagtgtccagcgtgagcagtgatgagatctggctctgagccgagggcgagacaggagtattctcttggcctctggacaccctcccattcctccaaggcatcctctacctagctaggtcaccaacgtgaagaagttatgccactgccacttttgcttgccctcctggctggggtgccctccatgtcatgcacgtgatgcatttcactgggctgtaacccgcaggggcacaggtatctttggcaaggctaccagttggacgtaagcccctcatgctgactcagggtgggccctgcatgtgatgactgggcccttccagagggagctctttggccaggggtgttcagatgtcatccagcatccaagtgtggcatggcctgctgtataccccaccccagtactccacagcaccttgtacagtaggcatgggggcgtgcctgtgtgggggacagggagggccctgcatggattttcctccttcctatgctatgtagccttgttccctcaggtaaaatttaggaccctgctagctgtgcagaacccaattgccctttgcacagaaaccaacccctgacccagcggtaccggccaagcacaaacgtcctttttgctgcacacgtctctgcccttcacttcttctcttctgtccccacctcctcttgggaattctaggttacacgttggaccttctctactacttcactgggcactagacttttctattggcctgtgccatcgcccagtattagcacaagttagggaggaagaggcaggcgatgagtctagtagcacccaggacggcttgtagctatgcatcattttcctacggcgttagcactttaagcacatcccctaggggagggggtgagtgaggggcccagagccctctttgtggcttccccacgtttggccttctgggattcactgtgagtgtcctgagctctcggggttgatggtttttctctcagcatgtctcctccaccacgggaccccagccctgaccaacccatggttgcctcatcagcaggaaggtgcccttcctggaggatggtcgccacaggcacataattcaacagtgtggaagctttaggggaacatggagaaagaaggagaccacataccccaaagtgacctaagaacactttaaaaagcaacatgtaaatgattggaaattaatatagtacagaatatatttttcccttgttgagatcttcttttgtaatgtttttcatgttactgcctagggcggtgctgagcacacagcaagtttaataaacttgactgaattcatttaaaaaaaaaaaaaaaaaaaaaaaaaaaaaaaaaaaaaaaaaaaaaaaaaaaaaaaaaaaaaaaaaaaaaaaaaaaaaaaaaaaaaaaaaaaaaaaaaaa

SEQ ID NO: 25072 - DNA, 847 bp, Homo Sapiens
cgtcagtctagaaggataagagaaagaaagttaagcaactacaggaaatggctttgggagttccaatatcagtctatcttttattcaacgcaatgacagcactgaccgaagaggcagccgtgactgtaacacctccaatcacagcccagcaagctgacaacatagaaggacccatagccttgaagttctcacacctttgcctggaagatcataacagttactgcatcaacggtgcttgtgcattccaccatgagctagagaaagccatctgcaggtgttttactggttatactggagaaaggtgtgagcacttgactttaacttcatatgctgtggattcttatgaaaaatacattgcaattgggattggtgttggattactattaagtggttttcttgttattttttactgctatataagaaagaggtatgaaaaagacaaaatatgaagtcacttcatatgcaatcgtttgacaaatagttattcaggccctataatgtgtcaggcactgacatgtaaaatttttttaattaaaaaagagctgtaatctggcaaaaagtttctatgtaatatttttcatgccttttctcataaacccagacgagtggtaaaaatttgccttcagttgtaataggagagttcaaacgtacagtctcccttcaacctatctctgtctgcccatatcaaaattataaatgaggaggacagcaggccccaagaaagtagggactaagtatgtcttgttcaaaattgtatattcagtgacttacactatgcctagcacacaacacacactgagtaaatatttgttgagtgaaataaaatcaagaaacaagtaaaaactga

SEQ ID NO: 25073 - DNA, 983 bp, Homo Sapiens
ttccgggccctggcgtctcgtctccttaccctggggctacccttgcccggtcctactgcccgcggttaacccgccgcgagccgcctctcccctccccgcccgactcaaccctgccctcccccgtgctttgcagacgccgcccgggggcccaggcggctgatgcgtgtgggcctcgcgctgatcttggtgggccacgtgaacctgctgctgggggccgtgctgcatggcaccgtcctgcggcacgtggccaatccccgcggcgctgtcacgccggagtacaccgtagccaatgtcatctctgtcggctcggggctgctgagcgtttccgtgggacttgtggccctcctggcgtccaggaaccttcttcgccctccactgcactgggtcctgctggcactagctctggtgaacctgctcttgtccgttgcctgctccctgggcctccttcttgctgtgtcactcactgtggccaacggtggccgccgccttattgctgactgccacccaggactgctggatcctctggtaccactggatgaggggccgggacatactgactgcccctttgaccccacaagaatctatgatacagccttggctctctggatcccttctttgctcatgtctgcaggggaggctgctctatctggttactgctgtgtggctgcactcactctacgtggagttgggccctgcaggaaggacggacttcaggggcagctagaggaaatgacagagcttgaatctcctaaatgtaaaaggcaggaaaatgagcagctactggatcaaaatcaagaaatccgggcatcacagagaagttgggtttaggacaggtgctgttccgagactcagtcctaaagggttttttttcccactaagcaaggggccctgacctcgggatgagataacaaattgtaataaagtaacttctcttttcttctaaaaaaaaaaaaaaaaaaaaaaaaaaaaaaaaaaaaaaaaaa

SEQ ID NO: 25074 - DNA, 1264 bp, Homo Sapiens
gttactcggtggtggcggagtctacggaagccgttttcgcttcacttttcctggctgtagagcgctttccccctggcgggtgagagtgcagagacgaaggtgcgagatgagcactatgttcgcggacactctcctcatcgtttttatctctgtgtgcacggctctgctcgcagagggcataacctgggtcctggtttacaggacagacaagtacaagagactgaaggcagaagtggaaaaacagagtaaaaaattggaaaagaagaaggaaacaataacagagtcagctggtcgacaacagaaaaagaaaatagagagacaagaagagaaactgaagaataacaacagagatctatcaatggttcgaatgaaatccatgtttgctattggcttttgttttactgccctaatgggaatgttcaattccatatttgatggtagagtggtggcaaagcttccttttacccctctttcttacatccaaggactgtctcatcgaaatctgctgggagatgacaccacagactgttccttcattttcctgtatattctctgtactatgtcgattcgacagaacattcagaagattctcggccttgccccttcacgagccgccaccaagcaggcaggtggatttcttggcccaccacctccttctgggaagttctcttgaactcaagaactctttattttctatcattctttctagacacacacacatcagactggcaactgttttgtagcaagagccataggtagccttactacttgggcctctttctagttttgaattatttctaagccttttgggtatgattagagtgaaaatggcagccagcaaacttgatagtgcttttggtcctagatgatttttatcaaataagtggattgattagttaagttcaggtaatgtttatgtaatgaaaaacaaatagcatccttcttgtttcatttacataagtattttctgtgggaccgactctcaaggcactgtgtatgccctgcaagttggctgtctatgagcatttagagatttagaagaaaaatttagtttgtttaacccttgtaactgtttgttttgttgttgtttttttttcaagccaaatacatgacataagatcaataaagaggccaaatttttagctgttttatgtacaaggagagatctgtttcattttgttttgccgtatttctagatataagttttagcatgggccaggaaggactaaaataaaagtttttaaggtacaaaaaaaaaaaaaaa

SEQ ID NO: 25075 - DNA, 471 bp, Homo Sapiens
gcatttttgtctgtgctccctgatcttcaggtcaccaccatgaagttcttagcagtcctggtactcttgggagtttccatctttctggtctctgcccagaatccgacaacagctgctccagctgacacgtatccagctactggtcctgctgatgatgaagcccctgatgctgaaaccactgctgctgcaaccactgcgaccactgctgctcctaccactgcaaccaccgctgcttctaccactgctcgtaaagacattccagttttacccaaatgggttggggatctcccgaatggtagagtgtgtccctgagatggaatcagcttgagtcttctgcaattggtcacaactattcatgcttcctgtgatttcatccaactacttaccttgcctacgatatcccctttatctctaatcagtttattttctttcaaataaaaaataactatgagcaacataaaaaaaaaaaaa

SEQ ID NO: 25076 - DNA, 1470 bp, Homo Sapiens
ctcggctggatttaaggttgccgctagccgcctgggaatttaagggacccacactaccttcccgaagttgaaggcaagcggtgattgtttgtagacggcgctttgtcatgggacctgtgcggttgggaatattgcttttcctttttttggccgtgcacgaggcttgggctgggatgttgaaggaggaggacgatgacacagaacgcttgcccagcaaatgcgaagtgtgtaagctgctgagcacagagctacaggcggaactgagtcgcaccggtcgatctcgagaggtgctggagctggggcaggtgctggatacaggcaagaggaagagacacgtgccttacagcgtttcagagacaaggctggaagaggccttagagaatttatgtgagcggatcctggactatagtgttcacgctgagcgcaagggctcactgagatatgccaagggtcagagtcagaccatggcaacactgaaaggcctagtgcagaagggggtgaaggtggatctggggatccctctggagctttgggatgagcccagcgtggaggtcacatacctcaagaagcagtgtgagaccatgttggaggagtttgaagacattgtgggagactggtacttccaccatcaggagcagcccctacaaaattttctctgtgaaggtcatgtgctcccagctgctgaaactgcatgtctacaggaaacttggactggaaaggagatcacagatggggaagagaaaacagaaggggaggaagagcaggaggaggaggaggaagaggaggaagaggaagggggagacaagatgaccaagacaggaagccaccccaaacttgaccgagaagatctttgacccttgcctttgagcccccaggaggggaagggatcatggagagccctctaaagcctgcactctccctgctccacagctttcagggtgtgtttatgagtgactccacccaagcttgtagctgttctctcccatctaacctcaggcaagatcctggtgaaacagcatgacatggcttctggggtggagggtgggggtggaggtcctgctcctagagatgaactctatccagccccttaattggcaggtgtatgtgctgacagtactgaaagctttcctctttaactgatcccacccccacccaaaagtcagcagtggcactggagctgtgggctttggggaagtcacttagctccttaaggtctgtttttagacccttccaaggaagaggccagaacggacattctctgcgatctatatacattgcctgtatccaggaggctacacaccagcaaaccgtgaaggagaatgggacactgggtcatggcctggagttgctgataatttaggtgggatagatacttggtctacttaagctcaatgtaacccagagcccaccatatagttttataggtgctcaactttctatatcgctattaaacttttttctttttttcta

SEQ ID NO: 25077 - DNA, 7011 bp, Homo Sapiens
atgcagtccggccgcggccccccacttccagcccccggcctggccttggctttgaccctgactatgttggccagacttgcatccgcggcttccttcttcggtgagaaccacctggaggtgcctgtggccacggctctgaccgacatagacctgcagctgcagttctccacgtcccagcccgaagccctccttctcctggcagcaggcccagctgaccacctcctgctgcagctctactctggacgcctgcaggtcagacttgttctgggccaggaggagctgaggctgcagactccagcagagacgctgctgagtgactccatcccccacactgtggtgctgactgtcgtagagggctgggccacgttgtcagtcgatgggtttctgaacgcctcctcagcagtcccaggagcccccctagaggtcccctatgggctctttgttgggggcactgggacccttggcctgccctacctgaggggaaccagccgacccctgaggggttgcctccatgcagccaccctcaatggccgcagcctcctccggcctctgacccccgatgtgcatgagggctgtgctgaagagttttctgccagtgatgatgtggccctgggcttctctgggccccactctctggctgccttccctgcctggggcactcaggacgaaggaaccctagagtttacactcaccacacagagccggcaggcacccttggccttccaggcagggggccggcgtggggacttcatctatgtggacatatttgagggccacctgcgggccgtggtggagaagggccagggtaccgtattgctccacaacagtgtgcctgtggccgatgggcagccccatgaggtcagtgtccacatcaatgctcaccggctggaaatctccgtggaccagtaccctacgcatacttcgaaccgaggagtcctcagctacctggagccacggggcagtctccttctcggggggctggatgcagaggcctctcgtcacctccaggaacaccgcctgggcctgacaccagaggccaccaatgcctccctgctgggctgcatggaagacctcagtgtcaatggccagaggcgggggctgcgggaagctttgctgacgcgcaacatggcagccggctgcaggctggaggaggaggagtatgaggacgatgcctatggacattatgaagctttctccaccctggcccctgaggcttggccagccatggagctgcctgagccatgcgtgcctgagccagggctgcctcctgtctttgccaatttcacccagctgctgactatcagcccactggtggtggccgaggggggcacagcctggcttgagtggaggcatgtgcagcccacgctggacctgatggaggctgagctgcgcaaatcccaggtgctgttcagcgtgacccgaggggcacgccatggcgagctcgagctggacatcccgggagcccaggcacgaaaaatgttcaccctcctggacgtggtgaaccgcaaggcccgcttcatccacgatggctctgaggacacctccgaccagctggtgctggaggtgtcggtgacggctcgggtgcccatgccctcatgccttcggaggggccaaacatacctcctgcccatccaggtcaaccctgtcaatgacccaccccacatcatcttcccacatggcagcctcatggtgatcctggaacacacgcagaagccgctggggcctgaggttttccaggcctatgacccggactctgcctgtgagggcctcaccttccaggtccttggcacctcctctggcctccccgtggagcgccgagaccagcctggggagccggcgaccgagttctcctgccgggagttggaggccggcagcctagtctatgtccaccgcggtggtcctgcacaggacttgacgttccgggtcagcgatggactgcaggccagccccccggccacgctgaaggtggtggccatccggccggccatacagatccaccgcagcacagggttgcgactggcccaaggctctgccatgcccatcttgcccgccaacctgtcggtggagaccaatgccgtggggcaggatgtgagcgtgctgttccgcgtcactggggccctgcagtttggggagctgcagaagcagggggcaggtggggtggagggtgctgagtggtgggccacacaggcgttccaccagcgggatgtggagcagggccgcgtgaggtacctgagcactgacccacagcaccacgcttacgacaccgtggagaacctggccctggaggtgcaggtgggccaggagatcctgagcaatctgtccttcccagtgaccatccagagagccactgtgtggatgctgcggctggagccactgcacactcagaacacccagcaggagaccctcaccacagcccacctggaggccaccctggaggaggcaggcccaagccccccaaccttccattatgaggtggttcaggctcccaggaaaggcaaccttcaactacagggcacaaggctgtcagatggccagggcttcacccaggatgacatacaggctggccgggtgacctatggggccacagcacgtgcctcagaggcagtcgaggacaccttccgtttccgtgtcacagctccaccatatttctccccactctataccttccccatccacattggtggtgacccagatgcgcctgtcctcaccaatgtcctcctcgtggtgcctgagggtggtgagggtgtcctctctgctgaccacctctttgtcaagagtctcaacagtgccagctacctctatgaggtcatggagcggccccgccatgggaggttggcttggcgtgggacacaggacaagaccactatggtgacatccttcaccaatgaagacctgttgcgtggccggctggtctaccagcatgatgactccgagaccacagaagatgatatcccatttgttgctacccgccagggcgagagcagtggtgacatggcctgggaggaggtacggggtgtcttccgagtggccatccagcccgtgaatgaccacgcccctgtgcagaccatcagccggatcttccatgtggcccggggtgggcggcggctgctgactacagacgacgtggccttcagcgatgctgactcgggctttgctgacgcccagctggtgcttacccgcaaggacctcctctttggcagtatcgtggccgtagatgagcccacgcggcccatctaccgcttcacccaggaggacctcaggaagaggcgagtactgttcgtgcactcaggggctgaccgtggctggatccagctgcaggtgtccgacgggcaacaccaggccactgcgctgctggaggtgcaggcctcggaaccctacctccgtgtggccaacggctccagccttgtggtccctcaagggggccagggcaccatcgacacggccgtgctccacctggacaccaacctcgacatccgcagtggggatgaggtccactaccacgtcacagctggccctcgctggggacagctagtccgggctggtcagccagccacagccttctcccagcaggacctgctggatggggccgttctctatagccacaatggcagcctcagcccccgcgacaccatggccttctccgtggaagcagggccagtgcacacggatgccaccctacaagtgaccattgccctagagggcccactggccccactgaagctggtccggcacaagaagatctacgtcttccagggagaggcagctgagatcagaagggaccagctggaggcagcccaggaggcagtgccacctgcagacatcgtattctcagtgaagagcccaccgagtgccggctacctggtgatggtgtcgcgtggcgccttggcagatgagccacccagcctggaccctgtgcagagcttctcccaggaggcagtggacacaggcagggtcctgtacctgcactcccgccctgaggcctggagcgatgccttctcgctggatgtggcctcaggcctgggtgctcccctcgagggcgtccttgtggagctggaggtgctgcccgctgccatcccactagaggcgcaaaacttcagcgtccctgagggtggcagcctcaccctggcccctccactgctccgtgtctccgggccctacttccccactctcctgggcctcagcctgcaggtgctggagccaccccagcatggagccctgcagaaggaggacggacctcaagccaggaccctcagcgccttctcctggagaatggtggaagagcagctgatccgctacgtgcatgacgggagcgagacactgacagacagttttgtcctgatggctaatgcctccgagatggatcgccagagccatcctgtggccttcactgtcactgtcctgcctgtcaatgaccaaccccccatcctcactacaaacacaggcctgcagatgtgggagggggccactgcgcccatccctgcggaggctctgaggagcacggacggcgactctgggtctgaggatctggtctacaccatcgagcagcccagcaacgggcgggtagtgctgcggggggcgccgggcactgaggtgcgcagcttcacgcaggcccagctggacggcgggctcgtgctgttctcacacagaggaaccctggatggaggcttccgcttccgcctctctgacggcgagcacacttcccccggacacttcttccgagtgacggcccagaagcaagtgctcctctcgctgaagggcagccagacactgactgtctgcccagggtccgtccagccactcagcagtcagaccctcagggccagctccagcgcaggcactgacccccagctcctgctctaccgtgtggtgcggggcccccagctaggccggctgttccacgcccagcaggacagcacaggggaggccctggtgaacttcactcaggcagaggtctacgctgggaatattctgtatgagcatgagatgccccccgagcccttttgggaggcccatgataccctagagctccagctgtcctcgccgcctgcccgggacgtggccgccacccttgctgtggctgtgtcttttgaggctgcctgtccccagcgccccagccacctctggaagaacaaaggtctctgggtccccgagggccagcgggccaggatcaccgtggctgctctggatgcctccaatctcttggccagcgttccatcaccccagcgctcagagcatgatgtgctcttccaggtcacacagttccccagccggggccagctgttggtgtccgaggagcccctccatgctgggcagccccacttcctgcagtcccagctggctgcagggcagctagtgtatgcccacggcggtgggggcacccagcaggatggcttccactttcgtgcccacctccaggggccagcaggggcctccgtggctggaccccaaacctcagaggcctttgccatcacggtgagggatgtaaatgagcggccccctcagccacaggcctctgtcccactccggctcacccgaggctctcgtgcccccatctcccgggcccagctgagtgtggtggacccagactcagctcctggggagattgagtacgaggtccagcgggcaccccacaacggcttcctcagcctggtgggtggtggcctggggcccgtgacccgcttcacgcaagccgatgtggattcagggcggctggccttcgtggccaacgggagcagcgtggcaggcatcttccagctgagcatgtctgatggggccagcccacccctgcccatgtccctggctgtggacatcctaccatccgccatcgaggtgcagctgcgggcacccctggaggtgccccaagctttggggcgctcctcactgagccagcagcagctccgggtggtttcagatcgggaggagccagaggcagcataccgcctcatccagggaccccagtatgggcatctcctggtgggcgggcggcccacctcggccttcagccaattccagatagaccagggcgaggtggtctttgccttcaccaacttctcctcctctcatgaccacttcagagtcctggcactggctaggggtgtcaatgcatcagccgtagtgaacgtcactgtgagggctctgctgcatgtgtgggcaggtgggccatggccccagggtgccaccctgcgcctggaccccaccgtcctagatgctggcgagctggccaaccgcacaggcagtgtgccgcgcttccgcctcctggagggaccccggcatggccgcgtggtccgcgtgccccgagccaggacggagcccgggggcagccagctggtggagcagttcactcagcaggaccttgaggacgggaggctggggctggaggtgggcaggccagaggggagggcccccggccccgcaggtgacagtctcactctggagctgtgggcacagggcgtcccgcctgctgtggcctccctggactttgccactgagccttacaatgctgcccggccctacagcgtggccctgctcagtgtccccgaggccgcccggacggaagcagggaagccagagagcagcacccccacaggcgagccaggccccatggcatccagccctgagcccgctgtggccaagggaggcttcctgagcttccttgaggccaacatgttcagcgtcatcatccccatgtgcctggtacttctgctcctggcgctcatcctgcccctgctcttctacctccgaaaacgcaacaagacgggcaagcatgacgtccaggtcctgactgccaagccccgcaacggcctggctggtgacaccgagacctttcgcaaggtggagccaggccaggccatcccgctcacagctgtgcctggccaggggccccctccaggaggccagcctgacccagagctgctgcagttctgccggacacccaaccctgcccttaagaatggccagtactgggtgtgaggcctggcctgggcccagatgctgatcgggccagggacaggc

SEQ ID NO: 25078 - DNA, 4288 bp, Homo Sapiens
attaattgcagtttttatttacaactttcaacacaaactgatagcttatcatttttaagatcattttattttcctttatcatagttcagggttttttcatagtagttttcattaacaaactttttaaattaaaaaaaatctgtttatttgtaaatatgtctgactggcatcacagaactgttctttgacaaaaactataaatggtagatattcgagttaattataaatgatgccctagagtgacatatagaatccaaagacaaaaatgggcagatactagtaaagggagacactacttaaggtaacacgcaaatgggtctgttatcatgaaattgggacatttttagagatatttagtaggggaactgaatagcttttttagaagttaagttctaattctcacatttagtcattggaattttaagtgtactgtgtaaatgctgttaatgttattgtcttttatggcttttgttttagcctgatgtaaatgctgacattgtgcattggctctcttggactgcccaaggctttttatctccacttgctgcagcagtaggaggtgttgccagccaagaagtattgaaagctgtaacaggaaaattttctcctttgtgccagtgggtatatcttgaagcagcagatattgttgaatcactaggcaaacctgaatgtgaagaatttctcccacgaggagatagatatgatgccttaagagcttgcattggagacactttgtgtcagaaactgcaaaatttaaacatcttcttagtagggtgtggagccataggctgtgaaatgttgaaaaattttgctttacttggtgttggcacaagcaaagagaaaggaatgattacagttacagatcctgacttgatagagaaatccaacttaaatagacagttcctatttcgtcctcatcacatacagaaacctaaaagctacactgctgctgatgctactctgaaaataaattctcaaataaagatagatgcacacctgaacaaagtatgtccaaccactgagaccatttacaatgatgagttctatactaaacaagatgtaattattacagcattagataatgtggaagccaggagatacgtagacagtcgttgcttagcaaatctaaggcctcttttagattctggaacaatgggcactaagggacacactgaagttattgtaccgcatttgactgagtcttacaatagtcatcgggatcccccagaagaggaaataccattttgtactctaaaatcctttccagctgctattgaacataccatacagtgggcaagagataaggtagaaagttccttttcccacaaaccttcattgtttaacaaattttggcaaacctattcatctgcagaagaagtcttacagaagatacagagtggacacagtttagaaggctgttttcaagttataaagttacttagcagaagacctagaaattggtcccagtgtgtagaattagcaagattaaagtttgaaaaatattttaaccataaggctcttcagcttcttcactgtttccctctggacatacgattaaaagatggcagtttattttggcagtcaccaaagaggccaccctctccaataaaatttgatttaaatgagcctttgcacctcagtttccttcagaatgctgcaaaactatatgctacagtatattgtattccatttgcagaagaggacttatcagcagatgccctcttgaatattctttcagaagtaaagattcaggaattcaagccttccaataaggttgttcaaacagatgaaactgcaaggaaaccagaccatgttcctattagcagtgaagatgagaggaatgcaattttccaactagaaaaggctattttatctaatgaagccaccaaaagtgaccttcagatggcagtgctttcatttgaaaaagatgatgatcataatggacacatagatttcatcacagctgcatcaaatcttcgtgccaaaatgtacagcattgaaccagctgaccgtttcaaaacaaagcgcatagctggtaaaattatacctgctatagcaacaaccactgctacagtttctggcttgggtgccttggagatgatcaaagtaactggtggctatccatttgaagcttacaaaaattgttttcttaacttagccattccaattgtagtatttacagagacaactgaagtaaggaaaactaaaatcagaaatggaatatcatttacaatttgggatcgatggaccgtacatggaaaagaagatttcaccctcttggatttcataaatgcagtcaaagagaagtatggaattgagccaacaatggtggtacagggagtcaaaatgctttatgttcctgtaatgcctggtcatgcaaaaagattgaagttaacaatgcataaacttgtaaaacctactactgaaaagaaatatgtggatcttactgtgtcatttgctccagacattgatggagatgaagatttgccgggacctccagtaagatactacttcagtcatgacactgattaatacaagttgtcttaacgttactccaggaccacttgattttggaaagagtgcacttaattcagaagctaaagaaaatcagttcataatactatggatttctctttcattaagccttaattttaagggaaacatcagtaagaaactgcactgaagaattataaaacattttggggcatagcatacacttgtctaacggttcacacgtggctatgatcacaagcaactttgaactggaatgctatttacaaaagttttgtgtattaatctgtgtattaatctctctggataaaaagaaggaaaaaatatgtatgaccagaacagatatggatgaagaaattgaaagcaacgaatgcaactattcaaaaagtttaattttatgaatttcttttttgtttagtcttgaagactgattttctatgcaaatagtgtttggcatcctgcacctctgatatgatttggctttgagaatttaataccactgggaagaagtatggtagtggtggatgaagggtggatattttaaattgtgcagttacagtttactgtcctattacctctgctcgtttaaccagtttgttatatcactgtgtccccaaaatcaggatttttgttgatagcatcagtgttgtaggagcaataggtcagatgagacatattaacttagactaaacgtgaacagtattatatggactctcacaacgctcttagagaatccgtgaatgtgaacagacaaatgtggctaaccatttgattcttcagtatgccttctaatgtggctattttatttatgtgagactctaaacctgattgtcctaatatataaaactaaaagattttgtaaagggagtgtctttagaaatagatgaaatgtagaatgttaaaaattattgctagggtagtcttttttttttccagaaacctaattagggtattaaattttgtgttttttttgttttttttttttaaacagaagcatgttatttcattcccattcccagaaagggagttaatgaagataaaaatttattttttaaggtctttattgagagaaactttgttttctgatatgaactattgcagatgtttttataaatactttcattaaaatgatgtaaacagtagtacccaacactgtaaactcagtgaaaatagtaaatgattcttttattactaagactgtcatgcattctgaagcagttggcttttttttaaccataggaagtaatttccctctagctcctttccttctactctcctgctcagaccattagtaggtactttgttaaataaaaaactagattaacatcaatattactccaatttggtatcttttacactatgtattatacctactttctttttatttcatttacaaatagtttaaattactttatcaaccagctgtattgtttccctcttgtaaaagtaccatcaagtggggaaaatgtatgtggaagtggagagtgaatttgtatgactaaaggataatctgtacatggggaagtgggcaaaagtggataggatgaatttaaagaaaatgactacctttggaaaaaagaaattaaattttgttcacatatcctaccctttcccattgtgcatatcccaagtgtcatatttaaaactaaggttacttaaaacagaatccaggaatatcaaggctctgtggcttggaattttagaggataggactaataaaaggacttttgcaaagaaaaaaaaaaaaaaaaaaaaaaaaaaaaaaaaaaaaaaaaaa

SEQ ID NO: 25079 - DNA, 4994 bp, Homo Sapiens
acagtccctggtaaacacaagtagtattacaagtcgggagctcttcaagtcttggatgagactgtagagcggtcttgtgcggcaatgtgctaccttaaaataaataaataaataaacccctgttatgtccggagtttgtttccacccggagaggaatggaagagcaccagagagcgcttagctttctggttggatgttttgggttcatcagacttaacttctgctagaaattgttaccagcctctattagaaaatcccatggtgtcagaaagtgatttttctaaagacgttgcagtgcaagtgttgcctttggataaaatagaagagaacaacaagcaaaaagcaaatgacatcttcatttctcagtatacaatgggacagaaagatgctctaagaacagttttaaagcaaaatgtctcactttgtctcacaggctggagtgatcacagtggggtgatcacaactcactgcagtctctacctcctcaggctcatgagatcctcccacctcagcctcccgagtagctgggactacagagctcaaagcatgcctgtttttaaggaagtaaaggtacatctgttagaagatgcaggcatagagaaggatgctgttactcaggagactagaatttcacccagtggaattgattcagctacaaccgtggctgcagcaactgctgctgccattgcaaccgcagctccgttgataaaggtgcagagtgatttggaagcaaaagtcaattctgttacagaattacttagtaaattacaggagactgataaacacctgcaacgtgttacagagcagcaaacaagcattcagaggaaacaagagaaattacattgtcatgatcacgaaaagcaaatgaatgtgtttatggagcagcacataaggcatcttgaaaagttacaacaacaacaaatagatattcagactcattttattagtgctgcactcaagactagtagttttcagcctgttagtatgccctcctccagagcagtggaaaagtattccgtaaaaccagaacaccctaatcttggtagctgtaatccatctttatataacacatttgcttccaaacaagcacctttaaaagaagttgaagatacgagttttgataaacagaaatctcctttggagacaccagcacctcgcagatttgctcctgtacctgtttcaagggatgatgaactatcaaagagggaaaatcttttggaagaaaaagaaaatatggaagtgtcgtgtcacagaggaaatgtaagactattggaacaaattttgaataataatgattctttgacaagaaaaagtgaatcatcaaacaccacctcactaactaggtcaaaaataggatggactcctgagaaaacaaacagatttccttcctgtgaagagctagaaacaactaaagtgactatgcagaagtctgatgatgttcttcatgaccttggccaaaaagagaaagaaacaaatagcatggtccagccaaaagaatctctgagtatgttgaagcttccagatcttccacagaattctgttaagcttcaaacaaccaatacaacaagatctgtattgaaagatgctgagaagattttgagaggagtacaaaacaataaaaaagtacttgaagaaaacctggaagctattattcgtgcaaaagatggagctgccatgtattcgcttatcaatgctttatctaccaacagagagatgtcagagaaaattaggatcagaaagacagtggatgaatggattaaaactatttctgcagaaattcaggatgaactgtcaagaacagattatgaacaaaaaagatttgatcagaagaatcagagaaccaagaaaggtcagaatatgactaaagatattagaaccaacacacaagataaaactgtcaacaaatctgtaattccaagaaaacattctcaaaagcaaatagaagagcattttagaaatctacctatgaggggcatgcctgcttcaagtttacagaaagagagaaaggaagggcttttgaaagcaaccacagtaatacaagatgaagattatatgttacaagtctatggaaagccagtttatcagggccatcgaagcactcttaaaaaaggaccatatctcagatttaattctccatctcctaagtccagaccacagagaccaaaagtaatagaacgagttaaaggcactaaggtaaagtcaataagaacacagactgacttctatgcaacaaaacctaagaagatggattctaaaatgaaacattctgttcctgtgttacctcatggcgatcagcaatatttgttcagcccaagtagagaaatgcctactttttcaggtacattggaaggtcatctgattcctatggcaattcttttaggacaaacccaaagtaatagtgataccatgccacctgctggagtgattgtcagcaagccacaccctgtaactgtgactacttctattcctccatcatctcgaaaagtagaaactggagtaaagaaacctaacatagccattgtagaaatgaagtcagaaaaaaaggatcctcctcagcttactgtgcaggtattacccagtgtagatattgacagcatttcaaatagtagtgctgatgtcctttcacctctgtctagccccaaagaagcatctcctcctcctgtgcaaacttggataaagactccagaaattatgaaggtagatgaagaagaggtgaagtttccaggaactaactttgatgaaataatcgatgtcatacaggaagaagaaaaatgtgatgaaattccagactctgaaccaattctggagtttaacagaagtgttaaagctgattctacaaaatataatggtcctccatttccgccagttgcttctacttttcagcccactgctgatattctggataaagtaattgagagaaaagaaacactggaaaatagcttaattcaatgggtagagcaagaaataatgtcaagaattatctctgggctctttccagtccagcaacagattgcacctagtatcagtgtttcagtcagtgagacaagtgaaccactgacttctgacattgtggaaggaacaagcagtggcgccctccagctttttgttgatgctggtgttcctgtgaactcaaatgtgattaaacattttgttaacgaagctcttgctgagaccattgctgtcatgctgggtgacagagaagcaaagaagcaaggtcctgttgctacaggtgtttctggggatgcttcaacaaatgaaacatatttgccggcaagagtgtgcaccccactgcctaccccacagcctacgcctccttgctcaccttcatcacctgctaaggagtgtgttttggtaaagactccagattcttctccctgtgattcggatcatgatatggcttttcctgtgaaagaaatatgtgctgaaaaaggagatgatatgcctgccatcatgcttgttaatactccaacagttacccctactactacacctcctccagcggcggcagtttttaccccaactttgtcagatatttccattgataaattgaaggtatcaagcccagagcttcccaagccatggggtgatggagacctgccactggaagaagagaaccctaactcacctcaagaagaacttcatccaagagctattgtaatgtctgtggctaaggatgaagaaccagagagtatggatttccctgctcagcctccacctccagagccagttccctttatgccatttcctgccggcaccaaggccccttccccctcacagatgccaggttctgattcatcaacactggagagcacattgagtgttactgtcactgaaactgaaactttagataaacccatctctgaaggagagattttatttagctgtggtcaaaaattggcccccaagattttagaagatataggactgtacctgacaaaccttaatgatagcttatccagcactctgcatgatgccgttgaaatggaggatgatcctcctagtgaagggcaagtgattaggatgtcccataaaaaatttcatgcagatgcaattctttcttttgctaaacaaaaccaggagtcagcagtttcccagcaagcagtctatcattcagaggacttggaaaacagtgtgggtgaacttagtgaaggacaaagaccccagctaacagcggcagcagagaacatcttaatgggacattctctctatatgcagccacctgtcactaatacacagtctttggatcaacaatgtgatcctaaaccattatctcggcaatttgacacagtttcaggtagtatttatgaagattcatgtgctagtcatggtccaatgagtttgggagaattggagttggagccaaattctaagctggttcttcccacaacacttctgacagcacaagaaaatgatgttaatttaccagtagccgctgaagatttttcccagtaccaactaaagcaaaatcaggatgttaagcaagttgaacacaaaccatcacaaagttacctacgtgttagaaataaatctgatattgcaccttcacagcaacaagtttcaccaggtgatatggatcggacacaaattgagcttaatccgtacctcacatgtgtattttcaggtgggaaagcagtgccactctccgcttcacagatgccccctgccaagatgtcagtgatgctgccgtcagtgaacctcgaggactgctctcagtctctgagtctcagcacaatgcaggaggacatggagtcttcgggggcagataccttctgaacgggaagagacagccagcacagtgtttatgccactggttttaaagtcattttaccttggcttaaaaccctctctcagactgtttggtttttgagcatattctgaaaaaaaaattccaatattttaaaataaaacaaaaagcataatttgggtatttaaagtttttaaataaaataagtataagtcattataaaaaaaaaaaaaaaaaaaaaaaaaaaaaa

SEQ ID NO: 25080 - DNA, 2221 bp, Homo Sapiens
attcgccatggccgcctcgccgggctcgggcagcgccaacccgcggaagttcagtgagaagatcgcgctgcacacgcagagacaggccgaggagacgcgggccttcgagcagctcatgaccgacctcaccctgtcgcgggttcaatttcagaagcttcagcaactgcgccttacacagtaccatggaggatccttaccaaatgtgagccagctgcggagcaatgcgtcagagtttcagccgtcatttcaccaagctgataatgttcggggaacccgccatcacgggctggtggagaggccatccaggaaccgcttccaccccctccaccgaaggtctggggacaagccagggcgacaatttgatggtagtgcttttggagccaattattcctcacagcctctggatgagagttggccaaggcagcagcctccttggaaagacgaaaagcatcctgggttcaggctgacatctgcacttaacaggaccaattctgattctgctcttcacacgagtgctctgagtaccaagccccaggacccctatggaggagggggccagtcggcctggcctgccccatacatggggttttgtgatggtgagaataatggacatggggaagtagcatctttccctggcccattgaaagaagagaatctgttaaatgttcctaagccactgccaaaacaactgtgggagaccaaggagattcagtccctgtcaggacgccctcgatcctgtgatgttggaggtggcaatgcttttccacataatggtcaaaacctaggcctctcacccttcttggggactttgaacactggagggtcattgccagatctaaccaacctccactactcgacacccctgccagcctccctggacaccaccgaccaccactttggcagtatgagtgtggggaatagtgtgaacaacatcccagctgctatgacccacctgggtataagaagctcctctggtctccagagttctcggagtaacccctccatccaagccacgctcaataagactgtgctttcctcttccttaaataaccacccacagacatctgttcccaacgcatctgctcttcacccttcgctccgtctgttttcccttagcaacccatctctttccaccacaaacctgagcggcccgtctcgccgtcggcagcctcccgtcagccctctcacgctttctcctggccctgaagcacatcaaggtttcagcagacagctgtcttcaaccagcccactggccccatatcctacctcccagatggtgtcctcagaccgaagccaactttcctttctgcccacagaagctcaagcccaggtgtcgccgccacccccttaccctgcaccccaggagctcacccagcccctcctgcagcagccccgcgcccctgaggcccctgcccagcagccccaggcagcctcctcactgccacagtcagactttcagcttctcccggcccagggctcatctttgaccaacttcttcccagatgtgggttttgaccagcagtccatgaggccaggccctgcctttcctcaacaggtgcctctggtgcaacaaggttcccgagaactgcaggactcttttcatttgagaccaagcccgtattccaactgcgggagtctcccgaacaccatcctgccagaagactccagcaccagcctgttcaaagacctcaacagtgcgctggcaggcctgcctgaggtcagcctgaacgtggacactccatttccactggaagaggagctgcagattgaacccctgagcctggatggactcaacatgttaagtgactccagcatgggcctgctggacccctctgttgaagagacgtttcgagctgacagactgtgaacagaaggcagtggaacagaagaatgtttttctgcaacagccaaaatagaatggaatagaatgaagccagctgataccacgggctttcgttatcttgacatagaaggaagcagtgccacggctccagggtttcagatgagatcccatctcagacactgtggcttcctccagatcacacagctttgtactgcctctcccgcctgtggccaaagtcgtgttgcagcaggcaggctgcttggagcttcccatgaactggaaagctcacctccactgcatctttttactggccatccagtcagccgatgtgtaagagtaggaaatactgtgtcactggaggccctccgtagcattggg

SEQ ID NO: 25081 - DNA, 8475 bp, Homo Sapiens
gtacagaatgagcacatgttgttggtgtacgccaggtggtgcttccaccattgacttcctaaagcgctatgcttccaacactccgtccggtgaatttcaaacagccgacgaagacctctgctactgcttggagtgtgtggctgagtaccacaaagcaagagatgaattgccattcttgcatgaggttttatgggaattagaaaccttacgtctcataaatcactttgaaaaatccatgaaggcagaaattggagatgatgatgagttatatatagtagacaataatggagagatgccactgtttgacatcactgggcaagactttgaaaataagcttcgagttcctcttcttgaaatactgaaatatccttacttgcttctacatgaacgtgttaacgagttatgtgttgaagcactttgtcggatggaacaagccaattgctcctttcaggtgtttgataaacatccagggatctatttgtttttagtccatcccaatgaaatggttcggcgttgggctatcttgactgcaagaaacttggggaaagtggacagagatgattattatgacttacaagaagttttactttgcctttttaaagtcattgagttggggcttttagagagtccagacatttatacttcttctgtcctagagaagggtaaactgattcttctgccctcacacatgtatgatactaccaactacaaaagctattggttaggtatttgcatgttgctgaccattcttgaggaacaagccatggattccctgttgttgggctcagacaaacaaaatgattttatgcaatcgatacttcacactatggagagggaagcagatgatgatagtgtggatcctttctggccagcgttacactgttttatggtgattctggatcgccttggatctaaggtctggggtcaacttatggatcctattgtggcatttcaaaccattatcaacaacgcaagctacaatagagagatccgacatatacggaacagctctgtaaggaccaagttagaaccggagtcctatttggatgatatggtgacttgcagccagatcgtatacaattataatcctgaaaagaccaaaaaggattctggatggagaacagccatttgcccagattattgtcctaacatgtatgaagaaatggaaacattagccagtgtacttcagtcagatattggtcaagacatgcgtgttcataacagcacatttctatggttcatcccttttgtccagtccctcatggatcttaaggatttgggtgtggcttacatagcacaggttgttaatcatctgtactctgaagtcaaagaagtcctcaaccaaacagatgctgtgtgtgacaaagtcactgaattttttcttctaattttggtatcagtgattgaactgcatagaaataaaaaatgtttgcatttgctgtgggtaagttcccagcaatgggtggaagccgtcgtcaaatgtgccaagcttcctaccactgcgtttacacggagttctgagaaatcatctggaaattgctccaaaggaacagcaatgatatcttcactgtcattgcattccatgccatctaactctgtacaacttgcttatgtgcagctgattagaagtctccttaaagaaggttatcagcttgggcagcagtctctttgcaagcgattctgggataagctcaacttattccttagaggaaatttatctctaggttggcagttgactagtcaggaaacccatgagctacaaagttgcttaaagcaaattattagaaacataaaattcaaagcacctccatgtaacacttttgtggatctgacttctgcatgtaaaatctctcctgcatcttataataaagaagaaagtgaacaaatggggaagacgtctagaaaagatatgcattgtttggaagcttccagcccaacattttctaaagaaccaatgaaagtgcaagacagtgtattgatcaaagcagataacactatagaaggtgacaataatgagcaaaattatataaaggatgtgaaactagaggaccatctcttagctgggtcatgcttaaagcagagtagtaaaaacatttttactgaaagagctgaagatcaaattaaaataagtacaaggaagcagaagtctgtaaaagagatctcttcatatacaccaaaggactgtacttcaagaaatggtccagaaaggggatgtgacagaggaataatagtatcaacacgtttgttgactgattctagcactgatgctttggaaaaagtgtccacatcgaatgaagatttctctttaaaggatgatgctcttgctaaaacctcaaaacgaaaaactaaggtacagaaagatgaaatctgtgcaaagttatcacatgtaataaagaagcaacacaggaagagtactttggtcgataatactatcaatttagatgaaaatttgactgtatctaacattgagagtttctattcaaggaaagatacaggagttcagaaaggagatggtttcatacacaatctttctttagaccctagtggtgttctggatgataagaatggagaacaaaaatctcaaaacaatgtattgccaaaagagaaacaattaaagaatgaagaattagttattttctctttccatgaaaacaattgtaaaatacaggaatttcatgttgatggtaaagaattgatcccttttacagaaatgaccaatgcttcagagaagaaatcatctccctttaaagatcttatgactgtacctgaatcaagagatgaggagatgagtaatagtaccagtgtgatttattctaacttgacaagagaacaggcccctgacatcagtcctaaatctgacaccttaacggattctcagatagacagagaccttcacaaattatctttactagctcaagccagtgttattacgttcccatccgattcacctcagaactcatcgcagctgcaaaggaaagtaaaagaagataaaagatgtttcacagctaaccaaaataatgttggagatacctcccgtggacaggttattattatttcagattctgatgatgatgatgatgaaagaatcctgagtcttgagaaactcactaaacaggacaaaatatgccttgagagggaacatccagagcagcacgtttcaacagttaatagtaaggaggaaaagaatccagtaaaggaagaaaagacagagactctttttcagtttgaggaatctgattctcagtgttttgagtttgaaagttcatctgaagtgttttcagtttggcaagatcatccagacgataataattcagttcaagatggtgagaaaaaatgtttggctcctatagccaatactacaaatggtcagggttgtacagattatgtatctgaagttgttaaaaaaggagcagagggcattgaagaacacacaagaccacggagtatttctgttgaagaatgttgtgaaattgaagtaaaaaagcctaagagaaaacgatctgaaaaaccaatggctgaagatcctgtgaggccttcatcttctgtcagaaatgagggccagtctgatactaataagagagatcttgtgggaaatgattttaaaagtattgatagaaggacttcaactcccaattcacgtattcagagagccactacggtttcacaaaagaagtcttcaaagctttgtacttgtacagaacccatcaggaaagttccagtttctaagacccctaagaaaactcattcagatgccaaaaaaggacagaatagaagttcaaattacctaagttgtagaacaactcctgctatagtgccgccaaagaaatttcgtcagtgtcctgagccaacttcaacagctgagaaacttggcctgaaaaagggtcctcgtaaggcatatgagttgtcccagcggtctttggattatgtagctcaattacgtgatcatggcaaaactgttggagtagttgatacccgaaaaaagactaaattaatttctcctcagaacctgtctgtcagaaataataagaaacttctgactagtcaagaacttcagatgcaaaggcagatcagacccaaatcacaaaaaaatagacgaagactttctgattgtgaaagtacagatgttaaaagagcagggtcacatacagcacagaattctgacatatttgtaccagaatctgataggtcagattataattgtacaggaggaactgaggtacttgccaacagtaacagaaaacagttaataaaatgcatgccttctgaaccagaaaccataaaagcaaaacatgggtctccagcaactgatgatgcttgccctttgaaccagtgtgattctgtagtgttaaatggaacagtaccaacaaatgaagtaattgtctccacttcagaagaccctctgggtggaggtgatccaacagcacgtcatatagagatggcagctttgaaagaaggagagcctgactccagcagtgatgcagaggaagataacttatttttaacccaaaatgatcctgaagatatggatttatgttcacaaatggagaatgacaattataaactcattgaactaattcatggaaaagatacagttgaggttgaagaagattctgtaagtcggcctcagttggaatctttgagtggcacaaagtgtaagtacaaagattgtcttgaaaccacaaaaaaccagggtgaatactgcccaaaacactctgaagtgaaagcagcagatgaagatgtatttcgtaaacctggcttgcctcctcctgcatctaaacctttgagacctaccactaagatttttagctcaaagagtacttcacgaattgctggtctttctaaatctttggaaacttcttcagcactttcaccgtctctaaaaaataagtcaaaggggatacagtcgattttgaaagtaccacagccagttcccctcatagctcagaagccagttggtgaaatgaagaattcgtgcaatgttcttcatcctcagtctccgaataattccaacaggcaaggttgcaaagttccatttggtgaaagcaaatattttccatcttcctctccagtaaacattcttttgtcatcacagtctgtctctgacaccttcgttaaagaggtcttaaaatggaaatatgaaatgtttttgaactttggtcagtgtgggccccctgcaagtctttgtcagtccatctcaagacctgtgcctgtcagatttcacaattatggagattattttaatgtttttttccctttgatggtattgaatacttttgaaacagtggcacaagaatggctcaactctccaaatagagagaatttctatcagttgcaagtacgaaaatttcctgccgattatataaaatactgggagtttgcagtttatctggaagaatgtgaactggctaaacagctttatccaaaggaaaacgatttggtgtttttagctcctgagagaataaatgaagagaagaaagatacagagagaaatgacatacaagatctccacgaatatcattctggttatgttcataaatttcgccgcacgtcagtcatgcgtaatgggaaaactgagtgttacctttccatccagactcaagagaaccttccggccaatttaaacgaacttgtgaattgtattgtaatcagttctctggtaactacacaaaggaagttgaaagccatgtctctgttgggtagtcggaaccaactggctagagctgttctgaatccaaaccctatggacttctgtacaaaagatttactgactacaacatctgagagaattattgcgtacttaagagatttcaatgaagatcaaaagaaagcaatagaaactgcatatgctatggtgaaacactcaccatcagttgccaaaatctgcttgattcatggaccacctggaacaggaaaatcaaaaactattgttggcctcctctatcgtctactgacagagaaccagaggaaggggcattcagacgaaaactccaatgccaaaatcaaacaaaaccgtgtcctcgtgtgtgcaccttccaatgcagctgttgatgaactcatgaaaaaaattatccttgaattcaaagaaaaatgtaaagacaagaagaatcctttaggaaactgtggagatataaatttagtacgactgggtccagaaaagtctattaatagtgaggttctaaagttcagtttggacagccaagtaaaccacagaatgaaaaaagagttaccttctcatgttcaggcgatgcataaaagaaaggaatttctagattatcagctggatgagctttcccggcagcgagctctatgccgaggtggacgggaaatacagaggcaagaattagatgaaaacatttccaaagtttctaaggaaaggcaggaacttgcttctaaaattaaagaggttcaaggacgcccacagaaaacacagagtatcatcatcttagagtcccatatcatctgctgcacgttgagcacaagtggtggtttactacttgagtctgctttccgtgggcaagggggtgtccccttcagctgtgtcattgttgatgaggctggacagtcttgtgaaattgagactcttactccactcatccatcgctgcaataagctcatcctagtaggagatcctaagcagctccctccgacagtcatctctatgaaagcacaggagtatggctacgaccagtcaatgatggctcgcttctgcagactgctggaagagaatgtagaacacaacatgatcagcaggctgcccattctacagctcactgttcagtacaggatgcatccagacatatgcctcttcccttctaattatgtttataacagaaacttaaaaacaaatagacagacagaagccattcgatgttcatcagattggccatttcagccataccttgtgtttgatgttggagatggttcagaaagacgggataatgactcatatataaatgttcaagaaataaaactggtgatggaaataattaagcttattaaagacaaaagaaaggatgttagttttcgaaacattggcataataactcattacaaggcccagaagacgatgattcagaaggatttggacaaagagttcgatagaaaaggaccagcagaagtagacactgtggatgcattccagggtcggcagaaggattgtgttattgttacgtgtgtcagagcaaatagcatccaaggttcaattggattcctggcaagtttgcagagattgaatgtcaccatcacacgagccaagtacagcctcttcatcctcggacatttgaggaccctgatggaaaaccagcattggaatcagctgattcaggatgctcagaagcgtggtgccattattaagacctgtgacaaaaactatagacatgatgcagtgaagattctgaaactcaagcctgtgctgcagagaagtctcactcaccctcctaccatagccccagaggggtccagaccccagggtggtttgcccagcagcaagctagacagtggatttgccaagacatctgttgctgcttctctataccacacaccctctgactccaaggaaattactcttactgttacttcaaaggaccctgaaagacctcctgttcatgaccaacttcaggacccacgactgctgaagaggatgggcattgaggtcaaaggaggaatattcctttgggatccacaaccctcgagcccccagcatcctggagcaacacctcctacgggcgagccgggcttccctgtcgttcaccaggacctgagccatatacagcagcccgctgctgtagtggctgctctgagcagccacaaacctcccgtgcggggcgaacctccagctgccagtcccgaggcttccacgtgtcagagcaaatgtgatgacccggaagaggagctctgtcacaggagagaggccagggctttcagtgaaggggagcaggagaagtgtggttccgagacccatcacaccaggaggaactctaggtgggacaagaggacactggagcaggaggacagcagttccaagaaaagaaagcttttataggaaagcccagtgacatgggccagcagccacagcatattgtaaactgaagatgaccagctcgtgggaccatctagataagcttgttttttgtaaggagtttgtgtgctgttggaaaacatggaaaatgcatccttaacacctgagcctctggtcatcttcagtattttctgtcatttgcaaaagctttcagagggcattgtgtatccgtaataatgtccttgaagtcagagactggaaatgttgatctcttagtcttctatagacaaggaggtcagactggagtgaatgttgtaaaagttgaaatgtatatttgtatagcaaataacaaaatccttttaaaatttaatctagtagaccgcttttctttccccctgtttaaaatgttaatcagttttcaacagaacaaactttatattaccaaaaaaaaaaaaaaa

SEQ ID NO: 25082 - DNA, 2688 bp, Homo Sapiens
atgtttccaacaggtttttcttcccccagtccctcagctgctgctgctgctcaggaggtcagatctgccactgatggtaataccagcaccactccgcccacctctgccaagaagagaaagttaaacagcagcagcagtagcagcagtaacagtagtaacgagagagaagactttgattccacctcttcctcctcttccactcctcctttacaacccagggattcggcatccccttcaacctcgtccttctgcctgggggtttcagtggctgcttccagccacgtaccgatacagaagaagctgcgttttgaagacaccctggagtttgtagggtttgatgcgaagatggctgaggaatcctcctcctcctcctcctcatcttcaccaactgctgcaacatctcagcagcagcaacttaaaaataagagtatattaatctcttctgtggcttcggtgcatcatgcaaacggcctagccaaatcttctaccaccgtctctagctttgctaacagcaaacctggctctgctaagaagttagtgatcaagaactttaaagataagcctaaattaccagaaaactacacagatgaaacctggcaaaaactgaaagaagcagtggaagctattcagaatagtacttcaattaagtacaatttagaagaactctaccaggctgtagaaaatctctgttcttacaagatttctgcaaacttgtacaaacagctgagacagatctgcgaagatcacatcaaagcacagattcatcaattcagagaggattcattggatagcgttctttttttaaagaagattgatagatgctggcaaaaccattgcagacaaatgatcatgatcaggagcatttttttgtttctggatagaacttacgttcttcagaattcaatgctaccctccatttgggacatgggactggagttatttagggctcatattataagtgatcagaaagtgcagaataagacaattgatggcattcttctcttgattgagagggaaaggaatggtgaagcaattgatagaagtttacttcgaagccttttaagcatgctgtctgatttgcaaatttatcaagattcttttgaacaacgatttttggaagaaactaaccggctctatgcagctgaaggccaaaaattaatgcaagaaagagaggttcctgaatatctacatcatgttaacaaacgtctagaagaagaagcagacagacttattacttacttagatcagaccacccagaagtcattaattgctactgtagaaaaacaacttctaggtgaacacttaacagcaattcttcagaaaggtttaaataacctccttgatgaaaaccgaattcaagatttgtctcttctgtatcagctcttcagtagagttcgaggtggagttcaggttcttttgcagcagtggatcgaatatatcaaggcatttggcagcactattgtaattaatcctgaaaaagataaaaccatggttcaagaattgctggattttaaagataaggttgaccatataattgatatctgctttctgaagaatgagaaatttatcaatgccatgaaagaagcatttgaaacgttcattaacaaaagaccaaataaaccagctgaacttatagctaagtatgtagattcaaaacttcgtgcaggcaacaaagaagctacagatgaagaacttgagaaaatgttggataaaattatgatcatatttagatttatctatggcaaggatgtttttgaggccttctataagaaagatttagccaagcgcctgttagtcggaaagagtgcatctgtagatgctgaaaaatcaatgctgtccaaacttaaacatgaatgcggagctgctttcaccagcaaacttgaaggaatgtttaaagacatggaactttctaaagacatcatgattcagttcaaacagtatatgcagaatcagaatgttccgggaaatattgagttaactgtgaatatcctgacaatgggctattggccgacatatgtgcctatggaagttcatttaccaccagagatggtaaaacttcaggagattttcaagacattttacctaggcaaacatagtggcaggaaacttcagtggcagtcaaccataggacactgtgtgttaaaagcagaatttaaagagggtaaaaaggaactccaggtctctctttttcaaacactggtgctgctaatgtttaatgagggagaggagttcagtttagaagagatcaagcaggcaactggaatagaggatggagagttaaggagaacactgcagtcattagcctgtggcaaagctagagttctggcgaaaaatccaaagggcaaagacattgaagatggtgacaagttcatttgtaatgatgatttcaaacataaacttttcaggataaagatcaatcaaatccagatgaaagaaacggttgaagaacaagcaagcactacagaaagagtatttcaagacagacagtatcaaattgatgctgcaattgttcgaattatgaagatgagaaagacacttagccacaatctccttgtttcagaagtgtacaaccagttgaaatttccagtaaagcctgctgatcttaagaagagaatagaatctttaattgaccgggactacatggaaagagataaagaaaatccaaaccagtacaactatattgcatag

SEQ ID NO: 25083 - DNA, 2359 bp, Homo Sapiens
gggcagaaacagaaaccaaggtacaagagagggaaaatggggaaagccctctggaactggagcagctggaccagcaccatgagatgaaggagactaatgagcaaaaacttcacaaaatagccaatgaacttttgcttactgaaagagcttatgtcaaccgacttgacctcttagatcagaaaatagagtggaggtgaatttagaaaattaacaaccatctggacattatgaaggaatagacctccttctgcctacatgtaacagaatggcaattaagaggtattttattgcaaactgttggaagaagcaaaccgaggctcgtttccagcagagatggtgaataaaatcttttctaatatttcatcaataaatgccttccatagtaaattcctcttgccagagctggagaaacgaatgcaagaatgggaaactactcctagaattggagacatccttcagaaattggcaccattccttaagatgtatggagaatatgcgaaaggatttgataatgcaatggaattggttaaaaacatgacagaacgtattccccagttcaaatcagtggttgaagaaattcagaaacagaaaatctgtgggagcttaactttgcagcatcacatgctagaacctgttcagcggattccccggtatgagatgctccttaaggactatctaaggaaattgcctcctgattccctggactggaatgatgctaaaaaatcacttgaaattatatctacagcagcaagccattctaatagtgcaataaggaaaatggagaacctaaagaaactcttagagatttatgaaatgttgggagaagaagaagacattgtaaacccttcaaatgaactaataaaagaaggacagatcctcaaactagctgctcggaacacttcagcacaagaacgctaccttttcttattcaacaacatgttgctgtactgtgtgcccaaattcagcttggtaggctctaaattcacagttcgaaccagggttggcattgatggaatgaaaattgtagagactcaaaatgaagaatatccacatactttccaggtgtctggaaaagagagaacactggaactgcaggccagttctgcgcaagacaaagaagaatggatcaagagacgaggttttgccatgctgcccaggctgatctcgaactcctgagctcaagcgatctgcctgcctcggtctcccaaagtgctgggattacaggcccttcaagaaaccatcgatgcttttcatcaaaggcatgaaaccttcagaaatgcaattgcaaaggataatgacattcactcagaggtttctactgctgagctagggaaaagagccccaagatggatccgagataatgaagtgacaatgtgtatgaaatgtaaagaacctttcaatgcactgacacgaaggaggcatcattgtcgagcatgtggatatgtggtttgttggaaatgctccgactacaaagctcaacttgaatatgatggtggtaaattgagcaaagtttgtaaagactgttatcaaatcataagtggattcacagacagtgaagaaaagaaaagaaaaggaattttagagttccgcatggctggggaggcctcagaaaacgtacaatcatggcagaaggggaagaggcacatcttacatggtggcaagcgagagtgagcaagtgtatgaaggaagaactgtcagacacttacaaaaccatcagatctcatgggaactcacgatcacgagaacagcatgggggacactgcccccatgatccagttacctcctatcagattgaatcagcagaagtatctggaaacagtgtggtgtgcagctttcttcagtatatggagaagtcaaaaccttggcagaaagcttggtgtgtgatccccaagcaagaccctcttgtgctgtacatgtatggtgccccccaggacgtcagagcccaggccaccattccacttctgggctatgtggtggatgaaatgccaaggagcgcagacctgccacacagtttcaaactgacccagtctaagtccgtgcacagctttgctgcagacagtgaggaactgaagcagaagtggctgaaagtcatccttttagctgtcacagctaaacgcaaagagaagcagtgaaacagccttacccgcttctctcttattaaagaatcactgatgtttttactcaatgaaagaaagggcagagaggaataagataagaaactgaaacaagcaagaatgaagagagatgtgggggagagactgctggtctccagaccacagcaatgtgttttaagataagatgaaatattttaactgcagaagggatataaaatctatgtaattacatgcttaaaaaaaaa

SEQ ID NO: 25084 - DNA, 5956 bp, Homo Sapiens
agtatccaccccgcccgctcccggtgacgtgccagccccaggcccacgccgctcccgccccgcgtgatgacgccaccgtcccgggcggaggcgggcgtgcggcggagccgcgtcccctcagaggggcgctggcgcggggctgagccgcccgggatcagcgcgagcacccagcccgcctcggccgggagggcagcgcggcactgcggggcgatgagcggcgcccggggcgagggcccggaggcgggcgccggcggggctgggggccgcgcggcgcctgagaaccccgggggcgtgctgagcgtggagctgcccgggctgctggcgcagctggcgcggagcttcgcgctgctgctgcccgtgtacgcgctgggctacctggggctcagcttcagctgggttctcctcgcgctcgcgctgctcgcctggtgtcgccgcagccgcggcctcaaggccctgcgcctgtgccgcgcgctggcgctgctggaagacgaggagcgcgtcgtgcgcctgggggtgcgcgcctgcgacctgcccgcctgggttcattttccagacactgaaagagcagaatggctaaataagactgtaaaacacatgtggcctttcatttgccaatttatagagaagttgtttcgagaaactatagaaccagccgtgcggggagcaaacacccaccttagcacctttagtttcacgaaggtcgacgtgggccagcagcccctcaggatcaatggtgttaaggtatacactgaaaatgtagacaaaaggcaaattattttggaccttcagattagttttgtaggaaattgtgagattgatttggagatcaaacgatatttttgtagagctggtgtgaaaagtatccagattcatggtaccatgcgggtgatcctggaaccgttgattggagatatgcccttagttggagctttgtctatcttcttccttaggaaaccacttttagaaattaactggacaggactgacgaatcttctggatgtccctggattgaatggtttatcagatactatcattttggatataatatcaaactatctggtgcttcccaatcgaatcaccgttccacttgtcagtgaagttcaaatagctcagttgcggtttcctgtaccaaagggtgttctaaggatacattttattgaagctcaggatcttcaggggaaagacacttaccttaagggacttgtcaagggaaagtcagacccctatggaatcattagagttggcaaccaaatcttccaaagcagagtcatcaaggagaacctcagtccaaagtggaatgaagtctatgaggctttagtgtatgaacatcctggacaagaattagagattgagctctttgatgaagacccagacaaggatgactttttaggaagtcttatgattgacctcattgaagttgaaaaggagcgccttttagatgaatggttcactctggacgaggttcccaaggggaagctacacttgagactggagtggctcacgttaatgccaaatgcgtcaaacctcgacaaggtgctaacagacatcaaagctgacaaagaccaagccaacgatggtctttcctctgcattgctgatcttgtacttggattcagcaaggaaccttccgtcagggaagaaaataagcagcaacccaaatcctgttgtccagatgtcagttgggcacaaggcccaggagagcaagattcgatacaaaaccaatgaacctgtgtgggaggaaaacttcactttcttcattcacaatcccaagcgccaggaccttgaagttgaggtcagagacgagcagcaccagtgttccctggggaacctgaaggtccccctcagccagctgctcaccagtgaggacatgactgtgagccagcgcttccagctcagtaactcgggtccaaacagcaccatcaagatgaagattgccctgcgggtgctccatctcgaaaagcgagaaaggcctccagaccaccaacactcagctcaagtcaaacgtccctctgtgtccaaagaggggaggaaaacatccatcaaatctcatatgtctgggtctccaggccctggtggcagcaacacagctccatccacaccagtcattgggggcagtgataagcctggtatggaagaaaaggcccagccccctgaggccggccctcaggggctgcacgacctgggcagaagctcctccagcctcctggcctccccaggccacatctcagtcaaggagccgacccccagcatcgcctcggacatctcgctgcccatcgccacccaggagctgcggcaaaggctgaggcagctggaaaacgggacgaccctgggacagtctccactggggcagatccagctgaccatccggcacagctcgcagagaaacaagcttatcgtggtcgtgcatgcctgcagaaacctcattgccttctctgaagacggctctgacccctatgtccgcatgtatttattaccagacaagaggcggtcaggaaggaggaaaacacacgtgtcaaagaaaacattaaatccagtgtttgatcaaagctttgatttcagtgtttcgttaccagaagtccagaggagaacgcttgacgttgccgtgaagaacagtggcggcttcctgtccaaagacaaagggctccttggcaaagtattggttgctctggcatctgaagaacttgccaaaggctggacccagtggtatgacctcacggaagatgggacgaggcctcaggcgatgacatagccgcagcaggcaggaggcgtcctcttcagcgtagctctccacctctacccggaacacaccctctcacagacgtaccaatgttatttttataatttcatggatttagttatacataccttaatagttttataaaattgttgacatttcaggcaaatttggccaatattatcattgaattttctgtgttggatttcctctaggatttcgccagttcctacaacgtgcagtagggcggcggtagctcttgtgtctgtggactctgctcagctgtgtccgtaggagtcggatgtgtctgtgctttattatggccttgtttatatatcactgaggtatactatgccatgtaaatagactattttttataatctttacatgctggtttaaattcagaaggaaatagatcaaggaaatatatatattttcttctaaaacttattaaattcgtgtgacaaataatcattttcatcttggcagcaaaagttctcagtgacctattttgtggtgtttctttttgaaaagaaaagctgaaatattattaaatgctagtatgtttctgcccattatgaaagatgaaataaagtattcaaaatattaacattttcataaatataaggatgtattattgagaagtaagttgaagggcttataaggaaaaatgttttataactgagtaatatattaagagaattgtcatggttcataaatcacattatgctaatctgaaatttcttacataaaaatgaagtgtcttatgtttattttaattgctgttgtaacttactcatgaaacagtatacagacaccttgtacttttcctcaactgtaagagcagactttcaatgttagcaattaagctgttgtcaaacaatcagtcatgagctttgttaattttcaatgttttcccagcctataaaaaaaggaaggtacacgttgtccttttaaaggttgtgaggtagattggagtgagtagacaggatattgcattaaaaattgaaagctcgatctcattattgtcaggaacccccagtgtgacctcacacataggatgtgggacctttgagccgatgtgcactggccaccaccagggttgggggcgccacagctgcgagcccggcccctgctgttctcagcagccacttcccaggctgcctcactttatgccatgactgaccttaatattgggatattgttatgcaatttttatcctgtttagactgttaaaagcaggtttctgtacttaagagtcccccagacctcctgtgaggtgaggctctgttgcagtgtcgtaggctgtgtgtgtctgtaaagaaagaatgcacatatgtagacgattaagtgtatattataagctatatgctgaaaatggcttccatagccatgagaacatcttaaaactatgtgtaaatatattaaggaaagtatagctttgtaatttaaattggagcttttagcttgtttcatggaactatacaacttgtgggtaactcacatgaccaaacaaaccaaagtgcctgtgacggggcgggtggcgtctacccaccctcccttctagcagattcttattttgtttgaatttataaacaaggctggtggctgtctacccaccctcccttctagcagattttgattttgtttcaatttataacttacactttgaaccatgggtttacttataatggagtctgtagcttcacagcatatttcatgtaatcataaagaccagtatattccctcctgctgaatgacatgcgactgtaaagcctctttataaaccatttccaatgttagtatataggattatttgggaagcgtatcaatacctttatagacaaatacgaacatgtatgcacacaaaacatttaactatggtatttatggaagacaggtaacaacattaaatctagttgctttcccttagtattagatttgttgagggttttttaaaaatcaggtctgttgaaagtcttctgtcataatctataaagcagcagcactcatggaaattgtagcatgccagtaatttttaccaacatcccatacatctgagttctgcagtccagtgtgtaatccgctccatgtgtattttgcttaatggaatgctttatttaagcacttaggcagagtagacacaattaaaggtacaaagcccagaggaagtggtagagcagcaccgtgcctgccctgaggcagtggagtcagtagcgctgtccccagggccttgagtgcctggaggtgcttggcctccagtagctgcctccattctcttttaaaaaaagggggtgattctgaggcactgaagtgcctcccagatgtggaggagtgaagccaccatcgaggccacactcagcactccaggatcccagcgatgtcagacactcttgagttgtcaaaacgttaattttcagttttaaataatcagtttatctaagaaaagggaattttaacttttctaccttgagccaagccaatgaagggaaaattaattaacttagtaaatttgaagtgcagctctgttagctcgtacatgtgggttcttatcctgatcctgtgccttaaagtaggaaggtgtttccaagttcagattaaaatagaagcagctggccgggtgcggtggctcacgcctgtaatcccagcactttgggaggccgaggcgggcggatgacctgaggtcaggagttcaagaccagcctggccaacatggagaaaccccatctttactaaaaatacaaaaattagccgggcgtggtggtggagcgcacgcctgtagtcccagctactcgggaggctgaggcaggagaattgcttgaacccaggaggcggaggttgcagtgagccaagatcgcaccactgcactccagcctgggcaacagagtgagactccgtctcaaaaaataaataaaatagaagcagccttgtaactgtatttaccatgataatatattctgcacggtaagaattccttttacagacattctttatcaagaggtcggcccttctttttcaggcacataagccaaatgcaggcctgtgtgtagctgtgtgttttttctgtggttgccgcatttattccacctccagctggaccccccactgcaaatagagaacagcggtgggggatgggggttaaaaagtagagaacctcctttctgttcaactaatttcacgtgacagtgcatgtatttattcaataaaacctttatgttagctc

SEQ ID NO: 25085 - DNA, 2969 bp, Homo Sapiens
gggctctcgatgtagcaccatgacaggcatcgccgccgcctccttcttctccaatacctgccgattcgggggctgcggactccacttccccaccctggccgacctcatcgagcacatcgaggacaaccacatcgatacagatccacgggttttagaaaaacaagaattacagcagccaacctatgttgccctgagttacataaatagattcatgacagatgctgcccgccgagagcaggagtccctaaagaagaagattcagccgaagctctcgctgactctgtccagctcagtgtctcgagggaatgtgtccactcccccacgccacagcagtggaagccttactccccccgtgaccccacccatcaccccctcctcttcattccgcagcagcactccgacaggcagcgagtatgacgaggaggaggtggactatgaggagtcggacagcgatgagtcctggaccacagagagtgccatcagctccgaagccatcctcagctccatgtgcatgaatggaggggaagagaagccttttgcctgcccagttcctggatgtaaaaagagatacaagaatgtgaatggcataaagtatcacgctaagaatggtcacagaacacagattcgtgtccgcaaaccattcaagtgtcgctgtgggaagagttacaagacagctcagggcctgcggcaccacacaatcaatttccatcccccggtgtcggctgagattatcaggaagatgcagcaataacatgctggtcataactgtgccaagaaatcctcaccagcagttgctgattttgaaaacagccaccttttttcaggggaagcattcagcaaccctttaaagaaaaagaattaaatgcatgctttaaattttttctgtaattttggaatgatgtatctttgtagagttaatgattttgtacatttgcacatgtaatcatcatacccattttcattactttgatataaggtgctaaacaaaaaaagctctaggttcttcagcacatttcccccaaaacaaaataaaattgagggcatgttgcatattgttgaattgtattgcggtggtatcaacctggggggaggaggggctggcactgagatttttttttcaagattgtaatgtgattgaagttttcaacacatcaactcacatatgttcaaaaccaaaataataccttcattatcaaactggttaccatgccttacataatggagttagtatttgtgagtagaaagactttaggtaatggaaatataaataagaaagaatgtttaacataatatgctaaaaatattttcatatttaaataacatacgtaaaggtgtgctttctgtgttttatattatcttgcaaatccttttgccctttaaaaagctgaaaatcttgccatctgacttactagtcattttagtgttataaatggcattttgtacaaaatagtctattcagttcgttcattcatttaacacacattgattgagtgcctgctgggtacaagggattcaatttatgcctattgatatctgcggaccaagatacccatttagtgaaatacttttttccctgaaatctgttagaaaagactttgaaatacttcagtgcaaagtgtgtgtgtgtgaagtttagttatatcttcatcttcagatgaagttttaaagcactttgtagttctctattgccaacaatttaatgtttatgtgttgccaattcttgcaaccactgccctaccaaacctgtgggttgcaaatcagaactaaaattctaagcacgtttcaaagatgaacacttttgttaagacccctattgcctcttcttcatgctcattttttactttttttaaaaggtacttttctcatcacattgtagagaggtctgcattctcattggaaatgtctgtttagctttataaaacaaacactttgctgaaataggaaaatgagccttattgacaattaagtgcttcttgcagcaggtggtcaaagaaaagcatgactaatacgacctattagagtaatctacatctggaccattccttaagtttttcctcaccgacagtaccatcatgccttgagtgttcttttctcccaagtgctattccttaaacacgagagtttaccagttgcctaataatgcaataaaaaatgctttgagatagctaactgcccataaaacaaactcaaattgcttataaagtttcttcccatgttcccatttgatgaaaagtcttacatcacatataactgggaagcaggggtccctcctcaattttcagacattttgaaaggatgacagttctgtttgttagatgagtaaacctctatattcataagttctaaaatccttcattatgagggattcaaagtatttataaaaacactgccctctaaaaatttcctcagatctgaagtatggtcttggtcctgaatatacagtgttatcctatgtttaaaagggtgatccagacatgagacgcaactagttggtgcataagaaggccccacttggctatttcatatctacctacaattgaccaaaaaaaattttttaggccagcaattattatttagcttcgctctttctagtgcaagaaactgcaggctggatcagtagttcaacagctaaacagtcataaaatagtcattgtgcatgttaaatttctttcaatgctttcaaagataaattccaatttctatttacttattcattgtgacagtattactaaacaggtaaggatgggaatattttgttatactgtgtatagtgaatgtattgtactgtgtctgtgaaaactgtgctttaaattatattttcatatgttttgttggggacagagcacattaagtctgaaagcaacagaggtttgttttagaactgaaggcaatttaatcaaaattcctgtcaagaaaagctgcttataaatgtaaatgaaatcacatttaaaataaactgcctctgaccc

SEQ ID NO: 25086 - DNA, 89753 bp, Homo Sapiens
gccaatctgtaactgatcagagcagctacactgaagcaaaaaccccagcgcccaacgctaaatatattgcaatggagaaaccgtccacaatggggtgtctctgtccttagcagagccttggggctgccgtttaagaccctcctgctactcccacccttttagcatctagtaaaccacgcgctgtaacaacggaatcttgttctgtgtattgcgttgtgcgagtgtgcgctttgcaaaccatctgggccccatcctgcgcggttggaacgaagatcgattcgggacgagttgggggagttgaggcttgcctgtgtctcctccctttcattgctcctctccagcccccatcccatcgtccgctctgcacaaatgtttcgccagtggagggacgtaggttttcagcaccaggaggctgtggaccttctctggaggcgtgaagtgcaccctccggagggccagagctgagtgcaacctgctcacaacgaccctctccctccttcccaaattcgccgccccaggctgtaatattacatgcagtgcgctgtaccggtgcgggagtccaggaaggctgcatgaccttccagcgaactccccctcggcttgggggatggaggctgccccggggcctgcaggctgtgtatcgatcccccagcctcagccaacgcaagttctcccgacacaaacccctccctaccctctcggctttcccagccttgcaggcgtctaacgctatgctcgaggcgccctcccctctttcccgcaataaagtaaacccggtggatattcattcccctccctaactcgcctccttctttccccctcccccctcagcttactaaccccgcgcacagagctcgccgccggcgggccccttccacccagtgtatcataatgcccaacgctctcctcctccccctctcttaatcagaaacgtgctcgcgagcccccctccctctgcgtgcatacattagggtctgctttgcatgcagcggcaggcagagaccggaggaagaaggggcgggggcgcttttgcccgcctcttccctccaggccccgttagccacccagcttcagcttcgttgtaacaccgcgtcgttagcggagcacgccgtggcctcagtgcccgggctggagaaacacaacccaactccctgcagaagggcacgaaagccagacgagtgcacagtagagcgaggaggtggcaggagacctgccactcggtgtgtgctttttggaaagagctccagcatgaaaatgggaggggctccttttttattttttaaagtgcgttcattgagggcctttctgttttgcatatagtaaactgggcagcgcttctgttttgcatgtagtacaataagggctcttttattctagaagcgttcaattcgggctaacccatcttgtatccgtgccctggggcggaggagaaggctcactgctccccgacccagccgccgcgttatactggaagctgctctcccgggctgttcgattcccagcgcgtcccgggaacgtgtgtaatcggcctctcggcgctcaaggctgcaggcggcccggctccctacgcctccatcctccgcgtagtcctcgccccctccccctctctccggaacccgcgctctgctccgggctcccgggcttccttcccccctccttttcccgagcaatgcctctcccggagggcggggcatgcagttatccaggttgcggggccggcgggcgggcaggaggcggcggcccgggcctcgggatggagttgcagcgcccaggcgtcagaggcggaggcccgaggccgctatacagattgcggggctggcgggcgcggcccggcgctctgcatagcggccggcagggtgcaggcggccgggcggcgcagagctggttaggcaggttccggggccccgtgcccccccctccgcctccccgcccccctgtgttgtcgcctctccctctcgctgcttcacttcacggggcgaacatggcgcacagctgtcggtggcgcttccccgcccgacccgggaccaccgggggcggcggcggcggggggcgccggggcctagggggcgccccgcggcaacgcgtcccggccctgctgcttccccccgggcccccggtcggcggtggcggccccggggcgcccccctcccccccggctgtggcggccgcggcggcggcggcgggaagcagcggggctggggttccagggggagcggccgccgcctcagcagcctcctcgtcgtccgcctcgtcttcgtcttcgtcatcgtcctcagcctcttcagggccggccctgctccgggtgggcccgggcttcgacgcggcgctgcaggtctcggccgccatcggcaccaacctgcgccggttccgggccgtgtttggggagagcggcgggggaggcggcagcggagaggtaagggggcgaggaacccccaggtccggggtctcgaccctctgcggagccccctcccctcccccatccgggattgaggagcatcccaattctgggaccatctcggggtccctgacccggggcgaatggctctcccatcttgggacccccatgcagggctgcagacccccaggcgcccccaccccggggtttgggcccatctggctgagggcgtttgccccccgctctcctccccctgacccttccccaaatcccttggcacagaccccctcgccggggtttcccatcccgggactgaacccctcctccctttcacagattacctcatccgagcaagattcctccctccctccctcctagagacctgatcccgccacatccccgcctccctctctgggcagatgtgttactcctagggcagttttcctctcgggcgtctctcgggtgatggcctcatccagggccacgttctcctggcccttggggatcgtgtcccttccagcaccttgctttcgaaaacccgatgaaccctcgcgccatccccgggccaggtccctatactgccagccactcccccttccttcacctccaccctctacccccaccccaagcagaccgatcctcccccatcccgccctaccccaccggggaaaatctctcctctgcaccttgcctggtctcacctcctttccctctgaagataacggtgattcctcatacagcagtctcttcccccccccgccccgtcttacagggctacagtttctagcctattggtagccgggaattactctaccttcactccaccctttccctcctttagaatgaaggattagtggcatcttggaggggaaaatagtccactgtcccctaggcttagagaagagcagctttccaccactccccttggagaggaggcaggctttccctccagctctggggaagggggcccctgtgaggggaggtgtttgttgggggactgaggcagcatcctcccaggggaagcagctgctctcctaccccacccactgcgcctgagagcacgcagtctccaacccgagctccctcccgcccttctcttctcgtcatttcattattgatccaccttttcctaggccaatcctggggcttggaaggggtgggggaagccaggttggggtgaggagagtagataagggacagttatactttagtgtggtggcggtggttgctttgggatgggagaaaaaggattatcaagcaaagttattccttagaaaggacttggggttgtctctgattcttgtaaggggacccaaggtggatgaagggtcagagcgttgccccttccccattagtactggggcaagaacggagttgcttctataaacattattcggcccccttcagcaaaaaggaaagttgcccaaggaagggaagttgagttcaggttcagccagtggcgttgcgcatttgttttccattggatgcagaaggggggagttcgaattgtagaggggggaggatggcatgggggatgctaggaggaggaagagcagctgctaggggctgaagcgaaggggggtagggggttgctgctctggagtgctcttgattgaaacagaaagggaaagataacaaccagccgtttcctgcgtgctctgccgttggtgcacacaaaatatcctgggcaaaccccttgtcccctattgtgccccgcacccctttagatttacggaaagatcctgggaagaaggggagggaggagatcccaaggaccctggcccctcctttcaaggagctggcattttttagttgttagtcttcctgcctccttttttttaatcgtttctaaggcagcctgatcaggagactgacaacaacccgccttctgacagagcaaggaggacatgatgggggcgtgttccttgctatgtagctagctgcagcgtcccctttccctgcctctttctgctctatctccacctccttttcccagccttcagaaggcagctgcagtcagcagggttgtttgagactatttattggttgctgtagattattatttttttttgaaaggccaattctgtattttttaagctaacaacacagatcccatgtagttggagaaccaaaggccacatacatgacaaaaagactgaaccgttcaggttacttgcatggagttggtgcttaaatgtgagttgattttgcttttttaaaagatacagcagcaaaaaaaaaaaaaaagaaaaaaaagaaaaaactgacatttcatttacctgcttattttcaaaattgagacttgcctggttatatgtagcattttagccccatgtatatttgagtttaataagaaagtctctattaggagaagttagtccattttaaggggatcctaagaagcattttcttcttgttcagtatgcttatttattttgtatagaaggactaagcattcacattccaaatattatcacatattcaaaagcaaagttttatgctgacagcttccaatcatagtttttcaagagactggttagaaagagagccacctggattcagggacctaatgtctgggcaccagaatattttatctgttggtctttgacaaatcacttttaaagttttaatcaggggctaaacgttttcttatctactggcattatgagataattgtaaactactgttttatttttcttaacactagtatataatgtaaagcctgtcaaggaattgcagttatttcaaataggatcatatttataaggggtttttgtctttaaaactttttcctgaacagtagttgctgcttcattatgagaagagtggttgactccttacattaaacttgagtattttttctgaattggacttgaatgagctctgttccatgggtaagctttttatgtggtgtttgaggcaatccagtatgagttgatggtatgcattgagtagtggtaaacctctgagctggtagttttcagtgtagaagcaagcactttttttttttttttaacatagccttactaatcaatgataaagttccaaaagggaagtttagggttcaccctgggctgacatagaattctaaagactgcttctcagaactcactcatagctctgtatcaagtcttatctggattcatgaagaaatggttatatgatccaaaatgattctaacctctttaaactctggttcgccttcagtgaataatgactataacttgcctatgtaacaacacctatgttaatacttctaaaactaggtaacagaacttccagatgactttgctgtttgaactcccttagccataggagacttgtccttcactgctgttggttcctaacttcctttgtatgacaattaggaagtagaattgaggttttgttttattgagcactgtaagaaatcagaggtccattttttgcctttccccttccctctgtagtgtcagtatcccatttttctaaggattctctcaggtaatgttcatactactgtactttgccatctaaataaacatagtacagcagcaccctttctgttgactagaagttaggctgttgtaataataaacccctgaaacagtgtgtttatcagtaactagtcttcgtttattaatgtcataatccagttaccttccctactacttcacaaaatattaaaagcaaaatttccatcctgatcataacatagcaaactttaattagatacaaattgaaactgagttacagcattggtgtgtatttattttcacttgaaattgcagtttagttcatgtggactgagacaggcttttggattggacttgaaaagatagtactcctgcagctgaaaggtagtaggagagcgtgattttttttttttttttttaatgtttactggtcatgtatgtaccaagagtgggagttgctccttcgttgccttcacagctagtcctaagattggcagaaggtaaatgaaggagggaacacaagcagagtggagtgcacgaagcctccgagtagaagtcagtggatgtgggctctcatctccgttactgaacagttatgagaccctgggcaaattcacttttaaccttaaatttctgatctgtaaaatgaaaagtttggactaaatagctcatgaatctgttctgtgtcagtattatgattcctttctgttgtattaaacttttggtcaaatcagaatttcttattctgagtttatttcaaaagtcagagtcaagtgagacgatttgataatttttgttttttttttgagtcagggtctcactatgttgcccaggtgcatcttgaactcctgatcctcctgccttagcctcctgagtagctgggattctgtttggtaatttttaatatcagattatacatttgcctatataactggcattattattaggaggagaaatttcaacttggaaagttttcgttgtgtggaaaaaacataaggactttggggaagttgaccagtttcatttataagaaaaatgaggataaagtttttacacatagttctgagaacctacagaatcccaggcattatctggtgtttagaggccctcttgtttggctaaatgtgttgtcattgttgtgaattccagactatccaaaagagaagttattttcagtctaggtggtatattcctgtaggtgtatgaattttgaatgaaaagaaaaatccaatacatcaatgtatttataaatctgaagtgatagtacctacttcataggatgtagttattaatatgttctgaaatggtttatactgagcattagaaattcagtctttagaacttttcttcctctgtgactgaaaaccagatgacatgtccccatctttcacttccatttaattatcttaaggcacatactcctggaggaaatcatcattcacacaatagtgatccatcttcttattggaagttgagagaaactattcccatcttgacttaattctcatctctttgctcaccttagagctgtccttccgtggggcagctgtgcagactctataccaattgcctcccttaccctgtggctagagggggtggcaacagtgctttgcttgctcagaggcataacagactgcagtgcctctctcttttggaaactcgctgtgttttaattgtaggtctcctaattaagatctctttgtgcctgcccacattccactagtgttggcacagagcttcagcttccttctagcacttaactgaaggccttcaatcgggccttttgtgaatatcttgtctctttccattcttcctctgccaaggtggagagcccagtggcatagacctttgagaagggggaagctttgtgactatcactactttgggaggaatttattcgaggattgctgggatgggaccttcctttgtttgcatatgttattttcagggattaagaaaggttaaattactaatgagtctggcatgatgtacctacattttaatcagattcttaaccctgtaggcactagtaggaaagaggatgccacagagttcactgttacaaagtatttccttggatcttatctagactggtttatgaaacttgatgagtaaaatattgtcgtggagtaaatctcagactcgtgatttttgtggactctgaggttgttgaagacaagacaatcagatgaaattattgattgctcctaagttgtatcggctttgagacacagactgaattaaagttagctttcagatctgagttaacttttgattagaaagactttaggaggttctggaaattgttgagttaattaagaatacccttgtaggctccactatttcttgagattttcaggaattgtctaggcttctagagtattttcagaataagataaaatagcttttctggaaaaagtagtttgactttagtttccaggaccttcgtattcaaaatacagtatgttctttactagatctacatgtggcatgctagagaaaatgctatcttttattaagaaaaaggaatcttaagtcctttacctggacccagatggcttcattgatcacatcagtatgaggttacgcagacaaagggctatttttgttgttgttattgtcatttcattggttgttgaagaaggcctgggagaaggaagtacaggatcttttatggcatgcattaaataaagctggaggcctgcactcttatacctgagtgggtggttttatggcctaattctctaattgctggcatttatgacagtgtggatgctactggccctgtggctgaggtagattatgctgggaatagggaggaaaaaggggtccttttgttagccttttcattttgcccctcaataaagtctctgcaaaaaccctgaggaaatacagagacacttggactgagggaatgacttcccataaaatggttctttatgtttttaaaatgatgagccgcttttcttgacctatccaaagaaatccataccaccactgttaaatatttcaatgagttttttaccttgtcaggttacacaccaggggaagccaaccatgagactgtagctgctgccaaacattcgcttctaaagacttaagacatttgaaagaagaattttgttacgtgatttgtaattgttgtggatgatataaatccccttgaaggattagtccaaaacttctaagaggccaagcttggtttaacttttagatgttgaattgaatgtattgccctaatgagttttagttttaaggaaacaacaaagatataagagttagttggcagttttgtgtgcagtgtatgaaaattccccttcccttgaaatgagtagttgtttttctatttgacaaatagactgaagggatttccccagatatcttaccttcaattattgctgcagcagtaccctgtgaagtaccagtgggcagcatcggtccagtagcatttatttcaggagctggagtttcttccgtatatagtgttttatccattttcttgcatttctggttttgtgttttgttgggatgtttgggtatagatgttttgatgtctttcagcaacaaaagatatgaatctttctaacattcatactgttttagagagatccacttgtattatctatgctttgctgaagcatcattgtttcattcttattttacagcatcaaggtaatggtagctttctgtcttgaattaggagagtgatattacttgtgagaagggttttggagaatagttttttctttaggctgtcctttatactatctcagttctaaacactagggaaaagttaattcttatctctaataaatatcctacacctagagaaagaaatatttacacatgcccatattcaacttctgtccatccatgaggattgaccactttttagatcaaacacaaacattgtccctagattattgcctttaattataagcagtaaaaccttgtggataacatctctttaagcttagctaatgaggaaatccttttgtaatctctttggctaggattttttatttgtgcatatataaatacctttacagaagaaagggagaatctcataatctaatctgtagtggtgtgagatcgtttagcatagtaattaagagttgttaagaccatgggctctggatttaaactgcctgagttcaaatctaagctcagccatcttgaaaaagttttttttgtgttttgtttggtttgtttgagacaggatcttgctttgttgcctaggctagagtgtaatggcacaaacatttcatttcagcctcaacctccagggctcaagcaatcctcttgtctcagcctcctaagtagctgggactacaggcatgcaccaccacactcagctaattgttttatttgttgtagagatgggagtctcaccatgttgcccaggttggtcttgaactcctggcctcaagtggtccccctacctcagcctcccaaagtgttgggattacaaatgtgaggcactgcacccaaccagaaaagtttttgaacctctccatacctctgtttcttcatttgtaactgagaggtactcatgcttcatagtctcattgtgaggcttaagtgagatcatgcatgtaagcacttagcattttgcctggcacataggaagccctaattgttagaaccaagagattgaaaggagagcagggttataatctttttttttcatcaaaataactggtttttattacattaagttatacctgtatatgtatgcatacatacacctatttgagtgctataatcttagaatgttcttgatattagtctgagtgtcaagttcttctataaactaggtggaaccaaattgaaggccagccacccgtcttggtaacaacattagtgtccaactaaagcatattaaagataaggcaaaaaagaagaaagagaacaagatggtaaataggcaagtaagataccgaggaacacagtgcctccatgagttgctaattatcaggccaaggcagctataatggggttgctacctgttgtctctataactagtgttcctgatatttttatgaggaggcacttggtcgttccttataacagctctgaggctcttcagggttcttgggctccaggttcagacccattagtctatacttgatgacatttgttcttaagtgtcagcttgaggagaatgagtgctggtctacagagatcaatgcaagtaaccatttaattatagaagaaatgctgaattgtaggttgcaatttctgggggttggaacttgagcagaatggtcaaaagcagattagagtttaagaataactagtaaagagtagtgtgtttaaggaggaaaagtacagttttgggttgggcgcagtggctcacgcctataatcccagcactttgggaggccaaggcgggaagattgcctgaggtcaggagttcgagaccagcctggctaacatggtgaaaccctgtctctactaaaaatacaaaaattagctgggtgtggtggttgcgcacctgtatccccagctactcgggaggctgaggcaggagaatcgcctgaacccaggaggtggaggttgcagtaagctgagattccgccactacactccagcctgggcgaaagagcaagactctgtctccaaaaaaaagaaagaaaaaaagaaaagtacagttttgctgtactctctttaaaaagatttgcaggccgggtggggtggctcaatcctgtaatcccaacactttggaaggccgaggcaggcagatcacttgaggtcaggagtttgagaccagcctggccaacatggtggaaccctgtctctacttaaaatacaataattagctacatgtcgtggtgcacacctgcaatcccagctacttggggggctgaggcatgagaatcgcttgaacccgggaggcagaggttgcagtgagctgagatcacaccactgcattccatcctggaggatagagtgagactgtgtctcaaaagaaagaaaagaaaagaaaagaaaagatttgctaacatactcagtacaccatcagaaaccatcaatacacctcagaaactgaggcacagacaagttaaacagttttccttaagttatatggctagtaagtggcagggctagaatttaaatctgaacctacatctgtttgaaagttgattcttgctctctacactgtgctgtctttaagtcctttctcttcccactcacatccaatcaatttctgagtcttgtccattatattattgtagtgtttctttcatttgtccctgctgttctgttcctgctgtcctagtttaaatttccattacttttggatagtttattgtggtaatcttctcattggtcttcccacctatcttttcaccctacacagtgcttcacaatatgatagttttcttaaatacagatcagagtatgtcactttattcctaaaattctttggcttctcactgaatatgaaataaaatttcagattctcagcgctgcatgatcttgctagcctgtatttctaaattttgaaccgtgtctcctgaatgtacatcgttactgcttcaaccacattggactactgaactattaggtgttctccacagtctttgtttatctgcctttgtacctttgctaaagcctctcctttgccttaaagtctttcccattttgacctgtcttgggcttattattcgtctcccatggttcaactcagatccccagatcctaactcttccatgaagttttcacagattgtactgctagttgaaactgaacttctttcctgttttctttttgtgttttgtatgttatccttaaaaaatttaaccccgtataccttatgtcgtggtacttttgaaatgtgtctgtctttgtcccattagatagtgactcccttaagacacgggccatttctaagtcatcatttatgttttatgttttttataatggtgactttttatatagtatttgttgaattgaaaatttgatgtccatacaacttttaggaatactttgctgggacacattacataaactaggagaacttaagactacgaacagaatatttggactaatcattaagaaatactaatttaagtatggcaaaggaaagcacaggtgccatgatgcgacatttttgtaaaggtattgattggggttttgaaagcgatgttagggtatcctgatgggatggcattatcttttatgtagataatacttagcactgatcatccccttacttgagtgttgtttccatttctaggttcctcaacttaaaagggatgaggagaccttggagacggttctgaggagactcaaaagatgattatatgattggaagtcagtcctatgaggaaaggttgagagaatgaaaggttaagaggcaacttaataactcttcaaaaaacatgaatggatccattattaggaatggtaaccagcggtttcccagctccactgacagcagaataagagaaaataggtttaaaccgaaatcaggagtagttgtgtaaagaacttattggtaatgatggttgtcattacagtcatggtaaaaaggttaccaaaataattttattatcttctctggaagtatattttaaaagtacagtcctgcctacatatgtataaaatgacctcttaagctaccttttccttctgtgaatcagtaaataaattcttattcagctcctcgaagcaataattactttccagtaggaagcttccagagatatttctttaggaagtaatggtttttgtagtggctttataggagaatacaaatttttaagtggagctaagagagaaatcttaaacatcaagagaaaccaaggaaaacagtaggtgtggtatcaatataggaaacaaataagtatttgtagcttttatgtccattttcagttgtcatttaaagaggtatagttcagaatagctcttgttaaggctgtcactgcttgtggatacattgtaacaaatgcttataaatcatttccaaactaatagaagtttgcttcatgttagttagtattataaaagcctctgacccttggcttttgaggctgtgtagagggcttgcatcactcagaatgaaacctttttagatatgttgggttgcagaaagcatttcctgtacagtcagaatgaaaacttgaattgggattattcatatagattaccaaaagtctgggcagagctgatattaccaccagccagttttcctactaactcttaactccaaaaccttcattgggttattgaagctttaggacttttgaatttcctactggaattgtgtatgaattccttctttcaagtgaactgatactagatttatttaagattagttatacatcttaagtattttttaagtggcatataatgaatggtctctacttttaaccagtctcataaaatgcctggggttcataggtgaagctggattgttgcaggaattctgcaattgttggcaaagcgaagggcagtttgactccttaattataaagttggatgtcatttgagaaactctgggaattggaagtagaacaaattcatactttccctataacttttaatttcttgtcatacattcagaaaacaagagatgtaaaattcataaaactgcttgtataaattcagaaaacgggattataaaagcaaagacaaattgtcttacgattctttgttctacttgagagattcaagtgttggagtaataaaaaataccagggactttcttttttttaataggttaatgccacctaatgtgggcttctcagaatgtgatggcaaacttccaaatatgatgtgggagccaaaagagaccaactggttttacaaaatattaagaacacaaaatttcccaactcatatatttgaatattcctaaaaaataataagtcaaaattgtgttggtgggctgggcacagtggctcacaactgtaataccagcactgtgggaggctgaggtgggaggattgcttaaggccaggagttcaagactagcctgggcaacttggtaagacctgatctctacaaaataaaaattttaaatttaaaaaattaaaaaaaaaaaattagccaagcatggtggcctggcgccttgtagtcccagctactcaggaagctgtgatgggaggattgcttgagcccaatgggtcgaggctgcagtgagccatgatcatgacactgcactccagcctgggcaacagagtgagactccatctcaaaaaaaaaaaaaaaaaagagaaaaaaaattgcattggccaacttggaggcttcagtgttattttgccaagaagaatgttcacttttgtcatctaattttacactgctccttcagcaaactgactttatggagagataaccctgtttacctttagaaagaaggaagttgtggattcctcagtcttactcccattactattggtcattcaacagcccatcttcccagaaggaaagatgtaacctgacttttgcgccagaataagaacaacaaacggaagaaaaaaactgagttttatagtagaagtttgtagttgaatgagcatgtagctcaaaatgaagttaaccacttaaacttgtcatatgggggaccaaaatttcttataataaaaagaactatatctgaaaataaagttggtgtttgtttaatttttctagcctattcaaatcaatctggtcatttatggtactttcctattagagaaaaataaaccctgtgattgtgatgcttaacttaattttctacagtgaatcagttaagtgggcttattttttctgctttagcaagtagataaaccagttcagacttggaacctgaggattctggaaatacacctttcttgagtttttggtttttttttttaaagattctgcagaataatttgggacattgccaggaatcagaatagtttactatctgaagtagtgcattcattttgctgttttttgtttttttgtttttaagacagataagctactttatgactacctctttttctgaagcagggtgggtggaggtcacctgtctcatttgctttgctgttttcagcatctttgctgcttattcttgttgacatggagtggggatgaggggtactacctatttctctagttacaaagtgagtagcatttgtgtttcttaggtgacagttgctaggtagaattgaattaaatatttgaaaactggacttcattcttgtgtgggtgaaatttttaccttctgttgttattgaagaacagagaattattgtcttagcgctctttaatcccaagtgacctttttgtgttaacatttctcaatatcaggcagagatcatatttaaacagtttcaatctcttcctatctgttatgcattcaaataatcattgttctcttgatgcaccaataaccagagagaatctgcccttgttcctgcccctgacaatctgttcacaagagaatatgatgtcagttcaataacagcatacatttcttgactggttgaatttcattaactatttggcttaagaagtttgccccttgatgtctgtgtatttgactgtgcttgggtatattatacttttcttactgattgagcagcattatttttatattctgcttttggaaatgatttacaggtgtcactacattttttttctactacaaataatgaaaaagtacctgcaaagaggctcatcttcctaaaaatggctatcataaatattgcattacaaagtaagaaatagaaattgaaaaatcgaattcatttatcaaagaacatcttttatactctaggtggatgaccagctactggggctctaccattggagacgtcccttccctcatgaaacttgctatctaattctttttttttttttttttttttagagacaggtttttgctcttccacccaggctgggatgcagtggcacaaacacagctcactgcagcctcaaactcctgggctcaagggatcctccttcctcagcctcctgagtagctgggaccataggctcacaacaccatgcctactaatttttaattttcttttctgttctcttttgagacagagtcttgccctgtcacccaggctggagtgcagtggcgcaatttcggctcattgcaacctccacctcctgggctcaagtgattctcgtgcctcagcctcctgagtagctgagactacaggcacatgccaccacatctggctaattttttatgtttttagtagagacggggtttcaccatgttagccaggctggtctcgaactcctgacctcaggtgatccacccacctcggcctcccaaagtgaatttttttttttttttttgtagagatggggtctcaccatcttatgtagctggtctcgaactcccaggctcaagcagtcgtcctgccttgacctctcaaagtgctgggattataggtgcgacccaccatgcccagcctctcattctttttaatgagctcagcttaaaatgtagcaggaatataagtattcacatttttaatactttgcaagatactttggaaattgataatctgaaggttgaagctctcagaactaatgttaacagaattgtccttgggagcaattcagctattcttcatttacggatttagtgattcttgagtcagttgtcttacaccaaatgtaatacatgaatcaggagggtttttctttgtttgctttttgtttttttaagagacgaggtctcactatgttacctgcgctggagggcagtggctgttcacaggcataatcatcatgtattacagacttgaaatcctgagcttaagcgattctactccctcagcctccaaaatagctgagaccatagtgcacacaactacgtctggctctgaatcaggagattttaaatgttctcaaagtatgtaatagctttttcagtcaggcatggtggctcacacctgtaatgccagcactttgggaggccaaagaggaaggaccgcatgagctcaggagttcaagacagtctgaacaacatagtgagaccccttctctacaacagaataagaataaccaggcatggtggtgagcactgtagtcccagctcctcaggagactgagatgggagcatcacttaagcccaggaataggaggctgccgtgaggtatgatcataccactgcactccagcctgggcgacagaataagaccctgtctcaaaaaacaaaactttttccctcctgttaaaatggaacttagatgtgactacatgctctgctgccttctaccatcaaagaagtgcccccttctttttttttttctttcttgttttttttttgagatggagtctcactctgctgcccaggctggagtgcagtggcgccatctcggctcacagcaacctccgcctcctgggttcaagcgattgttctgcctcagcctcccaagtagctgggattacaggcgcccaccaccacgccctgctaatttttgtatttttagtagagatggggtttcaccatattggccaggctggtctcgaactcctgacctcgtgatctgcccacctcggcctcccaaagtgctgggattgcaggcgtgagccactgtgcctggcggaagtgcccccttctatctaaggccaacctctccatttgagctctggatcccatctcctctcatctagtcagggttgtacctgcagttatctcatctctcctgctgcataggtaatttctctctcacaactagattggtcccatcaccatataaaactatctgccttaatataatcctttaaaaaaacgcttgaccccacgtccacctctagctgctacctgattcttttctcccttttcacagcaaaactccttgaaagtgctgtgtgtaattgctatttctactttctcacctttcattctttcctcaactactccagttgggcttttatccccatgatgcctctgaaatagctcttatcaaggttctcaaggagctctattttaccagattgaatagataattctcagttctcatcttgttaaaccctttggcagcctttgaaccagctgaccactcccttcttggatttttttttttaacattgtactcacctgtttttcttcttaactcattggctgttaattttcagtattctgtatggcttccctcctctgcttaactctcctgaataaggttcccaggagtctacttttcactgccttctctgtctacacactcttcctaggtcatctcatccaggcctcatctatacgctgacaactaagaaatctttttctctaacactgactacttctcagagttccaggcttgtatagcctgctgccaatttgatatttccatttggctaatatttactgagtgtttattgtgggccaggctatattctgagcacttcacatgaattatctcacctaaccttcatgaccattgtctgaagtatcactagtattcccatttcataggcaaggaaacacatatacattgaagcacttggatacctaataggtatctcttacttaccatatctaaaaagtcttgactttcttcctcaaaccttttccattcccagtctctttgtttcttaattattccaccaaaaatccagttgctcaggcctaacatgtaagatttatcgtcgatttatctcttttattcacatctcacatctatcccatcagcaaattctgtctgtattacatccaaaataagccctaaattcaactacctctcaacaactttgctaccaaaacctcagactctcccattatagtctcttggttggagttgcttatgttattacctcactaaagtttgtttctcacatagcaacagtaaactctggtatcaaatcctattccttcactttaaacctatctgtgtctccccacactgctaggataaatccagattccttactatggccaacaaagccacacgtaagctggcctctggtcaagcctacttctcgagcattgtctcttctcatctcatccattctgctatatagccacactagcctttttctgtctgtcatgcatgctgtgcctgttgctgtcttggggcctttgcacttgctctcaggctagaacactactccaccaaggtctttatatgtctgactttttctcatttaggcctaaccaggtttggcaagtttttttctgcaaagggccagatggcctctgttgaaactactccactctgttgttgtaagtgcaaaagcaaccataggcaatacagatgctccccaacttacgaaggggctacatcctgaaaaacccatacatcaaaaatgtcataagtcaaagatacgtttaatacacttacaagctcgtcgtaaagtcaaaaattgtaagtcagaccattgtaagtcagggactgtctgtccattaacaactgaacgtggccatgttccaatacaattttatttatgaacactgaaatttgaatttcatatagttttcatgtacacaaaatattcttttgactttaaaaaaatggttaattttttttttttttaattttaacttgcagaacaattgatggtgggccaaattcggcctgtggcccatagttttccagtcttcggtaaactattgccttagagaagcctttcctgtctaccctagcgaatataaccccacagctaacacctctccaccccccactcctgtcaattcttattgtcctagtgtcttttttcttcttagagacagggtttcactctgtcacccaggttggagcgcagtggctcagtcagttcactgcagcctcaaactcttgggctcacatgaacctcctgcctcagccttcctggtagctaggattacaggcgagagccaccatgcccagcccctagtgtcttttatttatttgttatatgtttattttctgtctctccattagattgtagcttcatggggcaggaattttgttagttctttacatgtatcttgagagtcaaacagtacctggcaatactcaataaatacttattgaatgattgagtgacagtcatatttgaattatgcctgtagcctgctatctggtcccccttttttaagtctttcttactctagttcattatatataccatttccagaataaacttcacagttaatgccttctctacatttgagaaccaatggtagcagtctgtattcattgcatttgctttgaccataccatacaagaattaacaaggttctgattatttcatttgtcttctatcttggccctactctggctaccccttttcagcctaatcagtttttaccaatcctccaatccttgcatctgattttcttccccctctctgccccttattattattatttttttttatttttatttttatttttatttatttatttttttttgaggcagggtctcactctgttatccaggctggagttcagtggcgcaatcatggctcactgcaaccttgacctcctgggctctggtgatcctcccatctcagacttctgagtagttgagactacaccacacccagctaatttttgtgtttttctttgtagagatggggtttcacattgttgcccaggctggtcttgaactgctgtctcaagcaagctgcctgcttcagcctcccaaagtgctaggattacaggcatgagccactgtgcccagccttggctacatttttaatacatttttaatttttttttagacaagtcatctccctttgttgcccaggctgatctcaaactcctggaatatcccactgcctcaggcccccaaagtgctaggattatagatgtgagccactgcacctggcctctccctgttactgttaatcagccattgctcattaccttcatgatctattttcttcagagctgcattctttaaaacttttagggccatgcatggtggctaacacctgtaatcccagcactttgggaggattgcttgagctcaggagtttcagaccagcctgggcaatatagtgagacctcatctctactaaaaatttaaaaaatgaaccttttttttttttgagacagagtctcacattgtcacccgggctggagtgcaatggcgtgaccttggtttactgcaacctccgcctcctgggctcaagcaattctcttgcttcagcctcccaagtagctgggattacaggcacctgccaccacgcccagctaattttttgtgtttttagtagagatggggtttcactatgttggccaggctggtctcaaactcctgacctcatgattcgcccaccttggcctcccaaagtgctaggattacaggcatgagccgccgcgcctggcatgcctatatatttctaagtatgtaggtattcctcagaactctgccatctaccctccttttctttcagtactatattctttccctgggtgactgaattcatacacagtttcagcattcatatattcattgagtcagatgtgttttcttcagatcattataccctttagacaacgtggataaacatttcaaattcagatgtctaaaatgatctctcttcccactcctttaaacctgtctcctttctgtgttcccagtcttggtaaataccaccataaacctaatcaacctaagccagacatccacaagtgttttattgattctttgcactcccttaaacctttatatcaaagtcttgtccattttgcctcctaatgtctataggatctgtccttttccccttaatccgtatggccactacagtcattttacaactgttcttcctgcctctacttctctactgctgtcatagcttttggcagcaaaaatccaaatctaatcatacttctctcctaccagagtcactaatctgctatagccttcaggatgaggtctacacgtcctcaaagataaacttcaaactcatgaaggcatataagacctttcatgatacacctcctgccttttttttttttttttttttttttttttgagacagagtcttgctctgtcacccaggctggagtgcagtggcatgatcttagctcactgcaacctctgccttctgggttcaagcgattctccgcctcagcctcctgagtagctgggactacaggtgcccaccaccacgcctggctaattttttttttgtattttttagtagagacagggtttcaccatgttggccaagctggtctcaaactcctgacctcatgatccacctgcgttggcctcccaaagtgctgggattacaggtgtgagccaccatgcctgaccgcctttttttcccttcaatatcttttgcccctttcccacatcagctaaggcctcagtcatccagaactatttttaatttcactccatgccacattcttttgtgtctctgtgcctttgtatgtgttattctctctgcttgcactacactcctcccccaccccccaccagctttatcatccttcgaaagattaagttttcatcctctctgcaatggccttcccgatcctttctccttgagtgggttaattgtctttctgctgtgctcctccagcagtgtcttcctctagcatagcaggcaacatacgatacttcattaatttactcatctgtttttaagattagcaggtccttaaagacagaagctgtcctttatctctgttttcataccgtagcctaggaatggccgatatatattttaatgagtgagtgaatgaatgaattggtacagtctgtcctcccaacctgagggcattctccctatgcatttttttttgagatgctttcaaatttattttattttggtttatttttgagacaggatctcactctgtcacccagcctggagtgcagtgtctcgatcacagttcactgcagcctgtatcttctggacttaagtgattctcccacctcaacctcccaagtagctgggactacaggcacccaccacacccagttaattttttctattttttatagaaagagggtttcactatgttggtctagaactaggctggtctacaactcctgggctcaagccatcctccctcctcggcctcccattgttaggatttcaggtgtgagccacctcgtcctgcccctatacattcttaaaagtaagaatcatattgtgtaattctttgaagtccctcagtattttctactatagtactattaccacagtaggtatttaatgttcttaaaacaagtttattgcatttcttttattttcattttacaaacatttattgggtgccaaatttgtgctagatattagaaatacaaaaatgaataggaaaactgtttctatcctcagagtacacactctaaagaagacaaatgtgtgaacacattttttaaaattccttctgctaatactagtaattatgtgagcatgtctttaaggtgcaacattaagaccttggtattttgaagcttgtagcagtagccacaaggggaaatgtgccagctgaagtgatagctacctggaataaattcccaaaggggaagtggtattctttttaaacttatcgctgccaagatgcacagtttgcctcctggatatttcttcaactttagttgttctcagtaattttgttagttctcctgtggcctcctcatttgatggaatgatatataatggtactagaagccttcaaaacaaagtatttcaaaaaacaagtgcatcaggagtgattttgatactgtctatggtattgatgttattttcaattgattcattgaaatttgttttgtaattgaagggatttgatttttcaaactcttttttttcccccctttgagacagagtcttgctctgttacccaggctggagtgcagtgcacaatctcagctcactgcaacctctgcctcctgggttcaagtgattcttgtgcatcagccacccaagaagctgggattaaaggcatgtaccactatgcccaccaaatttttatttttggtagagacagggtttcaccatgttggccaggctgatcttgaactctggcctcaagtgatccatccatctcagcctcccaaagtgctgggattacaggtgtgagccaccatgccaggccctgatttttcataagactaaaaattttggaaacagaagaatgctaagatatagctgctaaagggcatgtttgagatgcctaccacttaattaagtgctgtgaagtacctaggagtctcttgctagaaaaggaaggtgagggtgtgagcaaagtcatcctaggctgtattcatctgaggccaggagtattggagcttattcaatagaggaattctcaaagtagctctggagcctccatcttagcctggtaggtaaagaactctaggcgggtgatttttgctctgactatggtatattgaaaataatttttttttttttgaaatggagtcttgctccgttgcccaggctggagtacagtggcatgagctcttggctcactgcaacctctacccggccctcccaaccccccgccccgggttcaagcaattctccttcctcagcctcccgagtagctaggattacaggcgggcactaccacgcccggctaatttttgtatttttggtagagacagggtttcaccatgtctctggtcatgtcaggatggtctcaaactcctgacctcaagtgatctgcctgccttggcctcccaaagtgctgggattacaggcttgagccactgcctcaggcccaattgggaagaatttaagggaggaactaaaagctatgcattttagttggggatagggaagaaaacattacagtttatcagttgaaattttatcagatcagtggtattactagaaactgtgtcacatctagttactatagataatttaggtcttgattgcctaaactctgatttctagctctggagtgcctagttacaatactgaggaatggagatatacattgccatcctttggaagaattttgaaatttgaatatttctccatgaaccacatactaatatagaaggaagaatagactttttcttttttctgagatagggacttgctctgtcacccaggctggagtgcagtggcacgatctcagcccactgcaacctccgtcccccaggctcagggatcctcctacctcagcctcccgagtagctggaccacaggcatgcaccagcacacccagctatttttttgtatttttagtggagatgggggtctcaccatgttgcccagcctggtctcaaactccctgagctcaagcaatccacctgccttggcctcacaaaatgctgggtttacagtcaggagacaccacacccagccttcaagagttaagcaaaattttttattccagaatatgaatatgaattacacatagtattttatccttcagtaacattgtttttttagagacaggatctggctatgttgctcaggctggagtgcagtggattcacaggtgcaataataggggaccacagccttgaactcctggtctccagtgatccttctgtttcagcctcccaaatagttgggactacaggcgcacaccaccatacccagctattctttagtgacattttaatgcaactgatttttaaaaggaaggctgaaattgcacactgcctgtctgccttagatacttcttgggagcaggaatcatgtcttactcaatgttgtatctggaacatatagccctagggcaagtgtataaatgttttttgagtgaacaaatgaattaaatattgctttgtttgaaaagttgtcttagtagtacataattccttgaaacacagaatttcatgtatttttctaatataccttatattttatacacaaacattatgtttaatacttatttagggttcacttaggttcttttgtgggagaaatattcctattgcttcgtcactcacagaaataactggccactaaagaattaaagttttgccactaaaataaaatttctgaatattaagatatttatgaataacgtgaatttagtggtaaaggtatgcttggaagctctcaaataactggttaccccagagtggagatgcaggggtcagaaagaaattctacatgtttattatttttacaactagatttcacttaggaagtgacattacatagcttaatttgctgtcttaatcactggaagctaaatatgagttaacagtattttgcagtgctctacttggcaagggtgtttttctatctttgctggtaagaaaatgaaatattggtgatctagtctccaaggacatcagtgtcagcaaggtttaggttttgtggctatactgtcttggaatgctgtgctcatcagagtaggccaagttgaaaggaaaagtgtgtgatgaatggttgcctgagcccagttcccaggagtccctagtcatgtatagcatgatgtctcctgtaccctctctcttcagggctgtccaggcttatgatgccacgatgccaaatgtggatttaattgtagcttcttttgtcttttttatacacatattactgtagtcttttgatttctagataagtttaaatccttgggaagccaacactcttaccttgtttccaacctccagggatcccatgtgcttaaggagagtgatggagcaagatgagaagcctgttgctcatgatagtgcagtgaaaggaggacttttttgcagcaccctctttatttatttatttatttttgagacggagttttgctttatcacccaggctggagtgcagtggcgtgagcttttggctcaatgcaacctctgcctcccaggttcaagtaattctcgtgcctcagcctcccgagtagctgggactacaggcgcgtgccaccataactggataatttttgtatattttgtagagacggggtttcaccatgctggccaggctgatctcgaactcctggcctcaggtgacccacccatctctaccttccaaagtgctgggattacaggtgtgaaccaccatgcccggctgcagcaccctcttgtagccttctttcccagtgctttctcaacttggctttacttagtttttttgttttgttttgttttgttttgttttgttttttagggctcttacataggcttggaagttccaagttagaagactggagctctttaacataacaatgacagcttttgtttttggctaagctgtccggattatttaaacaatgggtacttattttttaaagcatgcttcaagaaatcaatcaatatttcaagtgcaaagaaagttcttgggtaaaagtatagttcattttgactacttatttttatttatttatttattttttgagacagagtctcgctctgtcgcccaggctggagtgcagtggtgcgatctcggctcactgcaggctccgcctcccgggttcacgccattctcctgcctcagcctcctgagtagctgggactacaggcgcccgccatcacgcccggctaatttttttgtattttttttagtagagacagggtttcaccgtgttagccaggatggtctcgatctcctgactttgtgatcctcccacgtcggcctcctaaagtcctgggattacaggcgtgagccactgcacccggcctgactacttattttttatttccttattccaagtacaagaccagaaggaaaacgaattaatgcttcctgtcattttggaaagtacttagaaactttaaatattggcagttaaactgcctgacagctcagtggaactcttgttttggaatacattgcagttaggattatatagttacattttgtaaaagtttgaaatatataaaaatgactcattaggttgttaataatgaacctaacagtgtgtatctcttacatttatctttattttttttttttaaataaagatggggtcttgctatgttgcccaggctggtcttgcactcctggggtcaagcaatcctcctaccttgtcctcccaaagtgctgggattacaggcatgagccactgcacccagcccatttcttttaaagattaataactttttattacctgttgaatactttacctattgattattatatgtatagttgcttgagctgtcaatcattgtagcatttggaacataaaatgcgtgtatttagcaatgtagtcccctagtaagtgttgggaaatccccagatgtctttgtgaaatgcatagattagcaggttgttccacgagtataattcaggaaaagaatgaattaatcagaaatttgaaggatctgaaaatggccatcatgtgacttttacagtagctaaaagaatagcaatttttgtactttagacaacttattcaattcctttaaatatttattgttttatattgtatctattatggtaggaaaactattctacagccagtttagacacttaggttctttgtagctaactgtgtgatcttgggcaagtcatttggccttttagagcttcattttcttcaaacacaacaataagaactactatgtgaggggacttcaaagaaaactcatggaaaaatacatattatgaaaaaactgcagaatttcaaaattttgtatgcaccaaaataaacttgcactaacttgtcataacatatctgaacaggatgtagtttgaggcactaagaaggataagacatcagtttgaaaagagcccctatcagagcaacataagttctgctaaaattgaagcaaaaacaaacataaaatttatggtgaagctgggtgaaagaatggtgaaatcattgatgctttacataaagtttatggggacaatgccccaaataaataattggatggctcattttaagaagggacaagatgatgttgaagatgaagcctgtagtagcagactgtccagtttgcaaggaaaaaattcatcttgttcatgccgtaattgaagaggaatgatgattaacagcacaaataatagccaacaccatagacatctcaattggttcagcttacacaattctgactgaaaaactaaagttggctgggcgtggtggctcacgcctgttatcccagcactttcagaggccaaggtgggtggatcacctgaggtgaggagttcgagaccagcctggccaacatgacgaaaccccatctccactaaaaatacaaaaataaccaggtgtagtagtgcatgcctgtagtcccagctacttgggaggttgagacaggagaatcacttgaacccaagaggcagaggttgcagtgagtgagccaagattgtgccattgcactccagcatgggtggcaagagggaaactctgtctcaaaaaaaaaaaaaaaaaacctaaagttgagcaactttctaccaaatgggtgccaaaaccattgcacccaaatcagctgcagacaagtgtagagcattcaatggaaattttaaacaagtggcagcaagatcctgaagcatgtctttgaagaattgtaacaggagatgaaacatggctttaccaatacgatcctgaaaacaaagcacaatcaaagtaatggctaccaggaggtagaagtggtccagtcaaagcaaaagcagactgtttaagagcaaaggtcatggcaacagttttttggggatgctcaaggcattttgcttgttgactttctggaggaccaaagaatgatagcatcagcttatttgaaagtgttttgagaaagttaaccaaagctttagtagaaaaatgcccaggaaagcttcaccagagtcctgctccatcatggcaatgtccctgctcattcctctcatcaaacaagggcaactttgtgagaattttcatgagaagtcattcagtatcattaagtatgctgatttgtctcctttgccttttttgtttcccaatcttaaaaatctatgaaggaggcggagcatctaggctgaggcaggagaatcgcttgaacccaggagacggaggttgcagtgagccaagattgtgccactgcactatagctaggtgacagagtgaaactcttatcttaaaaagaaaaaaaagaaatctatgaagggcacccatttttcttcagttaataatgtaaaaaagactgcattaaaatgtttcagttcccacgacccccagttctttagggatgggctaaatagctggtatcatggcttacaaaagtgtcttgaccttggagattatgttgagaaataaaatttatatttttaatttttatcttttaattccattttccatgaaccttttgaagtcccatcatatgtatgttgcctatagctttccaagtgatttcacataaattatttattccttacagtgctcaaataaaaaatgaaattgagggatagatacagtaagtgagttgtctaagattacatagtctgagagaatcagactgagaccctaaaccaacccttctctccccacatccagcactctcctcactggcatcacgtatgagaagactggattggccccctctacaattataatattctatgatttttttgtttctgaagtgatttgccattacctattttatttgctttttcctcaaaatatattttagggttactatttttaatgtcttttttttctgcctgaaagtacattttaaaagttaacagtatggaatttcattattgtgataagattttatattaattgtgctgttaggagttttggctgtttttgttttgttttgtttttttggtaacattgtagcctacaagtgtaaaccctgaaaatgattccagaaatttatttggggttcagattcacatgttgtaggttagttatatactaacttgttttaagatgaagagagataatttttttattttaaaattacttttagattttttttagattgggaggccagtatgggaggatcacttgagcccagaagtttgagaccagcctgggcaacatagtgagaccccgtctctgtaaataattttaaaattagctgagtgctggtacatgcctgtagtcccagctgcccaggaggctaaggcaggagcattgctagagcccaggagtttgaggctgcagtgagccgtgatcacaccactgcagtacagcctgagtgacagagtgagcactggcaaattttaaaattttctgtaaagactcactatgttgcccaggctagccttgaactcctggcctcaagcagtcctcccatattggcctctcaaggcgctgggattacaggtatgagctactgtgctggccaagagagaatttttcttattcacaaataatgttcacagtaagaatttacttaaaatttttttaaagtaaaaagaactggctgggcacagtggctcacgcctgtaaatcccagcactttgggaagccaaggtgggtggatcacttgaggccaggagttcaagaccagcctggccaacattgcaaaagcccatctctactaaaaatacaaaattagccaggtgtggtggcacacgcctgtaattccagctacttgggagggtgaggtatgagaatctcttgaacctgggaggctgaggtggcgccattgtactccagcctgggcgacagagcaagactctgcctcaaaaaaaacaaaacaaaacaaaacaaaaacaacaaaaaaccaacaaaaaaagaacttacgtgtaagaatttaaattagtgatgaaagaagaaactgtaaaaagtactccagtaagccaggcatagtggtgcatgtatgtagtccgagctatgcaggaggctgaggcaggagtatcacttgagaccaggaattaaagaccagcctgagcaaaatatgtaattaaaaaaaaaattactgtagtctgtgttccttaaatttaggtttcatacattcttagaattataatactttttcatggctgggcacagtggtgcatgcctgtaatcccagcactttgggaggccgaggtgggcagatcacttgaggtcaggagtttgagaccaacctgcccaacatggtaaaaccctgtctctactaaaaatacaaaaatgagctgagcatggtgacaagggcctctagtcttagctattcaggaggctgaggcaagagaatcgcttgaacccaggaggcggaggttgcagtgagctgagatcgcgccactgcactccagcctgggtgacagagcaagactccgtctcaaaaaaaaaaaaaaaattataatactttttcagatgtctttgaagaggagaatttcagccttttcttaaatagtccaatactttaatcttagcaatctcagagcaaaagcctttttagatgccagtaagacttttctctcagttgcctagtatgcaaaggctgggccttaaatgttttgctcctctaaagcatttaaatttaagagatgaacctgctaatttgtcctaaaagttatatatgtcttttaatatagtcatggctgaaaaatggctaagacagttagcacctgactctagttttaaattaactgagaaaataatccttcagaaaatcattgatgttgtccacatacatgtgttcttacctctcgagaggaaaatgttaatgcttttgtcattggaactcagtttgggacttaccactataaattggaggttccagaatgtctgttcttcattccttattttgttcttgttttatgtggattttgtttctggaatctgaaattctatcattctgtgtctgtctctggaaagaactcaatctctgaatcattgaatttctattaatcagtttgtttaaatagaccatctttcttgagaacttgtgcaaaataggttaaacaaatcctttttttttttatagagcaggttaaaattagaggtaagcagaagcttttgctttttgtcctttccaactataactgaaaataggatgcttccctaagttttagtaaaggatttcatcctatatgcagtcaattcatgatccctttcacaaacgctgctgcccaccattaagtctcttatcacaggcatttttaaaattataccataaaatgcatgttgagactctctggatctcaaatgtacagaaatcacatctaaatgtcaattcctgagttaaggaactgacaattatggcactttcagtctctattaatatttagaaggcaagagattattatattgtttatattactccttatgtgtctgtagacttaaatactttttgaaaagcatttgtttgttgtattggggctgtatgtttctgccattatacttatttgcttacctgatttaaagttgtcctttaattgttttgggctgtatctatagtttgaaattaggactatcctctgtgtactatgcaccaaagatgacatttcaatgcattgttcagttactacacagctcctatttgtctgtaataaagctgtatggctgggtccatttatttcaatattagttattttatagtatccattggaatgatgataattaatatataaaggcaacttttccaaattcatttgtgtctcctctgggcatttctttgggatgtgtttgtatgcacgtttttgcttctgattttaaaataattttcctttgttgtaggatgagcaattcttaggttttggctcagatgaagaagtcagagtgcgaagtcccacaaggtctccttcaggtacggccaattaagtgcatggtgccttttaagttttgtttgttaggagattgtggcttcctcttgccttctttacatgtaaaggatgctctaccatacttgggttaggaaatggctgatgagctagacttctttttatttatttatttatttattattgttatactttaagttttagggtacatgtgcacaatgtgcaagttagttacatatgtatacatgtgccatgctggtgcgctgcacccactaactcgtcatctagcattaggtatatctcccaatgctatccctcccccctccccccagctagacttctttatgggactcttatctatcaggccacattgggtttattctttctctctgggaactacttggggcatgggaagtaggtttccacagaattactgggaaatctggtaggcaaagtgaaggtaacctagtaagagtatcctcagatttacacattttgtgttatgtggtagtgtatatatgtctttgggaataatttggccattattttttttggatgaaatttggtccactattgtcaaagaaccaaaaacaaaatattggcattatgtgaaacatttttacctgattcttgaaaggctgtattaaaataaaaaaatggaaaattagcaatatttgtcattattctcaccaacaaaatatctagaatatcttgaaattctagacttacaagcagtttcctaagagaagaccctcaatggaaataacatttaatggcttgcctaattcagttctgtataggagaaagctatgtatcttttgatgaaaatgcattccccatctgtgctgccattctgacttcatatatggttttctttgattttatgtggatagacactccagctaaatatgatattgttagctgtttctgctttttgacattgacttagcttgtgatgtgtgctagcattagggtctcacttaagagtcatcatatattatcatctaattcaaacatccaagttgacagtttttcttttcttaaagaggagtggtattgtcattctagttgggggcagttggccagtagtgtcccagtatctgtgctattcagacagtagcagtgttctctttaacatgtgatgaagtcttaaaacttcatataggaaaggaattagagagatcatctgggatttttgtttgtttgtttatagatgaaaaaatgaggtccatgaaatacatgagtaatgatttataaccagtttgagagttctttggatatgttgtggatcagggaagttagcagcagtgctgggactcttctctgttctgctgcttctacttatctaccaaaagagttttttaaaaagtaggatagaagaggttttcagaattgataaagccctctgattggccaggttcaagtctaccacaatggtaaggaatcttttgatgtatttccgggcaggagttgttttgtttgtttgttgtttttgtttttgtttttgagacggagtctcactctgtcacccaggctctgggcaggagttttattttgttaattcacaactttttcatggtagtttcctcttaagttttttttcatgactaccagtctaccttgaatgttgtcttgttttctaagaaaccatctcgatatgcttcattatttgagaaatgaaacatggtttctctgctgtctcctagtttattacctttgttgtaattaggatatgttgagaaaggagctgtgaatccttaatctattaaaggaagtctcataaattaattgatgaggaatgcatttatatttagaaagctcaacaataaaacctttgttgacttctgttctgttagcaagcagttccattgtaaaaatgttcatctcttttggtgcctattaagggaagttttagtctcagaagaatgttatcaaaagggaaaagaagatttgataaaatagcctagtcttactactttttaaaatacaggtttatacaaggtgttttagaaacagtcttgttttcttgaatggcttgaaaagcagcaaactgagcttatttataaattggcaaattccttttatttagaatagaactttgatttaataagttgtcattttgctgttgacatcagttaaggttaaatctttttgcaacttgagactagctcaagaacctctaagcaggggagtagatttagtggacacattatgtcacttcactgattagttcacatgccactgagttcagtgatcttattctgatgtgtcataaatgaacatttttctattcagtaaaactttcttagtctactttggcaaaacagattgaaatatgggactctgagctgcccaaggagttggtatgttgatgattgaagagcagcgtgttcaaatttgttcaaagccagaattctgaattgaaaagatgggatgactaactagaagcatattcttaaatgttaatcttggtggctaggatatggcgaggaagttcagatgttttttctttacaattcctttgaattcagaaaaaaccttcttgctcatctaaaattgtaagaaaatcagttttgtggattaattgttcaactgaaaactttttattatctttttgtatcaaaaaagtaattaaatgttctttcaggtggaatgttatttgctgacttctttgaggcaaattttgggtgaaaagaaactaagcacaattaagatgtttgattgactcattagactcaagttgaactcagtacaaaatggccagtgctaagttatattcagcttagttaaaacctaaactacacagctaaatatatgctcttcattgtttaatttctatacacagttaaaactagtcctcgaaaacctcgtgggagacctagaagtggctctgaccgaaattcagctatcctctcagatccatctgtgttttcccctctaaataaatcagagaccaaatctggagataagatcaagaagaaagattctaaaagtatagaaaagaagagaggaagacctcccaccttccctggagtaaaaatcaaaataacacatggaaaggacatttcagagttaccaaagggaaacaaagaagatagcctgaaaaaaattaaaaggacaccttctgctacgtttcagcaagccacaaagattaaaaaattaagagcaggtaaactctctcctctcaagtctaagtttaagacagggaagcttcaaataggaaggaagggggtacaaattgtacgacggagaggaaggcctccatcaacagaaaggataaagaccccttcgggtctcctcattaattctgaactggaaaagccccagaaagtccggaaagacaaggaaggaacacctccacttacaaaagaagataagacagttgtcagacaaagccctcgaaggattaagccagttaggattattccttcttcaaaaaggacagatgcaaccattgctaagcaactcttacagagggcaaaaaagggggctcaaaagaaaattgaaaaagaagcagctcagctgcagggaagaaaggtgaagacacaggtcaaaaatattcgacagttcatcatgcctgttgtcagtgctatctcctcgcggatcattaagacccctcggcggtttatagaggatgaggattatgaccctccaattaaaattgcccgattagagtctacaccgaatagtagattcagtgccccgtcctgtggatcttctgaaaaatcaagtgcagcttctcagcactcctctcaaatgtcttcagactcctctcgatctagtagccccagtgttgatacctccacagactctcaggcttctgaggagattcaggtacttcctgaggagcggagcgatacccctgaagttcatcctccactgcccatttcccagtccccagaaaatgagagtaatgataggagaagcagaaggtattcagtgtcggagagaagttttggatctagaacgacgaaaaaattatcaactctacaaagtgccccccagcagcagacctcctcgtctccacctccacctctgctgactccaccgccaccactgcagccagcctccagtatctctgaccacacaccttggcttatgcctccaacaatccccttagcatcaccatttttgcctgcttccactgctcctatgcaagggaagcgaaaatctattttgcgagaaccgacatttaggtggacttctttaaagcattctaggtcagagccacaatacttttcctcagcaaagtatgccaaagaaggtcttattcgcaaaccaatatttgataatttccgaccccctccactaactcccgaggacgttggctttgcatctggtttttctgcatctggtaccgctgcttcagcccgattgttttcgccactccattctggaacaaggtttgatatgcacaaaaggagccctcttctgagagctccaagatttactccaagtgaggctcactctagaatatttgagtctgtaaccttgcctagtaatcgaacttctgctggaacatcttcttcaggagtatccaatagaaaaaggaaaagaaaagtgtttagtcctattcgatctgaaccaagatctccttctcactccatgaggacaagaagtggaaggcttagtagttctgagctctcacctctcacccccccgtcttctgtctcttcctcgttaagcatttctgttagtcctcttgccactagtgccttaaacccaacttttacttttccttctcattccctgactcagtctggggaatctgcagagaaaaatcagagaccaaggaagcagactagtgctccggcagagccattttcatcaagtagtcctactcctctcttcccttggtttaccccaggctctcagactgaaagagggagaaataaagacaaggcccccgaggagctgtccaaagatcgagatgctgacaagagcgtggagaaggacaagagtagagagagagaccgggagagagaaaaggagaataagcgggagtcaaggaaagagaaaaggaaaaagggatcagaaattcagagtagttctgctttgtatcctgtgggtagggtttccaaagagaaggttgttggtgaagatgttgccacttcatcttctgccaaaaaagcaacagggcggaagaagtcttcatcacatgattctgggactgatattacttctgtgactcttggggatacaacagctgtcaaaaccaaaatacttataaagaaagggagaggaaatctggaaaaaaccaacttggacctcggcccaactgccccatccctggagaaggagaaaaccctctgcctttccactccttcatctagcactgttaaacattccacttcctccataggctccatgttggctcaggcagacaagcttccaatgactgacaagagggttgccagcctcctaaaaaaggccaaagctcagctctgcaagattgagaagagtaagagtcttaaacaaaccgaccagcccaaagcacaggtactcttttccaccttgcctattaaaactaacagtttattgagccctttctatgggcaagttttaggctaagtggttcaattacatccagttatgagaaccaagaaaagtatggtggaggcagtggtatttgcagtagtccttcaaggaccagtaggattttgataggtagaaagtggcaggacataacattctaagtagagggaacagtgtgggtagaaatggaaaagtaagaaatatatttgaggaatactggatagctggattggcatctgtggaaaactggtgaactaaggctgaatgaactaaggttgggactatatcacagaggatgctgagttgtttgtaccttataagtttgatgtaattaaaccagggacttaattgtaaaggtacattttaatagtcaaattgttttactatccccgatagaatagaaaaccggaggggagcattctcttcctctgagtagtgagggattggagcaatagataatatgtttttgcagaatacaaatgagaagtactggccaggtgcgatggctcatgcctgtaatcccatcactttgggaggccaaggtgggcggatcacttgaggtcaggagtttgagaccagcctggcctggccaacacggtgaaacctcatctctactaaaaaaaaaaaaaaaattagctgggcgtggtgatgcatgcctctagtcccagctactggggagattgaggcacaagaatctcttgaaccccggaggtagagatggcagtgagctgagatcccgccactgcactccagcctgggccaatagagtaagtctctatctcaaaataaataaataaataaataaacaaacagattagaagcacttagccttgagccatggaacaggaaagctatagaattcagttagttaagatgatgccaaatatttttacaaagaccagcatttttgttttttttttattgttttgtttatttgtttaacaaagtaagctagtcactggccttttctgagaaaagttgctgatctttagggttttaaaaaaatcgtcatgtagtagatgcctatttatggcagcaaatcaggttaggttaagatggccataaacttatatttgtaatgttattcacgggctgggtacggtggcttacgcctgtaatcccagcactttgggaggccgaggcaggtggatcacgaggtcaggagatcgagaccatcctggctaacacggtgaaaccctgtctctactaaaaatccaaaaaattagccagacatggtggcatgcgcctgtagtcctagctactcgggaggctgaggcaggagaatcgcttgaacccgggaggcggaggttgcagtgagccgagatcacggcactacactccagcctgggtgacagggcgagactccgtctctaaaaaaataaataaataaaattaatgttattcaacctagggccatagttacatttactaattctgccagttgagaattgtagcaggaatgtgatgggacttatttttaacaccatgttggatgtttttgtgataggagcagcggctctttaaaatctgagacatttcttttggagccttttatactttctcttttttttgagacggaatttcgctcttgttgcccaggctggagtgcaatggcgtgatcttggctcactgcaacgtccgcctcccaggttcaagcaattctcctgcctcagcctcccaagtagctgggattacgggcatgcaccaccacgcccagctaattttgtatttttagtagagacagggtttctccatgttggtcaggctggtctcaaactcccgacctcaggtgatctgcccgcctcggcctcccaaagtgctgggagttgcaggcgtgagccaccacctatactttcatttataagttatttcacccctacttctctgatgatcaaggaaatataagaaatagtttttggttagataagccgtatttataccacactgaactttttgataatatagactggcagcttgaattttgaggggaatttaaaatagtagtataattgggaatagaagcttagttgtttgtttgtttttaagatagggtctcactctgtcacccagggtggctcaagtgatcctcttgtcccagcctcctgagtagctagaactacaggtgtgtaccaccacgcccagccaatttttaaattttgtgtagagatgggttctcgctatgttgcccatactggtcttgaactcctggcctcaaatgatcttcccacctcaagctgttttttattttttgattagaggcctttttttgtgctgccaattaggatacagtaatagttgatttctgttttgatatgatttatcagctgggaataattagagttgtgtgttttgattctaaatcatactgaaattgattaagtataccttggcttcgttcagttataatttcaacatgtatggttgttattgtttttggattgcctcatattcagggtcaagaaagtgactcatcagagacctctgtgcgaggaccccggattaaacatgtctgcagaagagcagctgttgcccttggccgaaaacgagctgtgtttcctgatgacatgcccaccctgagtgccttaccatgggaagaacgagaaaagattttgtcttccatggggaatgatggtaggtcaagaaggtcaatcttggagtcggaacagacttttgatttgtttgttgattattctggggatgcccagtaggctcttcatagttagtaggtcctctgaaaaacagatggcaagaggggattaaatacatgaggattttattagaagaaatgcctgagaaggaaaacggggaggtagccagggaaggctgggagagctgtcagactgtgttgcccatctcacccccatgaaggagcaggggaaggaaggcagaatcttcctagactgctgtgcaggtgagaaagatttggcaaagctgtccaggagtctttgagtaaaagtggactgtcaggggagtgggaggcacattctcatggctgtcatatagttcttaagtgcagagtagccactcagaacaaatttagaggtttgaagaatccttagaagcatttggtttctattctcgattttagattagacttttgttttcagtatttggaattttgctttcatcaagatgcaagttattggctttttttttttttttttttttttttttgagacggagcctcattgtgttgcccaagctggagtacagtggtgcgatctcggctcactacagcctccacttcccaggttcaagcgattctcctgcctcagcctcctgagtatctaggattacaggcatgtgccaccatgcctggctaatttttgtatttttagtagagaggggttttgctatgttggccaggctggtctcaaacccctgacctcaggtgatctgcctggctcagcctcccaaagtgctaggattacaggcatgagccaccattcctggccaagttattggcatttttaaacatttaaataattatttaaaatagattctgagttctgtatataaatattttattttaatgtatttcatttttggagtaccaattaaaaccaggtttgaattcagtactcccttggaactaatgccacatttctttaacagacaagtcatcaattgctggctcagaagatgctgaacctcttgctccacccatcaaaccaattaaacctgtcactagaaacaaggcaccccaggaacctccagtaaagaaaggacgtcgatcgaggcggtgtgggcagtgtcccggctgccaggtgcctgaggactgtggtgtttgtactaattgcttagataagcccaagtttggtggtcgcaatataaagaagcagtgctgcaagtaagtgggtgtttcactctgagatgttgacctctcaaccataaaggttgcttatttatccctagtttgttgcagagatacatcaggaaactgaatgtggttgtaattgagttgcaagacttgttacagttagattttgtggtgtgggctgtgcttaaataagaaatactctggggccatgctgtcattaatagaatgttctgcaacaatggaaatgttctattggaatagtagacaacaataatggaaatgtttagttcagtatgcagccattagccacatgtggctattgagcgcttgacatgtgattagtgtgactgaggaaccacactgtttatttcgtttaactttagccatgtgtaactagtggctaccatatcagactgtagctctggaggatttctacttaaaacctgacaactttatgtataatttttgttgggtctactgaaattatgttgacccaacaaaattatgacaattcaggaaacattggagataccttgcataaatatctgtgctttctcactctctcttagaatatgttcatgcatatggaatttttttttttaagagacagggtcttgctctgttgccaggctggagtgcagtgacatgatcatagctcactgccaacactgaactcctaggctccagtgatcctcctgccttggcctcccaaagtactgggattacaaacatgagccacagtgcttggcctcatatgaaatttctttttttaagaagttttgttttaatttttatgggtacatagtaggtatatatatttatggtatacataagatgttttgatacaggcatgcaatgcatcataatcatatcatgcagagtggggtatccattcccttaagcatttatcctttgtattacaaacaatccaattatactctttcagtcatttttaaatgtacaattaaattattatttactacaatcaccctgttgtgctatcaaatgctaagtcttattcattctttctgattatttttttgtacccattagccatcccctaatatggaattttttatgtggaaatttttattactctactttttctcctcttttttagtcagtttgtggaggtactttctgccatctggcatactttatttaaaatagatcgagatagtagcataaacagaaattttggtgattaagcatcttgtaaactactggcacaaataataggtgtcaatagatatttgctgaatgagtgagtcacatgcaagtgattaatataaagaacagttgggagaaatgctacattatttacttcaggggagataatttctaggagacaagaagtagttctgtgctttggtttggtctgaccttaaacaagaatcttgtctcagtcctgttagtggaaagaagtaaactaattcacagatcacaaaaaagtacatgatagcaagataaagttgcattaaatttaagagttaaagtggattcagtgcaattgtagacttcagattacatttgaattttattaaatctaaatttaggggtgaagtatatatcaaagccaccagatttaattatagcattatagtggtagacaaaggagttgtttgataattttagtctgttttgtgttaagattacttgatggatattaacatcgtaagagagtaggactgatgcgactacaagaaatactgactgatcattttctgtgtggtgctagtcagtgttggattacaagaaatttgagtcccatttcaaaaataatttgatatttgctccttttagatcctaaaggtaggtgaaattgctgatccagggattcaaaggctcagatttaatctgagtaatgagcagtccttttttcaactataaaaatgtgaacctgaatacagattcactgattgttgcagacaaaatgaacacttgtttcagtgcttttcttctaaatttaatttgtttcatggtttattcgttgttttcctaggatgagaaaatgtcagaatctacaatggatgccttccaaagcctacctgcagaagcaagctaaaggtagtgttgttaaaaaggtcttcccccaaatgctccttgcttaaatggtgtatagttgtatacacccagtagaagagaatacttttttttttaaagtacaactctttctcagggagtagattgttgaagctaggtaataggtacatgggggttgattggactatttcctgtattgggggatatttttgaaattttccataataaattttttaaatttatataaaaatcatagttcattatatttcctagagcaataaagtatacctatttcacctgatcaacttggcattaactttctttagcctttcaatgctaacttttaactgcaggaaactgagaatgttgtgtcacatttctacgcttctattttttaaatgtatttttttaacttatttttaatttttgtggatacatggcaggtgtatttatttatttgtttattgagacagagtctcactctgtctttcaggctggggtgcagtagcatgattatgactcactgtagcttcaacctcccacgctcaagccatcctcccacctcagcctccctagtagctgggactacaggtgcgcaccaccacgcccagctaatttttgtaaattttttttgcagagacacgattttgccatgttgcccaggctggtcttgaactcctgggctcaagcaatcctctcgccttggcctcccaatgtgctggaattacaggcatgagccaccactgcacctggccagcaggtgtatatatttatgggggtacatgagatatgttgatacaggcatacaatgggtaataatcacatcagggtacatgggatgtccattacctcaagcatttattctttgtgttacaaacaaactaattatactcttgtaattatttttaagggtacagtaaattattgttgactgtaatcaccctgttgtactatcaaatactagatctcattcacttctatctagctatatttttgtacccattaaccatccccactttccccctcaacctcactacccttcccagcctctcataactatcattctctctgtctctatctccataagttcaattgttttaatttttagctcccacaaatgagtgagagcatgtgatgtttgtctctctgtgtctggcttatttcacttaacataatgtcctctagttccatccatgttgtttcagatgataggatctcgttcttttttatggctgaatagtactccattgtggatatgtaccacattttctttatccattcatctgttgatggatgcttagattactttcaaatcttggctatcataaatagtgctgcaggaaacatgagagtgcagatatctctttgatatactgatttcctttattttggtatatacctagctgtgggattgctggatcatatggtggctctgtaattctattttaaataaaattattctcactatagacagatgatgttgttgtgtttttccctcagctgtgaaaaagaaagagaaaaagtctaagaccagtgaaaagaaagacagcaaagagagcagtgttgtgaagaacgtggtggactctagtcagaaacctaccccatcagcaagagaggatcctgccccaaagaaaagcagtagtgagcctcctccacgaaagcccgtcgaggaaaagagtgaagaagggaatgtctcggcccctgggcctgaatccaaacaggccaccactccagcttccaggaagtcaagcaagcaggtctcccagccagcactggtcatcccgcctcagccacctactacaggaccgccaagaaaagaagttcccaaaaccactcctagtgagcccaagaaaaagcagcctccaccaccagaatcaggtgagtgaggagggcaagaaggaattgctgaaccacaagtactaacaaaaaagcactgatgtctcaaacagcatttgaaagcaggaaatgtatgatttgaagtcttcagttcaagaaaatcagctctctttctaactattatgtttaataataaagaaacagaaacaaaaaaaacagttaaattggaggtattgttttaatttcctgttcgaagcctagagtttaaatagttttttttttttttttctaatggccctttcttcacaggtcagtcagtactaaagtagtcgttgccagcatctgactgcaatttattctgaattttttaggtccagagcagagcaaacagaaaaaagtggctccccgcccaagtatccctgtaaaacaaaaaccaaaagaaaaggtgaggagagatttgtttctctgccatttctcagggatgtattctattttgtagggaaaagccttatccttgacttctatgtagatggcagtggaatttcttaaaattaagaaacttcaagtttaggcttttagctgggcacggtggctcacgctggtaatcccaacacttagtgaggctgaggtgggaggattgcttgaggccagcagttcaagaccagcctgggcaacatagcaagaccctgtctttatttaaacaaaaaaaaaaaaaagaagaagaagaagaagttagccaggcatggtggcagttgcgtgtagtcccaggtactcaggaggctgagatagaaggattgtcttgagcccaggaattcaaggctgtagtgagctatgattgtaccactgcagtccagcctgggtgacaaagcaaaacactgtctccaaaaaaaatttaggcttggcaaggcgcagcggctcacgcctgtgatcccagcactttgggaagccgaagcaggcagatcacttgaggtcaggagttggagaccagcctggccaacatggtgaaaccctgtctctactgaaaatacaaaaattagccggttgtggtagtgggtgcttgtaatcctagctacttgggaggctgaggcaggggaattgcctgaacctgcgaggcggaggctgcagtgagccgagattgcatcattgcactctagcctggacaacagagctagactccatcccaaaaaaaaaaaaaaaagtagccgggcacggtggctcacgcctgtaatcccagcactttgggaggccgaggcgggcggatcatgagggcaggagatcgagaccatcctggctaacacggtgaaaccctgtctctactaaaaatacaaaaaaattagcccggcgaggtggcgggcgcctgtagtcccagctactcaggagagtgaggcaggagaatggcgtgaacccggggggcggagcctgcagtgagccgagatcgcgccactgcactccagcttgggtgacaccgagactccgtctcaaaaaaaaataaaaagtttaggctttagcctgtttcttttttggtttcttccttgttgcttttcccttctttgtggccccacatgttctagcctaggaatctgcttattctaaaggccatttggcgtaattattttttgaccccaacatcctttagcaattatttgtctgtaaaaatcacccttccctgtattcactatttttatttattatggataaagagatagtgtggtggctcacatctataatcccagcactttggggggccaaggcgggaggatcacttgagggcaggagctggagaccagcctgggcagcacagtgacacacagttgctataaaaaatttaaaaatcaactaggcatggtggcatgcacctgtagtcccagctactcttgagaagctgaggcaggaggatcacgagcccacaaggtctaggctgcagtgagctgtgactgtgccactgtattgcagcctaggcaacaaagcaagacccagtctcttttaaaaaaaaattcaaagattatttgtttatgttggaaacatgttttttagatctattaataaaatttgtcatttgcattattatctgttgcaaatgtgaaggcaaatagggtgtgattttgttctatattcatcttttgtctccttaggaaaaaccacctccggtcaataagcaggagaatgcaggcactttgaacatcctcagcactctctccaatggcaatagttctaagcaaaaaattccagcagatggagtccacaggatcagagtggactttaaggtaaaggtgttcagtgatcataaagtatattgagtgtcaaagactttaaataaagaaaatgctactaccaaaggtgttgaaagaggaaatcagcaccaactgggggaatgaataagaactcccattagcaggtgggtttagcgctgggagagctttggtcagtgttgttaggtcactgtttgtgaactgactgcagaacatacataatgaaacattcctatccatcctgagcagtatcagaggaagtaattccttcacatggaaagtatcaaaccatgatgattccttgagtcagcaaaactgtaagagaaattcaatcccagtgtattttcgcaatatattcaatatgaattgaacaactaggtgagccttttaatagtccgtgtctgagattaaaactttttaaagcagcagttatttttggactcattgaaatgaaatactctgacattgtgatgtcacactaattttatgcttttcatccttattttccatccaaagttgtgtaattgtaaaactttcctaagtgacctttctctctccacaggaggattgtgaagcagaaaatgtgtgggagatgggaggcttaggaatcttgacttctgttcctataacacccagggtggtttgctttctctgtgccagtagtgggcatgtagaggtaaggcatcctgcttctttgtaccccaggaagtacataaattatttttctgtggatgaaattactatagtctgttttgttggtatttagcaggtactattccctgtttaaaccagctaaagaaatgttttgaagtattttagagattttaggaaggaatctgctattagagtagcaaagttattgagagtgaaaagatcaataatcccatctctcttaaattcagtctttattagagttctgatctttctgttagatgtctaaataagagaaaaaattatacagtggtctattaaaagggatgctattgatggttattttatattgtatatcaaagcctcttcatctataaggagctcttaccaattaataagaaaaaggaatgacatccagaaaaaaaaataggcaaaagacagaaatagataattcacaaaattagaaataaatacatgttgggtggcagggggaggtgaagggagggtgtctgttttttagccctctagtgaccaaaaactggaaattaaagcatgataaaaaaagaatcctgaataaatggggactttctgttggtggaaagaaatatagattagttacaatctttctttctgagggaattatttggaaatatatatctatctttaaaataggtatatcctctaacatagcaattgcacttcaaacacttatggatataattagataaattggcaaatctgtagatataaagaagtgttcatttcaatattgctcataataataaaaaactggaaacaacccgaaagtccatctatagggagcatgggttaaaataagcatagggcatatagctgggcacggtggctcacgcctgtaatcccagcactttgggaggccaaggcaggcggatcacaaggtcaggagatccagaccatcctggctaacacagtgaaaccccgtctctattaaaaatacaaaaaaattagccgggtgtggtggcgggcgcctgtagtcccagctactcgagaggctgaggcaggagaacggcatgaacccgggaggtggagcttgcagtgagccgagatcgccccactgcactcccgcctgggcgacagagcaagactccgtctcaaaaaaaaataaaagtgtagggcatatataatggcaaatatgaagtcctaaagataatatatattaatattattaggttggtgcaaaagtaattgcagtaataacatggaaagatgtccatgacatatcactgagtgaaaagagcaggttacaagataatatataaagcacaatcccatcttagtttggaaaagtgtttttaaagtatatatctagaaaacaatctggaaggattcacaccaaaatattaagagtgtggttggattatgggtgacctttatttgtttctctggttttttttttttaatctttctgagttttttgcagtatgtaccacctttacaatgaggaaggaaaaagtagcacaattttaaataggaagcagtagtttgtcatttataagggacatatcctacatcctttacagttcttaaattcctggcagatacctctttggcttattacttaccacataagatatgtattcaaaggtggtaaagaaaatccacgtcgggtgcagtggctcacgcctgtaatcccagtactttgggaggctgacgcaggaggaccgcttgagctcaggagttcaagaccagcctgagcaccatagtgagacctcatctctactaaaaaaaaaataaaataccaggcatggtagcatgtgcctgtagtcccagctactctagtcccagctacttgggaggctgaggtgagaggatcacttgagcccaggagatcgaggctgcagtgagccattatcacgccactgcactccagcctgggcaactaagcaagaccctgtctcaaaaaaatttttaaaaatttaaaaaataagaaaatccaagctaggttgaaatctgaatgttgagcagtcagtgagacacaaactagctaagaaagtcaaccctgcccacttgccatttgaagttattactagcaaaattacaaattattgcctactattcatttactaagcaaatattctcttagtccctattacgaacaacttattgttctaagtgcagaagttcagatatcattgagactgagaatattcagtctacaagtgccaggggtctactgtatcctcttttccgtcttaatacagtgctttgcacccatatatatgccacccacaggaataactttttttatagcaccagtccttcaacttctgggattaaacagattttttttcagggtataattgttctgatctaaattctttatagttgtacatagcaatctcacagggttcctaaaatataaattagagaatagcatgctgcctgcactgcactcctaaagcatgaccagtgcttgataaactctcctccatgcgaattttttaaactttttatgttgacatgatttcagacttacaaaaaaactatgagttgtacagagaattctaagtacccctcacccaaattccctaagtgttaatatgtttctctgtgtgtatatattttacaaaataacaaataaaatacatatacacattttacctgtagatacacatgtatctaaaaatttgagaacaagttgcagacataaaccattttacctctaaatattttagtgtatatttttaaaaatcaaggacgttctcgtatttaaccatggtataattaccaaatcaggaaattaacacactggtacattactattatctgatctataggccttatttaggtttgaccaattgtcccaataattcctttatggcaaaagaaaattctggattatcctagttagtatttttgaaaatcctatatcaatatgaaaataacttatttctaaaattagaaatggaggctgggcgtggtggctcacgcctataatcccagcactttgggaggccgaggcaggcagatcacaaggtcaggagattgagaccatcctcgctaacacagtgaaaccccatctctactaaaaatacaaaaaattagccaggtgtggtggcacgcgcctgtgatcccagctactcaggagactgaggctggagaatcgcttgaacccaggaggcggaggttgcagtgagtcgagatcgcaccactgcaccccagcctgggcgacagcgagactccgtctcaaaaaaataaataaataaaaattaaaacaattaaaaaaataaaattacaaatggaaaggacaaaccagaccttacaactgtttcgtatattacagaaaacgtttaaaccctccctatttcccccaccccactcctttatattcccatagctctttgtttataccactcttaggtcacttagcatgttctgttaaatcttgtattatatttattttgttactttctatttccactggtattaccactttagtactctgaatctcccgcaatgtccaatactgtacttttttacatagtcattgcttaatgaatatgtattgaattaaatatatgccagtggactactaaaacccaaagtatataagaagggtatggttgattatgtttttctacatattatttgacatacttctatcttcccatgttcttactatagtttgtgtattgccaagtctgttgtgagcccttccacaagttttgtttagaggagaacgagcgccctctggaggaccagctggaaaattggtgttgtcgtcgttgcaaattctgtcacgtttgtggaaggcaacatcaggctacaaaggtacaaaacttggtaatagaactacagctgggcctctgtatcagtgggttctgtatccctggactcaaccaaccttggattgaatgtatctgggaaaaaatgagtagttgcctctgtactctatgtgaacagactttttcttgtcattatttcctaaacaatacagtataacaactatttacattgtattaggtatgataagtaatctagagataatttaaagtatatggtgggcggatcacttgaagccaggagttcgagaccagcctgagccaacatggtgaaaccccatctctactaaaaatacaaaaaattagccaggtgtggtggtgggcacctgtagtcccagctacttgggaggctgagggaggaaaatcgcttgaactttggaggcagaggttgcagtgagccactccagcctgtggtgcagtctgtcactccagcctgggtgacacagtgagactccatctcaaaaaaaaaaaaaaaaaaaaactatatgggaggatgtgcattttgttatatgcaaatgctgcaccattttgtctagggacttgggcatccatggactttggtatcctctgggggtcctggaaccaatcccccatggaaaccaaggatgactgtgcttagagtattgctttctttcttgatttgtatttctgtcttccagttaagattttgtatctatattatttctctttttacttagtctgtctttagcatttaattgggtgtaatcagttgcctattttgtgttttaattttgggactatagcagaaaacatgatgttgaataaaattccaaaaataagtcaaatctacctaatatgaatactcatcactgagtgcctttggcaggaaataaatctatctcaatgctttaattgggagtaaataatgtatgaggaaatttaaactcataattgtgtgctgtacttacttgccagtaaatgtgaaatggggtactaagtaataggtgttgggtgaaggtaatatgatgcttatctttttgccattatattttcttacagcagctgctggagtgtaataagtgccgaaacagctatcaccctgagtgcctgggaccaaactaccccaccaaacccacaaagaagaagaaagtctgggtgagttatacacatgatgctcttttatagagaaccaccatgtgactattggacttatgtaacttgtattacaaatatctatgcttgaggatgtcagtatgacaatctttttgcctcattactaggaaatcatctcagcagagaaattaaatctataaatggatgcatttaagatctttttagttaagtaaagatattaaaaacaagaaattcctattgaatttcttttcttcttttctagatctgtaccaagtgtgttcgctgtaagagctgtggatccacaactccaggcaaagggtgggatgcacagtggtctcatgatttctcactgtgtcatgattgcgccaagctctttgctaaaggtacccaaaaaagccagttttgccagctttcggaggttgtacttggtgttctggaggtgaactagactctagtgaaatgaaataaaaagtctcacacattatgtcaaggataccatttagacacatttcctaagttcctgtttagaacttagcaactagaaatgtcttgttagtttatacgggaagtgttaaggggacttttcattataactaaccacaaagaaatcctctaagctagtatttcccaaagtgtgatatatatattatatatttgattatttcagacattattttagttgctacccaaacattttctttcagtagttatattagaaaaaaatattaatataactaatacattaaacctgttatattactgacttaggataatcatataaagttcactgttttaagtaagataagcagatcagtttgaagaagttcattaagtaaaaaataatataggagatctctgtatataaagaaaatttatgaaggttatacagagtactgaatcttaggaagtgctcctctaagctctaatgtaaatgccctagaaataaggaaaaagcttacatgtactgtttctgacttccatattgccacttcttttaaatatttaaatatttcttacaaatgtgtgagaaacttctctcttccattcttttctattgttttatctttaaaatctacctcatgacctttataaatgaaaactagtaaactaaagaaaactagtagcatatgaagcttttctgtgagtattcgaggggctcagaataatcttgagactgcagatgtgtgaacattccacagtagatccatgctggtgttcatgatcccagaagaatatagatttagattgggttggtaaatgcaagtcgagggccgtaaaaacacgggtatgtgagccaaagcactgctgtaaactttgctttgctttcaggaaacttctgccctctctgtgacaaatgttatgatgatgatgactatgagagtaagatgatgcaatgtggaaagtgtgatcgctgggtccattccaaatgtgagaatctttcaggtacagaaggttggagtctttttatttcagttttcttctttctaggtactactacatttattagcctctagagcactttaaacctaaaattatggttgtgttgttatttgaaatctctaaatttattttttagtctctagaataagcagcattgtattatttgtgctcacttatcttgaatatatgcctttaaagtatttatttgctgtcctttgtgtgttccataacctgattctcaataaccaaattcaggattagtgttaattaataatgccactttttgagatcaatatgtgtcatatccatgaggacattaaaatcttaatgtggttcccaacatatggctttatagtaagttcagtggaatagtttcctcttcttcctctctcccattcttcagaggacctcatcatggtaggtttttgttttcttagatgagatgtatgagattctatctaatctgccagaaagtgtggcctacacttgtgtgaactgtactgagcggcaccctgcagagtggcgactggcccttgaaaaagagctgcagatttctctgaagcaagttctgacagctttgttgaattctcggactaccagccatttgctacgctaccggcaggtaggccaagtctcatttttttctgagagcttgttcttaggtagtctttacctagtgtttttcttttgttttacttcattctcctcacttaatttttagttacttgttttggctataaccattaggaaaatatttagagccaagaataggaccttctttagcgtaagaaataggaaggagctgtatcttcaaaggtcttgctgttacaatgagaaatttggacttcatactctgaaggtgatagggagccagtgaagcacttcacccaagacagtaacctgatcagagttgcttcttagaaaaaatattgttctgactgagtggagaggaaggactggagacacctgagcctagaggcaggattcgtagttaggggacagttatagtaatcaactggaaaaacactttctgtttatgtaagttgtgaactttacacatttataaagtagtcattagaagaaccacacggggccgggcgcggtggctcacgcctgtaatcccagcacttcgggaggccgaggcgggcggatcacgaggtcaggagatcaagaccatcctggctaacacggtgaaaccccgtctctactaaaaatacaaaaaattagccaggcatggtagcggtcacctgtagtcccagctactcggcaggctgaggcaggagaatggcgtgaacctgggcggcggagcttgcagtaagccgagatcgcgccactgcactcaagcctgggtgacagagcgagagtccatctcaaaacaaaaaaaagaagaagaaccacatggctcactttacctcagagctaagctgctgttttatcttttaatagagctccattttttgaataggaaaattagctgctttctatgttaaaaggaactgaacacaatttcagcttcttcatactaggtttggaattatcaagaaaagctcctaagttaccctagctaagctattacataacagtctcatttttaactttccttttctatttgagaaatctgattattttcatgttccttgggttttacaatattaatcattcagtaccatctttattaattttaatagaatttacatggacaccttggttttagtgttagataaaagcaacatatctttcctggcaataggctgccaagcctccagacttaaatcccgagacagaggagagtataccttcccgcagctcccccgaaggacctgatccaccagttcttactgaggtcagcaaacaggatgatcagcagcctttagatctagaaggagtcaagaggaagatggaccaagggaattacacatctgtggtatgtttctacagtgagccatcagaatttctagtgccaataaagcttctttggacctttggggcatgaaactgagtataagtaaatttaaaaatgaattgtattatatttagaaatgtcacgtggctttagatacctaaaaatgtatgagttattttagctttgtgtttcagaagaagggttgtgatagggaagataatgtcttaaaatagttcttttatttggctttcatctcagttttctgaaaattatttttatattaagaggaagcactaagaaactgttgatgtgggaaatgctaatatgaaattaattggttctccctccccttttgagatcagatctgaataatgtgcctttctttataaggtcttcatttgtagatagatgcctgttaattttatgattttaagtatgtataggaaatgattatttattatctcatgatctatatttgcgattctgttgtttatttttatttatttatttatttatttgagatggagtctcgctctgttacccaggctggcatgcagtgacatgatctcggctcactgcaacctctgcctcccgtaatcaagtgattctcctgcctcagcctcccaagtagctgggattacataagcatgtgccaccatgcctggctaattttgtatttttggcggagattgggtttcaccatgttggctaggctggtcatgaactcctgaccttaagtgatccacccacatcagcctcccaaagtgctgggattacaggcgtgagccactgtttatttattttaatccaaaataaaaactgtggacctgcttggataatttatcatgatacagccaatttgtttgcattcttacctcattagcctggcatctcttaattgccacaggttaatcgtgaattgaatctcaaaggtctcagccaaagagtattataccacattaaaatagggtgtgagttttctgttggatctctgtgctggatgattaaggagggaagaggaaatggttttcagagcacactgttttaagaataattaacattttgtttttgtatacagttggagttcagtgatgatattgtgaagatcattcaagcagccattaattcagatggaggacagccagaaattaaaaaagccaacagcatggtcaagtccttcttcattcgggtgaatgatattactaattcatgtttttaatgcttacctataagtaattaccctgtgaatacaatgaacttgttctcttctactttttgctttgtggtgtgtataaaacatctttggtttaatttgatcccctgattctttgagaggaacttggtgaggttgccagagtggatggatctttctcttggtggcctgaaattatcctcgtattaacagagaagctggtttgaagatttttcatgtggtatctaaatgagtgtttacatatttacattttgtttgtgttttcttttagcaaatggaacgtgtttttccatggttcagtgtcaaaaagtccaggttttgggagccaaataaagtatcaagcaagtaagtgaatttagcataacttttttttctcctcatcggctagaaatctgagagttctcatatttctagattgcagttttccaaaaggttttaatactagaaatgaattggttgaaatgccttttcggtgtggttttgaggactacatttaatgtttgttataagcaattgcctttttgttctttacttttatatttgttttattgtagggagcttggtttaattgtgacaaatgtacaatacatgtgtggtacagccatgtagctggccttgttataaatgggttctgtttgactgatagttcaaatggtgctttgtactgctcttgattttccatatgtaacctttaatttttattccagtaaattcttttgatttgattttatttatttatttatttttttttttttgagacggagtctcgttctgtcaccaggctggagtgcagtgacatgatctcggctcactacaacttccgcctccctggttcaagcgattctcctccctcagcctcccaagtagctgggaaaacaggcgggcaccaccatgcccagctaatttttgtattttaatagagactgggtttcaccattttggccaggatggtcttgatctcttgacctggtgatccgcctgcctcaccctcccaaaagtgctgggattacaggcatgagccaccatgcccggcctcttttgagtttttgatagggttatcatttgtttcagcaagtttaaccaagagtcatatgttgagatattttttaaaatattgagttctgtgtacttcagcaattttcaaacgctgtgacttgttcttatattctgtgaatggctcctacatggggcaacaggtgatatcaagaatttattttatacagttctaggtatactgtaggagttcaataaatgcttgttgaatcaattattttcagcagtgggatgttaccaaacgcagtgcttccaccttcacttgaccataattatgctcagtggcaggagcgagaggaaaacagccacactgagcagcctcctttaatgaagaaaatcattccagctcccaaacccaaaggtcctggagaaccagactcaccaactcctctgcatcctcctacaccaccaattttgagtaagccaccaaaaggagagtcgtcacccatttccctctagatgcagatgattgacttcgtgaatccaattcactaaaattagatatacttggatatcagaaaggaattttcaggtcatccttaaatgtaataccatcattaattttgcttcacttgaggtgttaatgaggacttgatataaatactctggagtattgtaacatagatgatgaggtagcgtaactctgaacactttttgaaaagtggttattttataggctgtgggctatgtaagctgaattatttcttttttccttgaaatcagacatagtattgccaattttaactggatctcaaggtattgatgggagtcttttggatttcaaggtactgataggagtcgagaagacagtccagagctgaacccacccccaggcatagaagacaatagacagtgtgcgttatgtttgacttatggtgatgacagtgctaatgtaagtactttgcaacacagggccctagttaatacatactccaaaagaactgtttgtccttgtgtccatacttgatgactgggtgccatttatttaatgaacttacttataacttactaatttataacttttatttacctataacttataacttattaatttgtaacttattttttgtcacttagttcatggcacttggagttttttaatgactgattttgttgattaaaaggtgactgatttgccttaaattaaacccttgatgtctagtaatttctaatggaagttcctcaagaatattttgtgaaagttaataaaatctaagttgcatattaaaaagcttgtgtttcatataggatagcagaatcgttaagagcccgagttctgccgcctgcctgaatacatttctgtgcttaactgcctacttattgactttggcaagtagtttaacctctctgaccctcagtttcatctttaaaatgaagataataacgcttacctcagagtggctgtgaggattaaatgaaataatgtatgtaaagcctctatttggtgcctggcacacacagtaagctacaatttttttaaaagttttttgtgttttttgttttgttttgttttgtttttttgagcggagtttcgctcttgttgcccaggctggagtttcgctcttgttgcccaggctggagtgcaatggcgtgatctcggctcactacaacctccgcctcctatgttcaagcaattctcctgcctcagcctcccgagtagctgggattacaggcatgtgccaccatgcccggctaattttgtatttttagtagagacggagtttctccatgttggtcaggctggtctcaaactcccgaccccaggtgatccacccacctcatatcccaaagtggtgggattacaggcgtgagccaccgtgcccggccaaaagcttttaaataccatctgagagaactggctttgaaatacagtttatagatgtcactgcacatttttataaacttaccacctattgctctttttgtttgtttccttttgagaccaggtcttgctctgtcacccagactagagtacagtggcatgcttttggctcactgcaatctcggcttccggggctcaagtgatcctcctacctcagcctcctgagtagctgagaccacagatgcgcaccaccatgcctggctaatttttgttttgtttttgttgagacaaagtctccctatgttgcccaggctggtctcaaactcttgggctcaagcgatcctaccacttcagcctccaaaagtgctgggattacagacgtgaaccaccatacccagctcatttttttattctctagatttgtaaaatagtttcagtctatggaaaaagtaatcttgaaaagaaggaagtggaaacagagcaacgttgcaaaaagaattctgatttctgtgtgcctccctccattaaagaattatagttgctttcttgaggttatcttcactggaaaagctaatgccgaggaaaacctcctttggcattatattctttaggaaaaaagaaatctctttattttataggatgctggtcgtttactatatattggccaaaatgagtggacacatgtaaattgtgctttgtggtcagcggaagtgtttgaagatgatgacggatcactaaagaatgtgcatatggctgtgatcaggggcaagcagctggtaagaccttatgggtaaattttatgaaagagattccctctcagtttccagatattcttcctgtgggtgaatatggcctccctgatatttttcacagtgccatcagggtagttagccaacaagtattgatatacataattcaacagataaaatgataaattttatctgttttcaatttatcaatagataaaatgaattgtaggaactgtagaatgggatgagtctatagaggagacggtaaacgtcttaaaacatatgaaagtctgaataggactctgttctttttggatttttagagatgtgaattctgccaaaagccaggagccaccgtgggttgctgtctcacatcctgcaccagcaactatcacttcatgtgttcccgagccaagaactgtgtctttctggatgataaaaaagtatattgccaacgacatcgggatttgatcaaaggcgaagtgagagagctttagttgctttaaaaaaaaaaaaaaagacttttttagagcagttttaggttcacagcaaaattgactggaaggtacagagatttcccatatgccccctgcacccacatatgcacagcctcccccatgatcagcatcccccaccagagtggtgcatttgttacagtggataaacctacactggacacatggttatcaccctgactcctgtagtttacatcagcattcactcttggtgttgtacattctgtgggtttggacaaatgtataatgatgtatatccaccattataccatcatatggagtattttcgctgccttaaacatcctctgtgctctgcctattcatccctgcctctccccaaccctgggcaaccactgatgtttttactatctccatagtcttgccatttgcagagtttcacatagttggaatcatatagtacatagccttttcagactggcttcttctgcatagcatttaagtttccttcaagtcttttcatggcttatttagttgctttttgaattatttcgaaatgcaaaagaaaaacaaaaatacagcaagatgataaactgttttgcttttctacttggtgttcctagaggcaccacctcttttgggaaatacagaagtgtcctgctaagtgaaacagaaggatgcttttgagatatgctatgtgccttccactctgagacagtcaggatcataagtataatgtgcaaagggacagcctattaacagctaccatgggttttatttaaggtggttcctgagaatggatttgaagttttcagaagagtgtttgtggactttgaaggaatcagcttgagaaggaagtttctcaatggcttggaaccagaaaatatccacatgatgattggtatgacctagccttggttattggggaaggctgtatatatcattggggaaatttctggtcctcagttataaaatgaccctcagccaggtgtggtgtctcacgcctgtaatcccagcactttgggaggctgaggcgggcagatcactggaggttcaggaggctgtatatatcattggggaaatttctggtcctcagttataaaatgaccctcagccaggtgtggtgtctcacgcctgtaatcccagcactttgggaggctgaggcgggcagatcactggaggttcaggagttggagaacagcctggccaatgtggtgaaaccctgtctctactaaaaaaaattagctgggagtggtggtacatccctataatcccagctacttgggaggctgaggcacaggaatcacttgaaccccggaggcagaggctgcagtgagctgagattgcgccactgcattccagcctgggcgacagagtgagactctctcaaaaaaataaaatgacgctcataatcttctctaatcggttcttctttccttggtcagggtctatgacaatcgactgcttaggaattctaaatgatctctccgactgtgaagataagctctttcctattggatatcagtaagtagcactataaagagaagagagcagccccacaacctgaacacactgaagccatgtgcaggtcattaaatgtagaggcatacctgttagctactttaaactgctactaaaaattaatcacttattttgctagttctcggattcgtctgcttgtagattgggactatgttagcggaatccagttatagaaggaaagtattattgacataatttcagaattacttaaaaataaaaccttagtagaaaacacaaggtcagtctcttaagattcctccaaattccattcatctccatgcagaagtgcagattgtttttatggataaaacagctcatgccctgttcccaactttacagtttataagtccttctaaaactataaatccacacaataatgatcaaatttttcaataagaatttataatcttacctatatgaagtaagttgttaaaatgtctaacaagctaacaatataagttcaaaattccccttctaccactcccgcgttggagtctcattttgcaatatatgctccaacttactctgtattcctattcctatgacacagtctgtgctccacatttagctggcagcttttcacacaaaccagattccactagcattcagcagatttgaagcagttacatttctcttgtctcatggggctcttctcccaaaggaaacacctcaggtttgccctttgttttattttcaggccgtactttgtatacattgtaaggcaatagttcggtcctgaaggccaaaactaatttttgtaatggttaatatttttctttctcttgcttttaggatgttttactatatttggtgcctgcttatggtacaagaaaaaaagatcttaggctattttctgagaggctaagaaaaaccaaggacttcaaaaagcttggaacaacctaactaggggaatctatactaagaacccataaaataaagctaaactctgtaattaagagggccagggaacctaggataaagagaggttttgaaaaatgctagtttctgcttctatcctctcccttatgatgattttcccaaatctgtttacccaggtgttccagggtatactggagcaccacagatgctcgcaagcgctgtgtatatacatgcaagatagtggagtgccgtcctccagtcgtagagccggatatcaacagcactgttgaacatgatgaaaacaggaccattgcccatagtccaacatcttttacaggttagtcttgaatcaagatgggacttgaggctgggcacagtggctcacgcctgtaatcgcagcactttgggaggctgaggcaggtgaatcacttgaggccaggagttcaagaacagcctggccaacatggtgaaaccccatctctactaaaaatacaaaaaaattagccaggcatggtggcaggcacctgtaatcccagtaatcccagccactcaggaggcagaggcacaagaatcacttgaaccagggaggcagatgttgcagtcagccaagatcacgccactgccctccagcctgggtgacagagtgagactgtgtctcaaagaaaaaaaaaaaaagatgtgatggaacttgaattcgattcagggagtactatgattgaaagctgggggaaaagtcatttacttgggaagtctcatttgcttctagttttacatttacctgatagctgactttttattggttaatttgtttgatattttaattgggcctttttagttaagagtttttatttcctgccacagaaagttcatcaaaagagagtcaaaacacagctgaaattataagtcctccatcaccagaccgacctcctcattcacaaacctctggctcctgttattatcatgtcatctcaaaggtccccaggattcgaacacccagttattctccaacacagagatcccctggctgtcgaccgttgccttctgcaggtaaaagactttattgacctacttgacctaagaagatcagcccaaagactaatttgtaattctttcaggcaactttatcttggtgacttttactgattgaaaatgtagattccgggtgggtgaggtggctcatgcctgtaatcctagcactttgggaggccagggcaggtggatcacctgaggtcaggagttcaagaccagcctggccaacatggtgaaaccctatctctactaaaaattcaaaaattagccaggtgtggcggtgcatgcctgtaatcccagctacccaggaggctaaggcaggagaatcgctggaacccaggaggtggaggttgcagtaagccgagatcgcaccactgcactccagcttgggtgacagagtgagacactgtctcaaaaaagtaataataaataaatagaaaatgtagatttccagttacctataaatatatatatatatagtcaaatcattgaaaccagtgacttctacacatttgttctatctacaatagcatttattactttttctctcttgtttaggaagtcctaccccaaccactcatgaaatagtcacagtaggtgatcctttactctcctctggacttcgaagcattggctccaggcgtcacagtacctcttccttatcaccccagcggtccaaactccggataatgtctccaatgagaactgggaatacttactctaggaataatgtttcctcagtctccaccaccgggaccgctactgatcttgaatcaagtgccaaagtagttgatcatgtcttagggccactgaattcaagtactagtttagggcaaaacacttccacctcttcaaatttgcaaaggacagtggttactgtaggcaataaaaacagtcacttggatggatcttcatcttcagaaatgaagcagtccagtgcttcagacttggtgtccaagagctcctctttaaagggagagaagaccaaagtgctgagttccaagagctcagagggatctgcacataatgtggcttaccctggaattcctaaactggccccacaggttcataacacaacatctagagaactgaatgttagtaaaatcggctcctttgctgaaccctcttcagtgtcgttttcttctaaagaggccctctccttcccacacctccatttgagagggcaaaggaatgatcgagaccaacacacagattctacccaatcagcaaactcctctccagatgaagatactgaagtcaaaaccttgaagctatctggaatgagcaacagatcatccattatcaacgaacatatgggatctagttccagagataggagacagaaagggaaaaaatcctgtaaagaaactttcaaagaaaagcattccagtaaatcttttttggaacctggtcaggtgacaactggtgaggaaggaaacttgaagccagagtttatggatgaggttttgactcctgagtatatgggccaacgaccatgtaacaatgtttcttctgataagattggtgataaaggcctttctatgccaggagtccccaaagctccacccatgcaagtagaaggatctgccaaggaattacaggcaccacggaaacgcacagtcaaagtgacactgacacctctaaaaatggaaaatgagagtcaatccaaaaatgccctgaaagaaagtagtcctgcttcccctttgcaaatagagtcaacatctcccacagaaccaatttcagcctctgaaaatccaggagatggtccagtggcccaaccaagccccaataatacctcatgccaggattctcaaagtaacaactatcagaatcttccagtacaggacagaaacctaatgcttccagatggccccaaacctcaggaggatggctcttttaaaaggaggtatccccgtcgcagtgcccgtgcacgttctaacatgttttttgggcttaccccactctatggagtaagatcctatggtgaagaagacattccattctacagcagctcaactgggaagaagcgaggcaagagatcagctgaaggacaggtggatggggccgatgacttaagcacttcagatgaagacgacttatactattacaacttcactagaacagtgatttcttcaggtggagaggaacgactggcatcccataatttatttcgggaggaggaacagtgtgatcttccaaaaatctcacagttggatggtgttgatgatgggacagagagtgatactagtgtcacagccacaacaaggaaaagcagccagattccaaaaagaaatggtaaagaaaatggaacagagaacttaaagattgatagacctgaagatgctggggagaaagaacatgtcactaagagttctgttggccacaaaaatgagccaaagatggataactgccattctgtaagcagagttaaaacacagggacaagattccttggaagctcagctcagctcattggagtcaagccgcagagtccacacaagtaccccctccgacaaaaatttactggacacctataatactgagctcctgaaatcagattcagacaataacaacagtgatgactgtgggaatatcctgccttcagacattatggactttgtactaaagaatactccatccatgcaggctttgggtgagagcccagagtcatcttcatcagaactcctgaatcttggtgaaggattgggtcttgacagtaatcgtgaaaaagacatgggtctttttgaagtattttctcagcagctgcctacaacagaacctgtggatagtagtgtctcttcctctatctcagcagaggaacagtttgagttgcctctagagctaccatctgatctgtctgtcttgaccacccggagtcccactgtccccagccagaatcccagtagactagctgttatctcagactcaggggagaagagagtaaccatcacagaaaaatctgtagcctcctctgaaagtgacccagcactgctgagcccaggagtagatccaactcctgaaggccacatgactcctgatcattttatccaaggacacatggatgcagaccacatctctagccctccttgtggttcagtagagcaaggtcatggcaacaatcaggatttaactaggaacagtagcacccctggccttcaggtacctgtttccccaactgttcccatccagaaccagaagtatgtgcccaattctactgatagtcctggcccgtctcagatttccaatgcagctgtccagaccactccaccccacctgaagccagccactgagaaactcatagttgttaaccagaacatgcagccactttatgttctccaaactcttccaaatggagtgacccaaaaaatccaattgacctcttctgttagttctacacccagtgtgatggagacaaatacttcagtattgggacccatgggaggtggtctcacccttaccacaggactaaatccaagcttgccaacttctcaatctttgttcccttctgctagcaaaggattgctacccatgtctcatcaccagcacttacattccttccctgcagctactcaaagtagtttcccaccaaacatcagcaatcctccttcaggcctgcttattggggttcagcctcctccggatccccaacttttggtttcagaatccagccagaggacagacctcagtaccacagtagccactccatcctctggactcaagaaaagacccatatctcgtctacagacccgaaagaataaaaaacttgctccctctagtaccccttcaaacattgccccttctgatgtggtttctaatatgacattgattaacttcacaccctcccagcttcctaatcatccaagtctgttagatttggggtcacttaatacttcatctcaccgaactgtccccaacatcataaaaagatctaaatctagcatcatgtattttgaaccggcacccctgttaccacagagtgtgggaggaactgctgccacagcggcaggcacatcaacaataagccaggatactagccacctcacatcagggtctgtgtctggcttggcatccagttcctctgtcttgaatgttgtatccatgcaaactaccacaacccctacaagtagtgcgtcagttccaggacacgtcaccttaaccaacccaaggttgcttggtaccccagatattggctcaataagcaatcttttaatcaaagctagccagcagagcctggggattcaggaccagcctgtggctttaccgccaagttcaggaatgtttccacaactggggacatcacagaccccctctactgctgcaataacagcggcatctagcatctgtgtgctcccctccactcagactacgggcataacagccgcttcaccttctggggaagcagacgaacactatcagcttcagcatgtgaaccagctccttgccagcaaaactgggattcattcttcccagcgtgatcttgattctgcttcagggccccaggtatccaactttacccagacggtagacgctcctaatagcatgggactggagcagaacaaggctttatcctcagctgtgcaagccagccccacctctcctgggggttctccatcctctccatcttctggacagcggtcagcaagcccttcagtgccgggtcccactaaacccaaaccaaaaaccaaacggtttcagctgcctctagacaaagggaatggcaagaagcacaaagtttcccatttgcggaccagttcttctgaagcacacattccagaccaagaaacgacatccctgacctcaggcacagggtgagagatccaaatactagctaggctgggtctgtgggatttcatgttgtaaattaggggctgttgatgtggtagtccgggagagacactcttctgttcaagttgcattacctgggagttttccgggttttgactttttttctctctgagtggtgatttatgtaacaaaatgtagttccatccatgggcagtttgtctcttgaatagaaccacatctaatcactttttgctctgatttcaaacagtgttgctgtttgttcctgtttcttttttactgaggcttatactagaatgattattcttatcttgagggcaaagctccctcttgtagatccacagagtcctttttttaaaactttatcattgaaagccaagcacagtggctcatgtctgtaatcccagcactttggaaggctgaggcagaaggattgctggagctcaggagttcaagatcagtctgtgcaacatagtaagaccctgtctctacaaaaaattttttaaaacagctgggtgtggtgttgcacacctgtagccccagctattcaggaggctgaggtgggaggattgcttgagcccaagagttagaggctaaatgatccatggtcatgtcactgcactccagcctaggtggagtgcacctatgtagccaccactcggatcaagatacagaacatttctagcaacccacaagggtgtcttctcttataaggtcagtgccccctcaaagtaaccattattctaacctttatgaccttaggtcagttttgctggcttatagactttatcagatcctgatagagccatttctttcgactcacctccacattcagtacatatttactggtggtttgtcttgaaaagatacaaatgcctgtgttccaggactccaggagcagaggctgagcagcaggatacagctagcgtggagcagtcctcccagaaggagtgtgggcaacctgcagggtaagctgaagaattcgtcttttaagactaagctctcagttttgtccacctcatttaaaaaatagttcttccaggccgggcgcagtggctcacgcctgtaatcctagtagtctgggaggccgaggcaggtggatcacgaggttagatcgagaccatcctggctaacatggtgaaaccccgtctctactaaaaatacaaaaagaattagccgggcgtgatggcgggcgcctgtagtcccagccactcaggaggctgaggcaggagaagggcgtgaacccaggaggcggagcttgcagtgagctgagatcgcgccactgcactccagcctgggcgatagagcaagactccgtttccaaaaaaaaggtaaaaaatagttcttcctgattcacattgatttttgttttcttgccaaagttttttaaatgagaatagtacaggcttgtaaacaagtaaacaaaaaatataacaagaattatttaaataatggataatagtttcctatttgtccccctcacccccgcccaatctactccctagaggtggtcattgctaataatttgtttttatctatgcagacatctctctgcatataaagatataacgtggtatatatatgaatatgtatacacttttttacataaaaggaataatactgtacatactgttctgtatttggtttttcacttatgtacatctttctgtgccaatatatgtaggtgtgcttcactttttaaatcgctgccgccaattctattgtgtggatctacaatattttaatgagtcctctattgatatacatttggattgtttccagaatttatttagtttaaaaaagtgaaaactggggctggacacagtggctcatgcctgtaatcccaacactttgggaggctgaggcaggaggattgcttgagcccaggagtttgaaaccaaccttggcaacatagggagaccctctctctacaaaaattaaaagttaaccaggcatggtggtgcacatccacagtccaagctaaggcgggaggattgcttgagcctgggagttggaggatgcagcaagccgtgattgccactgcactccagcctggacagcaaagtgagaacctatctcaaaaaaaaaaaaaaaaaggtgaaaattgattgtggtttataagctcatgcagcttattttttagttttagttaagccagcttacttatttaagtaactttagaattgcttctgacaagtgtcctttcatttttttctaatactgagtatgagaagaatttcaagggcgcaatttacaactttaaaaacagaaacttaatgtcagtatttggtaaagaatctcacaaaagagttttatgttatgtaccatacagtggtgtggtggttgtattcattcaacaagttctacagaaagccccctgtggctcattttctagcagttattttgtataccacagctgtatagaaaattctgggttttttctttgaattgaagaactagctgatattatatcttacatttggtttttatttaggcaagtcgctgttcttccggaagttcaggtgacccaaaatccagcaaatgaacaagaaagtgcaggtatgtgggtgggtaaaaggttagaatcagagaatatcaatgctaaaaggattatgagaatcacccactttacctacttattttctacatttaaaaaaaaaaatctaagctccaaagaagttaagtgatttggcccacattggactgaaacttggcgcacctgtctctcggtgcagtgttcttccagtacatattgtgtgatcacctgtcagctaaggactcaagaccatacccatactcttctgctgtactggttttaccagcactgaggcttaaatagctagtaataacctgacttcactttttagttgttactaaagaaaactaagaaccatttttattagatagtcagattttggttacaataccagatacatctccatggcattttccatcagttctaatgaatttgattaggaaacaaatggtcacttcaagattagagagttctgggtataactctattgaggacagttgcttattgaaaaactatcagatcgtcatactagaaattctaccacagagagcataacttcatgtaaaaaaaaatctggttttagtcaccactttctagcaatgacctaggcaagctctttgagtcttgggtttgttatctataaatgggaataataaaccaactgtggaatgttgttaggcttagagatcatttatgtaaagtactctacatgtagtcagtgctcagtgagcatttgttactgcaaccactatctattttctccctattagaacctaaaacagtggaagaagaggaaagtaatttcagctccccactgatgctttggcttcagcaagaacaaaagcggaaggaaagcattactgagaaaaaacccaagaaaggacttgtttttgaaatttccagtgatgatggctttcagatctgtgcagaaagtattgaaggtgagtggattaaatcaggttgacccatcagcagaagccctgtttcagctagagcttcattttctgagtattagcaccatttaggtggctgttttatgctagatggtagggggatacctggaggcatcatacattttccttgtccttgagaagtttgtcttattggagaaatagccatattttacatgaaaagttaatgatacagattatgttttcaacattgcacacaccttagcggagcccctgagaactctgcttccccctccagccttgttttttgccattccctcatgcgccttctgtgcccttctctctcccttgtgtgccttcacacgtgctttctcctctgcctggagttctctccctgccctcaatcacctggtgagctccagctcacccttcaagatccagctcagacggtcttccctgaccttctgaggtagctaagccctccctctccctccttttgaatcttacatgttcttctctcatagcttacattttgttttgtccgtgtttgtttacttttatcactcactcaacagcgagctctccataagggctggaattttattttcttattcatctttgtatcgcaagcatctaagtgttcatccacctttgaaggactagtaaatgttctctaggctgtaagtactagaagagttcaaagaagagaaaggtcaccatgggtgagttagggttatcaaaaacccatgaagataaatagaagattctattaaaggagaaaatggaatttgggttaggcaaagaagaatgcagggctctctaggaagaagaagggaggtaagcaaagttagaaaggcaggactgcatttggtgggtttagagtagtgtcaggtgagatggcattgaaatccatgtgaggtaatagtgaaagagaaaattgggaaggtggatagggcacaggttttagagggctttcagtgccaaaccttgaggactttgaaaacttgagggagtgaatagaagcagaatttcaggaaacataatgtgataagctctctatatgagacagattgagcatgaactggagatgctcaaagacgagagtttactaatgagagtattgctagagtagagatgtctggtaataaagcccacattcggtgggaaaagaaaggaaaggaaagaagaatgagtacacttggtggaatatggagaggggagagtcaaagatgaccctaaagattcaggcctgggtgactaaaacaaaagataatgcatggagaacaaaggagataagtaaggagtatgggggttccacagaagacattgatgtggagtgatgtaagaaatccatgtggaaatgcctagcagacaggaaaagatcacagaatcttgggttagagctggaaggaactgtaaggattttctagttctgcctcttaactttaaggaacagagaggttatgatcttcccacagtcctgcttaaatcattattactagtgctgttttgattaggggtacagggaacataaaaataccaaacattcaggtgtgagacccagacttccatcaagggatgtgaatgcgttggggattcagagttcatttcagaaggtctgactttccttagtgcttctgtgtcctccaacagaaagaagccctgctggggagtgtaccttttcggctcctttcacatgtaatgaactgacttaaactctaagaaaaataacaaaacactgctctaggagggcaagtgttcacactgtagggattctaagcagtgcttgtgcacatcattggtattaagaagggtttacgtgcatattttctggcttacgggttttctttatttcctttcagatgcctggaagtcattgacagataaagtccaggaagctcgatcaaatgcccgcctaaagcagctctcatttgcaggtaatggctggaggtgttattccactcctgtctcagaatattatggtaaattgttcgcctaaggcagagttgattctgtgaaaaaaaaatcagttaaaaatttttttcacagctttattgagatttaattcatataccatacagttcacccatctaaagcatacaattcagtggtttttaatatattcagagttgtataaccaccactactctataattctagaacattctcatcatccctaaaagaaaccccctattcattagcagtcattcctcagcccctggccaccacaaatctactttctgtctctatgtatttgattattctggacatttcatataaatgaaatcagacaatatgtagccttttgtgaccgtcttctttcactcaacagaatactttccaggttcttcccttctgttacatcttcccttccacatcagtacttcattcctttttattgccaaatattccattgtgtagatataccatatgttgcttatccattcattagtcagtggacatttgggttttttctattttctgctacgaataatgttgccacaaatattcatgttcaagttattgtgtagacatgtttttattttttttcagtatatacctcagagtggaatggctgggtcatatggtaactctttaactttttgaagtactgccaggttttttttccaaagtggctataccattttacatttccacctgcaatgcacgagtgttcccatttctccacctttgccaacacttacctgttttttgtttttttttttttattttagacattgtagtgtgaaatgttatcttttcttaaagttgaaatcatttaccattggtattagacttcatattaaatttaggcagcatacaaacttattaatacacttgttttgagcaaacactaaagattttaatcagtggatgctgtggctcacacctgtaatcccaacactttgggtgaccaaggcagaaggatcatttgaggccaggagttcaagaccagcctgggcttcatacagagaatacatctttacaaaaaataaaaatatatattagccggcaccgtggcatgcacacctgtactcccagctactctggaggctgaggcaggaggatcactggagcctaggagtatgagactgtattaagctatgatcttagcactgcactccagcctgaacgacagataaatactttgtcacaaaaaaaagaagaagaagaagaagaaggttttaattaagctaaggtagaaaccttccattgactttgttttatccatatctacctctcctacctcctttcagattgctcctggaaaggtgggtgaatgggtacttacaggaattttaacttttttttttttaggaatttaattttatcagtgatgttcttcctttaagagggaagggaaggaaaatatttggatgcactttagaaaatactaacatttgttcattttatgtgacaggtacatgcatggctattataacaccctgtgtatttttttatacttaaaatttttcagaacttttttaattaaaaaaaagagaaaaagacccaacaggcagtttatctcccacaaaatacaaatggcccatagcatgaaagggtactcaatctcagctggacacagtggctcacacctgaattccaacatcttgggaggattgtttgagtctaggagttcaagaccatcctgggcaatagagtgagacctcatctctatataaaaaaaaattgtttaaattaggcaggcatgatggctcatgcctgtggtcccagctacttgggaagctgatgtgggaggagcgcattgagcctgggaggtcaagcctacagtgagccaagattatggcactgcactccagcctgggtgacagaacaagaccctgtctcaaaaaaaaaaaaaaaaaaaaagaaaaagaaaaaaaagtcttgctcataatttttaaaattctaccccaaaaatataagtcacatccctttctttttctctgacatatcccttgttattctctcatgcaatgttaaaaagccctataactgagtctcctatctcacctccttgtaccctcagagtctccagaggtgcctcaaaatcttactattgcctactagttacagagtataatcttcaacccttacgtatttgttattagtaaatatttactgaccacttgtaaaatgcctggtaccatgttaaacacaggatacagtcgctgagtagcgacccagccctgctctttgaggtttcctgtctacggatccttacatggcgaggtcctcttcagccggattcatctgttcagtctcagctttccccacttccctcactgctcaagattctttgttctgcagccacactacactatttactgttccagatccatccatgtgtcttttttttttttttctccaagacagagtcttactctgtcacccaggctggagtgcagtggcgtgatctcggctcactgcaacctccatctcccaggttcaggtgattctcctgcttcagcctcctgagtagctgggactacaggcgcatgctaccacacccggctattttttgtattattattatttttttatttttatttttattttttgagacagagtttctttcctgttgcccaggctggagtgcaatggcgcaatctcggttcaccgcaacctccacctcccgaattcaagcgattctcctgcctcagcctcccgagtagctgggattacaggcatgtgccaccatgcctggctaattttgtatttttagtagagtcagggtttctccatcttggtaaggctggtcttgaactcctgacctcaggtaatctgcccgcctcagcctcccaaagtgctgggattacaggcgtgagccaccacgcccggcctaatttttgtatttttagtagagacggggtttcaccgtgctggtcaggctactctagaactcctgagcttgtgatctgcccacctcggcctcccaaagtgctgggatcacaggcgtgagccactgtgcccggcccatccatgtgtcttaaagtgtagcctataggtgtgaatcagaatccctgggcttggagctgagaaagctgaatttttaacatgtgcccccaagcaattcttattacttaccctaaatgtgctttcatatcagcataacatggttgatgcagttccctccaccaggacctatttcctccatctactctcttccctccaaattccctggtttacacaacaaactcctgttaatcctttaagactttgctcaaggtcacctcttttctttaaccttttttgatcattcttcctgtgcctacggaaatcccaactcttaactgatttaaagagtgagataatttatcatcttatataacagaaagtccagaggtagggacagacgtgtcaggattgattggtacaggagcttgcaatgtcatcaaatacctagattcttttcttctttccactttacgatctatagtaaaacttcatcttcaagctgatagcaaatggctgcagcagttcccacaataacattcagtcatcacagtgttcagaggaacaggagaggcttaggaacaaatggacatctcacagaccagaatttggtaccatgtccatttctttttctgtccttttttttttttttttttttttgagacagggtctcacactgttgcccaggctggagtgtgtagtggtgcaatcttggctcactgcaacctccgcctcccgggttcaagcaatactcctgcctcagcctcccgagtagctgggactacaggtacacgccaccacacccagctaatttttgtattttagtagagacgggatttcaccatgttggccaggatggtctcgaacttctgacctcaggtaatctacccaccttggcctcccaaagcgctgagagtacaggtacccagccccatgtccatttctaagccagtctctggcaaagggactgggattcccaggattgtcttagattaatcatctggggtggaaggtttagcctggaggttaaccacaatgacccttgtgttccccagtccaaaacctgtccattatactccatttccagtgctgccaccttgtccttaccctcatgcccttatattctagtggtgtatatgtatatgtaagtaccatgaagaagataacatggggaaatgaaatagagagtgacacagaggtgggtagttggtgacaggaaatctggaatctcttgatgaggcaacatttgagcttagacctgagtgatgatgagaagaagccaatcatgcatatacataaagcgaaagtcctcgaggcaagctagaaggctgaggaaggagagtttgagcttatagtgtgccaagatcatacctgtgaatagccacggcaccagctgagcaacacagtgaaactctcttaaaaaaaattaaattaaattaactatgttttctaaagtcctgacacagaggaaacagcagatgaaaaagtcctgaagtgggaatatctttgatgtgtttattgtctgtctcttccatgaagtaaaagctctatgaatacaggtaccttgcctgtcttgctcacctgtaagttcctaaggtcctgtctggcacagtggaaagatggaaagagtgcctgggatattttaggtgtgctgtaaatatttattgaatgaataaatgagtctcccacaagcagaacagattgttccttcttaagagttcccatagtactttatattataccttaatttggacacctgcacattgcatggtttgtatacgtctctgccttcctctgctgtgagctccttaagaacagacgggggcccacacataatgcatctttgttttcccattatcaacacaatattaatctcattgtaatctctctggtgagtgagagttgaacattcagtgtacatattaaaaggaactttctgtgaaaatatacttgagtatgtagtatgtttttcaatgtcttttttttttaacctaagaattcacagcaatctagaacttccaggaaaaaattattaaggaaaattagtggtctgtagaaaagagtttgccagctgggcgcggtggctcacgcctgtaatcccatcactttgggaggctgaggtgggcagatcacgaggtcaggagatcgacaccatcctggctaacacagtgaaaccccgtctctactaaaaaatacaaaaaattagccaggcgtggtggcgggcgcctgtagtcccagctactcgggaggctgaggcagcagaatggtgtgaacccaggaggcagagcttgcagtgagccaagatcgcaccactgtactccagcctgggcgacagggtgagactctgtctcaaaaaaaaaaaaaaaaagaaaagaaaagaaaaaagagtttgccattgccttatatggcttaagttcttatcttatacagttgtgttacatagtgttacatacctaagccaaattcttaagggaccaacagttgtgatcataagaatgtcacttatcaggggccagtgcagtggctcacacctgtaatcctacctagcaagttgggaggccaaggaaggaggatcactcgaggccaggagttcaagatcagcctgggcaacacagtaagaccctgtctccacaagaaatttaaaaattagccaaacacagtggcatatatgcctgtagtcccagctacctgggaggctgaggcgggagcagcttgagcccagaaattcaaggttacagtgagctatgatcatgctactgcactccagcctgggcaacaaagtgaaacctgtctcttagaaaaagaatattgcttatctagagacaacattctttttgtttgtttgtttgtttgtttttgagatgaggtctcactctgttgcccaagctggagtgcagtggcatgatcgtctgctttttcatctgctatttcctctgcaccaggacattacaccaaggttacatctctaaatatgcttcataatgcaaactgtatgtctgttggaattgcatatgtgcaattgcagtcctaatacaattacacttatgaaatggatacctgatccaaaattaacaccattactgtttctatatctattaataataccaaaccagtattcgtaaatgaaataatattgtttacttaataaaaatgtaaagaacattagctatttgctagtgtcaaaaagaagtgtggcagttgtaattgtgccctgtccctttaatggaaaaagccaaataattttaaaatgaaagcctttcaccatcaatgccagcagacttatataaatgttgttttcataaaataaaaataaataaaaaatgctcattaacagcatgagacggtgagtagaacaaagcagctactgagtgtattactccacacattcatcataacaacacaagagttctgtgttaggggtgtattaacattgcttttaaactttagtgaggctggctgggtgctgtggctcacacctgtaatcccagcactttgggaagctgaggcaggtggatcacctgaggtcaggagtttaagaccagcctggccaatatggtgaaaccttgtctctactaaaaatacaaaaaaattagctgggcatggtgacgtgcccctgtagtcccagctacttgggaggctgaggcaggagaattgcttgaacccaggaggtggagttgtagcgagctgagatcggaccactgcactccagcctgggtgacggagttagagtctgtctcaaaaaaaaaaaaaaagccgggcgcggtggctcacacctgtaatcccagcattttggaaggccaaggcgggtggatcacgaggtcaggagatcgagaccatcctggctaacatggtgaaactccgtctctactaaaaatacgaaaaaaattagccaggcgtggtggcggcgcccgtagtcccagctactcgggaggctgaggtaggagaatggcgtgaacccgggaggtggagcttgcagtgagctgagatcatgccactgcactccagcctgggtggcagagtgagactccatctcaaaaaaaaaaaaaaaaaaaaaagaaaattaaactttagtgaggtatctgggggaacataagcttatagaacctagataatccattcctagatggattatatttgtagttatgcagtccagagttcatatcttgtcaaatcatgtagccttgggagtgttacatcagttctctaagcctgtttgctcacctgaaaatgaagctagtaattcctgccctgtgtggtcattatgagcacgaaatgaaataacacgtgtatatagcattagcatatagcatttctgtgtaataaagcaaaatagtccatagtttggtggcatgcttttttcacttagccgtctatcacaaacattttccatattgatagatctgtatcagcatcattttaatggctatctgatgctaatttcgagctaatatgtactataattcaccctggagcagcctctggcagagtgactatagcataggcatttctgtaggaccatgctgtttcctgttgactgcgctcctcacttccctggtgcttctgattcttctaggtgttaacggtttgaggatgctggggattctccatgatgcagttgtgttcctcattgagcagctgtctggtgccaagcactgtcgaaattacaaattccgtttccacaagccagaggaggccaatgaaccccccttgaaccctcacggctcagccagggctgaagtccacctcaggcaagttcccttcttttctgtcagcagttttgggtctcgattttcttatctcatgacactgtcatcttcccacataccctttgagatttccagttttaatgccatcatcctttactgctttattaaagcatttctctaaatatgttttaatcttttggccccaggaagtcagcatttgacatgtttaacttcctggcttctaaacatcgtcagcctcctgaatacaaccccaatgatgaagaagaggaggaggtacagctgaagtcagctcggtaagtcttgagtggggagcagtcattagaaactgctttccctctcctccagctggtcagggcactacgtaggaatttgtttgcatcagaatttcctggataagatttaaaaggactgaaaaccatttgtgttgaagtagcagtaggtgcctggtaaggagtgaggaatataaggtacagaggagaaattcaaagaactgtaagatgcctgttttctttaatgatagtatactctgtcagctttggttgtaccaccatagttgtcatggtcagaaagtactatatatactaaaaatgggactcattggccaggcacagtggctcatgcctgtaattccagcactttggaagtccgaggcggacagatcatgaggtcaggagttcgagaccagcctgaccaacatagtgaaaccctatctctactaaaaatacaaaaattagcccggcgtggtggcgcgcgcctgtagtcccacctactcagcaggctgaggcaagagaatcgcttgaacccaggaggcggaggttacagtgagccgagatcgcaccactggactccagcctgggcgacagagcgaaactccatctcaaaaaaaaaaggggggcgctcattttataaggcactcgttcagtttggcattaaacaaagagtgtactaattgtctctaggaaccttcgattcaagactcaaaacattatttcctgaaaaaaattcgttaatagtatgtcttatctcttaggagggcaactagcatggatctgccaatgcccatgcgcttccggcacttaaaaaagacttctaaggaggcagttggtgtctacaggtatgactaaaattctagaaagaattacagaaaacgaatgcagtttttcaaaatcaaagcagaccaaatgctggagtgaccttcctcactcagtaagtgaggattttacggacactatttattgaccctcatatcctgggatcctgcacctccttgtgttgaacaaggactttaacataataagcattaaaatattactgcttccagcgggtcacagaatggaaataactttcatctttggccatgtgttagatggccaaatcaagtgggtccaaatttttattttctcaagtatatgtccctcctggggaactaacagaccaggagaacttattcatgtattcacgcacttaaccttacttgcaaaatttgtgtctgacctcttttccatctttgtcctaggtctcccatccatggccggggtcttttctgtaagagaaacattgatgcaggtgagatggtgattgagtatgccggcaacgtcatccgctccatccagactgacaagcgggaaaagtattacgacagcaaggtaagtctcccacttgcactcacacagttcttttgttttgctgtagaaagggaccagtatgacccctggatcacaaaagaaatagtgtatgttatcaattcagagacctttcttaaaaaaataaactctgaaatttgtgaggggcccagtaaaaatacagaatccactctgaggattagtacagaaagttgctcttagaaggtttgtctgagtggctcctagtatcagaagcaaatagctatacaagttttaggtttctctctcctgcagagacattagaaacctctagactagtggcctgtaatctaggaaatcctcgtggaagcatcttgaaagatagtactgggagaaatctggaaattttactagaagaaactttctcagccgctataggtaacatcaagagaagattgggacatgttcttaaagctgagtttataagaaatgacaagttcttctcccttcttctgcatgtgcagggcattggttgctatatgttccgaattgatgactcagaggtagtggatgccaccatgcatggaaatgctgcacgcttcatcaatcactcgtgtgagcctaactgctattctcgggtcatcaatattgatgggcagaagcacattgtcatctttgccatgcgtaagatctaccgaggagaggaactcacttacgactataagttccccattgaggatgccagcaacaagctgccctgcaactgtggcgccaagaaatgccggaagttcctaaactaaagctgctcttctcccccagtgttggagtgcaaggaggcggggccatccaaagcaacgctgaaggccttttccagcagctgggagctcccggattgcgtggcacagctgaggggcctctgtgatggctgagctctcttatgtcctatactcacatcagacatgtgatcatagtcccagagacagagttgaggtctcgaagaaaagatccatgatcggctttctcctggggcccctccaattgtttactgttagaaagtgggaatggggtccctagcagacttgcctggaaggagcctattatagagggttggttatgttgggagattgggcctgaatttctccacagaaataagttgccatcctcaggttggccctttcccaagcactgtaagtgagtgggtcaggcaaagccccaaatggagggttggttagattcctgacagtttgccagccaggccccacctacagcgtctgtcgaacaaacagaggtctggtggttttccctactgtcctcccactcgagagttcacttctggttgggagacaggattcctagcacctccggtgtcaaaaggctgtcatggggttgtgccaattaattaccaaacattgagcctgcaggctttgagtgggagtgttgcccccaggagccttatctcagccaattacctttcttgacagtaggagcggcttccctctcccattccctcttcactcccttttcttcctttcccctgtcttcatgccactgctttcccatgcttctttcgggttgtaggggagactgactgcctgctcaaggacactccctgctgggcataggatgtgcctgcaaaaagttccctgagcctgtaagcactccaggtggggaagtggacaggagccattggtcataaccagacagaatttggaaacattttcataaagctccatggagagttttaaagaaacatatgtagcatgattttgtaggagaggaaaaagattatttaaataggatttaaatcatgcaacaacgagagtatcacagccaggatgacccttgggtcccattcctaagacatggttactttattttccccttgttaagacataggaagacttaatttttaaacggtcagtgtccagttgaaggcagaacactaatcagatttcaaggcccacaacttggggactagaccaccttatgttgagggaactctgccacctgcgtgcaacccacagctaaagtaaattcaatgacactactgccctgattactccttaggatgtggtcaaaacagcatcaaatgtttcttctcttcctttccccaagacagagtcctgaacctgttaaattaagtcattggattttactctgttctgtttacagtttactatttaaggttttataaatgtaaatatattttgtatatttttctatgagaagcacttcatagggagaagcacttatgacaaggctattttttaaaccgcggtattatcctaatttaaaagaagatcggtttttaataattttttattttcataggatgaagttagagaaaatattcagctgtacacacaaagtctggtttttcctgcccaacttccccctggaaggtgtactttttgttgtttaatgtgtagcttgtttgtgccctgttgacataaatgtttcctgggtttgctctttgacaataaatggagaaggaaggtcacccaactccattgggccactcccctccttcccctattgaagctcctcaaaaggctacagtaatatcttgatacaacagattctcttctttcccgcctctctcctttccggcgcaacttccagagtggtgggagacggcaatctttacatttccctcatctttcttacttcagagttagcaaacaacaagttgaatggcaacttgacatttttgcatcaccatctgcctcataggccactctttcctttccctctgcccaccaagtcctcatatctgcaga

SEQ ID NO: 25087 - DNA, 9035 bp, Homo Sapiens
gcgaggaggctgtggtgagagacggaccgagaccggagatgttctcaagcccggctccggcggctttacaggcggctgcagcggcgacgaagacaacgacagcgacggctacgccgaagcactcgttccgggggtgaagcctcctgcgccggccttgcctcggatccaggatgagaagactgataaaagaagaagctagctgaacagctgtaaaatgcccaaatctgggttcacaaaaccaattcagagtgaaaattctgacagtgacagcaatatggtagagaaaccatatggaagaaagagtaaagacaagattgcatcctacagcaaaactccaaaaattgaacgaagtgatgtgagcaaggagatgaaagagaaatcatccatgaaacgtaaacttccttttactattagcccatcaagaaatgaagaacgagattcagacacagattcagatccaggacatacaagtgaaaattggggggagagacttatatcttcttacaggacatactcagagaaagaaggtccagaaaagaagaagacaaaaaaggaagctggaaataagaaatccacaccagttagcattctttttggttatccactctctgagcgaaaacagatggcacttcttatgcagatgacagcaagagacaacagtccagattccacaccaaatcatccatcacaaacaacgcctgcccaaaagaaaactcccagttctacatctcgacagaaagataaagttaataaaagaaatgaacgtggtgaaactcctttacacatggctgctattcgaggagatgtgaaacaagttaaagaattaataagtttaggggcaaatgtgaatgtgaaagattttgcaggttggacaccactgcatgaagcttgcaatgttggatattacgatgttgctaagatacttatagcagctggagcagatgttaacacacaaggattagatgatgacactccactccatgattctgctagtagtgggcacagagatatagtaaagctgttacttcgtcacggtggaaatccatttcaagctaataaacatggggagcgtccagtggatgtagcagaaacagaggagttggagttgctactaaaaagagaggtgcctttatctgatgatgatgaaagttacacagattccgaagaggctcaatctgtaaatccttctagtgttgatgaaaatattgactctgaaacagagaaagactctctcatctgtgaaagtaaacagatacttcccagtaaaacacctcttccatctgcccttgatgagtatgagttcaaagatgatgatgatgaagaaattaataagatgattgatgataggcatattcttaggaaagaacaacgaaaagaaaatgaacctgaagcagaaaaaactcatttatttgcaaaacaggagaaagccttctatcctaaatcatttaaaagtaaaaaacaaaagccatctagggtcttatattcaagtactgaaagttctgatgaagaagctcttcagaataaaaagatttctacttcatgttccgtcatccctgaaacatcaaattctgatatgcaaaccaaaaaggaatatgtagtttcaggtgaacacaaacagaaaggcaaagttaaaagaaaattgaaaaatcagaataaaaataaagagaaccaagagctaaagcaagaaaaggaaggaaaagaaaatacaagaataacaaacttgacagtaaatactggactagattgttcagaaaagaccagagaggaggggaactttaggaaatcttttagcccaaaagatgatacttcattacatttatttcatatttccactggtaaatctcccaaacattcttgtggattaagtgaaaaacagtcaacaccactaaaacaagaacatactaaaacatgtttatcaccaggaagttctgaaatgtcattacagcctgatcttgttcggtatgataatacagaatctgaattcttgccagaaagttcaagtgtaaaatcttgtaagcataaggaaaaaagcaaacatcagaaagatttccacttagaatttggtgaaaaatcaaatgccaaaataaaggatgaagatcatagtccaacatttgaaaattcagattgcacactgaaaaaaatggataaagaaggtaaaacattaaaaaaacataaattgaagcataaagagagggaaaaagaaaagcataaaaaagaaattgaaggtgaaaaggaaaaatacaaaactaaggatagtgccaaagaactgcagaggagtgtggaatttgatagagaattttggaaagagaatttttttaaaagtgatgaaactgaagatctctttttaaatatggaacatgaatccttaacattagaaaaaaaatcaaaattggaaaaaaacatcaaagatgataaatcaaccaaggaaaagcatgtgtcaaaagagaggaactttaaagaggaacgagacaagattaaaaaggaaagcgagaaatcttttagggaggaaaaaataaaagatctaaaagaagagagagaaaacatacccacagataaagactcagaatttacttctttgggtatgagtgccattgaggaatctatagggcttcatttagtggaaaaggaaatagacattgaaaaacaagaaaagcatataaaggaaagtaaagaaaaacctgagaagcgatctcaaattaaagaaaaggacattgagaagatggaaagaaaaacctttgaaaaagaaaagaagataaaacatgagcataagtcagaaaaagacaaattagatcttagtgaatgtgttgataaaataaaagaaaaggacaagctatattcgcatcacacagaaaaatgccataaagaaggtgagaagagcaaaaatactgctgctattaaaaaaactgacgacagagagaaaagtagagaaaagatggataggaaacatgacaaagaaaagcctgaaaaagagaggcatctagcagaaagcaaagaaaagcacttgatggagaaaaaaaataaacaatcagataatagtgaatacagtaaatcagaaaaaggcaaaaataaagaaaaagacagggagctagataaaaaggaaaaatctagagataaagaaagtataaatataactaactccaaacacatacaggaagaaaaaaaatcaagtatagtagacggtaataaagcacaacatgaaaaacccttatcccttaaagaaaaaacaaaagatgaacctttgaaaactccagatggaaaagaaaaagataaaaaagataaagatatagatagatacaaagaacgagacaaacataaagataaaattcaaataaatagcttactcaaactaaaatctgaagcagataagcctaaacctaagtcatcaccagcatcaaaagatacccgacctaaagaaaagaggttagtgaatgatgatttaatgcagacaagttttgaacgaatgctaagccttaaagacctagaaatagaacagtggcacaaaaaacataaggaaaaaattaagcaaaaagaaaaggaacggttgagaaaccgaaactgtttagaacttaaaataaaagataaagaaaaaacaaagcatacaccaactgaatccaaaaataaagaacttactaggtcaaagagttcagaagtgactgatgcatataccaaggagaaacaacctaaagatgctgtaagtaacagatcacaatctgttgacaccaaaaatgtaatgactttagggaagtcatcttttgtttcagataatagcttaaacaggtctcctagatcagaaaatgaaaagccgggtctcagctccagatctgtatccatgatttctgttgctagttcagaagattcctgccatactacagtgacaaccccaaggcctccagttgagtatgactctgactttatgttagagagttcagaatcccaaatgtccttttcccagtcaccttttttgtcaattgccaaatctcctgctcttcatgaaagggaattggacagcctggctgacttgccggagcggattaaaccaccatatgcaaacagactttcaacatcccatcttaggtcatcttctgtagaagatgttaaactaattataagcgaggggagacctaccatagaagttcgaagatgtagcatgccttctgtcatttgtgaacataccaaacaattccaaacaatatcagaagagagcaatcaaggtagcttattaactgtgccaggagatactagtccttctcccaaacctgaggtattctcaaatgtgcctgaaagagacctttcaaatgtatctaacatacattccagttttgcaacttctccaactggagcttcaaacagcaagtatgtttcagctgatagaaatctcatcaagaatactgccccagtgaacactgtaatggacagtccagtgcatttagagccatctagtcaggttggtgtgatccagaataaatcatgggagatgcctgttgatagactagagacattaagcaccagagactttatctgcccaaattctaacatacctgatcaagaatcctctcttcagagtttttgtaattctgaaaataaggtattgaaagaaaatgctgattttttatccctgcgccagactgaactgccaggaaactcttgtgctcaggatccggcatcctttatgcctccacagcagccttgctctttccccagccaatcactttcagatgctgaatcgatttctaaacatatgtctttgtcatatgttgctaatcaagagccaggtattttacaacaaaaaaatgcagttcagattattagttctgctttagatactgataatgaatctacaaaagatacagaaaatacttttgtcctaggagatgttcaaaaaacagatgcctttgtcccagtgtactctgacagcactattcaagaagcatcaccaaactttgagaaagcttatactttacctgtgttaccatcagaaaaggactttaatggaagtgatgcctctacccagctaaatacacattatgcatttagcaaactaacttacaagtcttccagtggccatgaagttgagaatagcacaactgatactcaggtcatttcacatgaaaaagaaaacaaactggagagtttggttttaactcatttgagtaggtgtgattctgatttatgtgaaatgaatgcagggatgccaaaaggaaacctaaatgaacaagatccaaaacattgtcctgaaagtgaaaagtgtttgctttccatagaagatgaggaatctcaacaaagcattttatcaagtctggaaaaccattcacagcagtcaactcaaccagaaatgcataaatatggtcagttagttaaagtagaattagaagaaaatgccgaagatgataaaactgaaaaccaaatccctcaaagaatgactagaaacaaagcaaatacaatggcaaatcaaagcaaacagattcttgctagctgtacactattatcagaaaaagacagtgaatcctcatctcctagaggaagaataagattaactgaagatgacgatcctcaaattcaccatccacggaaaaggaaagtgtcacgtgtacctcagcctgtgcaagtgagtccctctttactacaagcaaaagagaaaactcagcaatctctggcagccattgtagattctctaaaactagatgagattcagccatacagttcagagagagcaaatccatattttgaatacttgcacataaggaaaaaaatagaagaaaaacgcaaattactgtgtagtgtgattcctcaagcacctcagtactatgacgaatatgtaacatttaacggatcatatctcctggatggaaaccccttaagcaagatttgtattcccacaattacaccaccaccttcactgtcagatccacttaaagagctttttcgacaacaggaagttgtaaggatgaaactacgtttgcaacacagtattgaaagggaaaaactcattgtatccaacgaacaagaagttttgcgagttcattacagagctgcaagaacattggcaaatcaaacactgccatttagtgcttgtactgttttgctggatgccgaagtatacaatgtaccattggactctcagtctgatgacagtaaaacttctgtgagggatcgctttaatgcaagacaattcatgtcttggttacaagatgtggatgataaatttgacaaattaaagacctgtcttttaatgaggcaacaacatgaagctgcggctttaaatgctgtccagaggttagaatggcagctcaaactccaggaacttgatcctgccacctataaatctatcagcatttacgaaatccaggagttttatgttccccttgttgatgttaacgacgactttgaattgactcctatatagcagtcagtacttcctgatggtattgtcctaaactggtgatgctcaagcattatactgtggaatactgccttttgacaaaaatactcatgcctttacaattgttagtaaagttcgattatagttggttatgtagtaaacactgtcattttataaaaaatgagaattattttggatcttagatccaaacacagtttctaatagaaaactattatttatattgggaaaggtaactattgcattagagcatgttggcagactggtaggtatttaaaaagttgagaatctgctaacagcgctggaagttgttagcgctctaagtaataagataaccactagtattcaaatctctttcaggttttattaaaaaatatatatcaataaactaaaaggttcaattcctaccaaatagtttctaatgtgggagaaaaacttggcacaaaatttcttcagtttattatctgtaaattgtacagttttctttttgaaagttttaatattgtcttcctttttaataacttattttatacatattgtgcagatgtaaatcttgtaattaatggtcaaactgtataaagggattggtagtcaaaacatgtacaaagaaatacctgtaaaactgttttgtctcatgttttattggaccaaagttgtggtttgtatggagtgtagtagtagtgtgtacaggtagaaaacttttaaatacagcatgcaggtgtttcagttagcttgttttcatcaccataactgcaaagatgtggcttagttgtattgcatgcttcctataatttaactctccataattgatgcctgcagtagtgtaaggcatttcatactagtctcctctagtagacctgtgacttactgtgttggacatattatttagacttagtcatacaaagaaacttagctcttttttcatctcacagtaaagcctatttccccaggaaaaaaataaatgcctttgaatgaaaattctgaaattgtaaatgtctattttaatattcacctatgaaagaatctgtgaatatatgtaaatacgtttaataaattttattggtcatgttaaatcattgtaaaacttttttacattgcttaatgttttaagcttaatagcctttgcacttttaaaataaaaaccaagtatgcaaatcaaagatatttggtagtcaaaataagtaaaagaaatataggaatattccagtcaatctctgaaatgtttatgaaaaacaggttaatatgttgtatttttttccttgtatcaagatgcaaaacataatttgcaaaattttataattgaaataaaacttggtatgctgttttataataaattagcaatatactttaaaaaaaatccagtttctcctataacatgatgtaaattaaatattcaggaatatttcaggtctgaaatctgctgctgaacttgttagacatttttgaaaggaaaattaggttagcgtacaatttatcataaatatatgaggtaaaatttgcaaaactttccacagtactttcttgaattataatactgaatgttttctgttccgatagagaaaagtgaagcaaatatgtgaggaatgaagtgatctagtgcaagttggtaattccagctaatgggagagaatgtaaatgtgcaaaggtacatattaagcttagggatttttgaatttttacgtcagtttatattttaattcttactgtacttggcatgcgcaataaagcagcacatgtaaaaaaaaatacacagtgcaaggactttattataaaggttggatgtagttttccttagaaatttaggtgagagattttggccttttttattggataaattgggccagaaaggcagggtagatttcgaagcactggttctgttgaagttaagtttattaagcctgggaacattaaaagctaatttataaaagcaatactttttaatatgaaaacttactgcaaagtttgtttatacttttgcctaaaaaggaaattggatgggatactgtggcaaatcataaaaaaccagataattgaactttgaagttatagaaaatcagagaggggtaagtttatagggcattttgttctgatggttcaaccagaggtctgggaaatagcactgttggcccaaacagaacaggcttttagaagataaaagcgacaagaaggaatctggtgaattttagtcatcccagctttttagtcttaaccacagttctcactctcttaaatggtacctcaaaaagctggagcctctctgccatgattatgcttctacaaatttcttttataaagagactcaaagctaatgatagcttaaaagaaaagttaatgccttctcattggaaatgtataatcaaataagtagttaagggcttttggtattaaagatattctgaagctctgaaatgctagaaaaaaatttggaatggagtatatgcctgaaaaggttttggattcagaaagaaaaaggatggttagtttaatcagtgattctttttaaactcttcaaatatcatgaacaagatactaaattgtacctaaggatttgtatttctttacaatttgttctaaatatctgtttaatgactagttgatatttgtgcatgttatttaataaagagttatatttttatag

SEQ ID NO: 25088 - DNA, 1098 bp, Homo Sapiens
ctgccttgaaatcccttgttgagggcctgcaaccttgtgcttccgactggagacgcctttggtccctcggtgtctgcactggctgctggtcaaggcttcagtgtggagtaattgacactttcgagagaccattataaaacagaatatgaaaataaactacatgatgaactagaacaaatcagattgaaaaccaaccaagaaattgatcaacttcgaaatgcctctagggaaatgtatgaacgagaaaacaggttttaaccaaagaattttatagtctccaagcctcttctgaaaaacgcattactgaacttcaagcacagaactcagagcatcaagcaaggctagacatttatgagaaactggaaaaagagcttgatgaaataataatgcaaactgcagaaattgaaaatgaagatgaggctgaaagggttcttttttcctacggctatggtgctaatgttcccacaacagccaaaagacgactaaagcaaagtgttcacttggcaagaagagtgcttcaattagaaaaacaaaactcgctgattttaaaagatctggaacatcgaaaggaccaagtaacacagctttcacaagagcttgacagagccaattcgctattaaaccagactcaacagccttacaggtatctcattgaatcagtgcgtcagagagattctaagattgattcactgacggaatctattgcacaacttgagaaagatgtcagcaacttaaataaagaaaagtcagctttactacagacgaagaatcaaatggcattagatttagaacaacttctaaatcatcgtgaggaattggcagcaatgaaacagattctcgttaagatgcatagtaaacattctgagaacagcttacttctcactaaaacagaaccaaaacatgtgacagaaaatcagaaatcaaagactttgaatgtgcctaaagagcatgaagacaatatatttacacctaaaccaacactctttactaaaaaagaagcacctgagtggtctaagaaacaaaagatgaagacctagtgttttggatgggaagcacctgtagaccattatatactcctgaagttctttttctgatgga

SEQ ID NO: 25089 - DNA, 3579 bp, Homo Sapiens
agcggatgtagtcactctgatgtgggtgagagaacctcccccatcccccagcagaggccactgcagagccatgcagagatggctgggaaccacaggcttgggctcgaagcgggagatacagatgacccaccaagaattactcagaaccctgtgatcaatgggaatgtggccctgagtgatggacacaacaccgcggaggaggacatggaggatgacaccagttggcgctccgaggcaacctttcagttcactgtggagcgcttcagcagactgagtgagtcggtccttagccctccgtgttttgtgcgaaatctgccatggaagattatggtgatgccacgcttttatccagacagaccacaccaaaaaagcgtaggattctttctccagtgcaatgctgaatctgattccacgtcatggtcttgccatgcacaagcagtgctgaagataataaattacagagatgatgaaaagtcgttcagtcgtcgtattagtcatttgttcttccataaagaaaatgattggggattttccaattttatggcctggagtgaagtgaccgatcctgagaaaggatttatagatgatgacaaagttacctttgaagtctttgtacaggcggatgctccccatggagttgcgtgggattcaaagaagcacacaggctacgtcggcttaaagaatcagggagcgacttgttacatgaacagcctgctacagacgttatttttcacgaatcagctacgaaaggctgtgtacatgatgccaaccgagggggatgattcgtctaaaagcgtccctttagcattacaaagagtgttctatgaattacagcatagtgataaacctgtaggaacaaaaaagttaacaaagtcatttgggtgggaaactttagatagcttcatgcaacatgatgttcaggagctttgtcgagtgttgctcgataatgtggaaaataagatgaaaggcacctgtgtagagggcaccatacccaaattattccgcggcaaaatggtgtcctatatccagtgtaaagaagtagactatcggtctgatagaagagaagattattatgatatccagctaagtgtcaaaggaaagaaaaatatatttgaatcatttgtggattatgtggcagtagaacagctcgatggggacaataaatacgacgctggggaacatggcttacaggaagcagagaaaggtgtgaaattcctaacattgccaccagtgttacatctacaactgaagagatttatgtatgaccctcagacggaccaaaatatcaagatcaatgataggtttgaattcccagagcagttaccacttgatgaatttttgcaaaaaacagatcctaaggaccctgcaaattatattcttcatgcagtcctggttcatagtggagataatcatggtggacattatgtggtttatctaaaccccaaaggggatggcaaatggtgtaaatttgatgacgacgtggtgtcaaggtgtactaaagaggaagcaattgagcacaattatgggggtcacgatgacgacctgtctgttcgacactgcactaatgcttacatgttagtctacatcagggaatcaaaactgagtgaagttttacaggcggtcaccgaccatgatattcctcagcagttggtggagcgattacaagaagagaaaaggatcgaggctcagaagcggaaggagcggcaggaagcccatctctatatgcaagtgcagatagtcgcagaggaccagttttgtggccaccaagggaatgacatgtacgatgaagaaaaagtgaaatacactgtgttcaaagtattgaagaactcctcgcttgctgagcttgttcagagcctctctcagaccatgggatttccacaagatcaaattcgattgtggcccatgcaagcaaggagtaatggaacaaaacgaccagcaatgttagataatgaagccgacggcaataaaacaatgattgagctcagtgataatgaaaacccttggacaatattcctggaaacagttgatcccgagctggctgctagtggagcgaccttacccaagtttgataaagatcatgatgtaatgttatttttgaagatgtatgatcccaaaacgcggagcttgaattactgtgggcatatctacacaccaatatcctgtaaaatacgtgacttgctcccagttatgtgtgacagagcaggatttattcaagatactagccttatcctctatgaggaagttaaaccgaatttaacagagagaattcaggactatgacgtgtctcttgataaagcccttgatgaactaatggatggtgacatcatagtatttcagaaggatgaccctgaaaatgataacagtgaattacccaccgcaaaggagtatttccgagatctctaccaccgcgttgatgtcattttctgtgataaaacaatccctaatgatcctggatttgtggttacgttatcaaatagaatgaattattttcaggttgcaaagacagttgcacagaggctcaacacagatccaatgttgctgcagtttttcaagtctcaaggttatagggatggcccaggtaatcctcttagacataattatgaaggtactttaagagatcttctacagttcttcaagcctagacaacctaagaaactttactatcagcagcttaagatgaaaatcacagactttgagaacaggcgaagttttaaatgtatatggttaaacagccaatttagggaagaggaaataacactatatccagacaagcatgggtgtgtccgggacctgttagaagaatgtaaaaaggccgtggagcttggggagaaagcatcagggaaacttaggctgctagaaattgtaagctacaaaatcattggtgttcatcaagaagatgaactattagaatgtttatctcctgcaacgagccggacgtttcgaatagaggaaatccctttggaccaggtggacatagacaaagagaatgagatgcttgtcacagtggcgcatttccacaaagaggtcttcggaacgttcggaatcccgtttttgctgaggatacaccagggcgagcattttcgagaagtgatgaagcgaatccagagcctgctggacatccaggagaaggagtttgagaagtttaaatttgcaattgtaatgatgggccgacaccagtacataaatgaagacgagtatgaagtaaatttgaaagactttgagccacagcccggtaatatgtctcatcctcggccttggctagggctcgaccacttcaacaaagccccaaagaggagtcgctacacttaccttgaaaaggccattaaaatccataactgatttccaagctggtgtgttcaaggcgaggacggtgtgtgggtggccccttaacagcctagaactttggtgcacgtgccctctagccgaagtcttcagcaagaggattcgctgctggtgttaattttattttattgaggctgttcagtttggcttctctgtatctattgactgccctttttgagcaaaatgaagatgtttttataaagcttgcaaaaaaaaaaaaaaaaaaaaaaaaaaaaa

SEQ ID NO: 25090 - DNA, 4525 bp, Homo Sapiens
ctcgagctgaggacaccaacggccgcgactccccggcgagaccaggccggagcgtggacggcgcgcgcgccccgcgagggagggcgctgaggcgcgcgccggaagcgggagcgggagcgggagcgcggcggcggcggcgaaggtgcgggcggccgagcggggggcggggctgcggtgcctgcagaaccttggacagaagctccctagctgccgccgccgccgccgccgccgtcgccgccgccgagcgcgagcccagccgatccccgccgagcgcccccgagcgccgccgagcgccgggaccgcggcggcggggccgcggcgcgcattgcggagggcgcggagcgcaggagctgccgcctgccgggtaagcctgcgctgggcggccgtccttggccctggggagcggagaccggggtcgcgcccgtgcggggtgtccaggcgggggtcctcggccgcctccgtcggcgaccgggcccctcccggctgcgcctggggaccgcagcggcggcggcgggcgggggtgctgcagtggaggcggcgaggctgcgtcgcgggggcgcgggtagggcccgggactggggcggcggggtgcgccgaggcgcggggcggaggggcgcaggggcgcaggggcgcggcgcggagcccagcctggcgctaagaaccatcttgttttccaggcagatccaagggggcagcacgcttcccgggagcgcccccgcctcctctccggggccgccgcaggctcggtgagcggttttatccctccggccggcaggctgggcgcgcaggggcgcgagcccccgcccggcgcgcagcagcaccatgggcacggtgctgtccctgtctcccagctaccggaaggccacgctgtttgaggatggcgcggccaccgtgggccactatacggccgtacagaacagcaagaacgccaaggacaagaacctgaagcgccactccatcatctccgtgctgccttggaagagaatcgtggccgtgtcggccaagaagaagaactccaagaaggtgcagcccaacagcagctaccagaacaacatcacgcacctcaacaatgagaacctgaagaagtcgctgtcgtgcgccaacctgtccacattcgcccagcccccaccggcccagccgcctgcacccccggccagccagctctcgggttcccagaccgggggctcctcctcagtcaagaaagcccctcaccctgccgtcacctccgcagggacgcccaaacgggtcatcgtccaggcgtccaccagtgagctgcttcgctgcctgggtgagtttctctgccgccggtgctaccgcctgaagcacctgtcccccacggaccccgtgctctggctgcgcagcgtggaccgctcgctgcttctgcagggctggcaggaccagggcttcatcacgccggccaacgtggtcttcctctacatgctctgcagggatgttatctcctccgaggtgggctcggatcacgagctccaggccgtcctgctgacatgcctgtacctctcctactcctacatgggcaacgagatctcctacccgctcaagcccttcctggtggagagctgcaaggaggccttttgggaccgttgcctctctgtcatcaacctcatgagctcaaagatgctgcagataaatgccgacccacactacttcacacaggtcttctccgacctgaagaacgagagcggccaggaggacaagaagcggctcctcctaggcctggatcggtgagcactgtagcctgcgtcatggctcaaggattcaatgcatttttaagaatttattattaaatcagttttgtgtacagtatgtgtctagcaaagccaccaagggcctcacctttcccacagtctctccctggggtttttttcatccctgccaagaactctgggcacttttgaactcacgagccttgcgcaaaacccagaagatgtattcagagccacccaggccactgacctcccactttggggaactcaaaggactgacctgcccctgccgcctgtgcccttgctgggtccagggtaggcaaggctgccggctgcaccctgtatggagctagagaggggcctctggctgcctggcccagggaggaattggggtttctggttggaggcccttttctggctcctgtgtggagttattcactctcccagaggctcctggagccagccaccctaactgagctgccagtggggtcgtgaggcaagatccccgccacccggggacatcttcaatctaggcgaggcgaagctgagcgggtctagtggaaagattgtgtctggtcgtttgaccacacaccgccctgatttgctgttttctttttttagggagaagggcttttctttagtggagaaatggaactcgcccccctacccccttgtctgctgctcccagccacgttggtggtattggccgatgagctggtttgactcattaatttctctcaatttgggtcccagctaaagaggtggggtgaagctggggacagctttcctgggtgagtttttcttttgaataatgtagtgcagtcaccctgtggcaaatgccaggacagctgcaggtgcccattagcaacgcctgccttctgggcaaggtgagggatgccataccttgagaccaagccggtgcccacctaagggctaaggcctcttgctggtgcacatgacatttgtcctgcagagctggggggaaggcgatgtggtgaccccacccccacccgttaatttaaagctgtttctaaacagttgagtttcttctaaagaggaagccttgcccagcaaggaccgaccagtgagacagccggatcttggagacaattacaagacggggagtgagactcctgattgctctggaagcctgctgatttctacaactgatcatttgcagctgctggttttggtttccaccttaccctactggctgtaaaaacacaaatgtgtactttattgattttctttctaattctcccgcattggtggcttgggacttgggagagggagcaagccttcctccatggcccatcactcggctgtggagaacaaagaccaatgtgaagacactacagaggattctgtcttccaggcccagtccactggggagtgctggaatggggacctggggtggggaggcagagggtcactttacataggattaagttcgaggtggctaccgatttcagcacatgcactactgaaatttacacaaaaagaaagctgtgaaattgaagtcccaatttaagagtcctgaggcagaacctggtggctggaggcattcccagaggtggggaagagagcctgcccggccggagaacatctgccttgctgcacctgaggcccagcagagccgttcctgggactgtcagataatcggtgcagcggtggaaggagcctgcggctgctggcacagacttcacacagcacctcctctctgctgggtttccacacagcctgtcttcagatcctgctgccgcgtgcgaccagaggtgggaggcccctggtggcatggaagagggagggtcagtgccaagtctcaggaggagggcgcatgtgtgtatcaccctcagctggcggaacctggctgcgaactgtgcagttacgttgcatccacaggattccagttgcgtgtctgtttccttctctttctccgtatttatttttttattcttcggaggaggtggacatttcggaagtggtggggactaagggaagaactctctagttccctcagtgtgaagcctgtcgtgttctctccccttgcactggtcatcagtattgtgtaaaggaacaactgatatacttgagtgtgcaagcaaagaacccatttgccatgctgctatgaagactacttttagatcaacaataaaaaaaaacctacaaaaaaacctttattctttaattgttgcttttacggtgatattgtgcatgcaaaccaggagcattttgtgtcttaagaaaaataatcttagaacagatggctgtgaaaattacacccatgcacagaacaagccacaggaataatagttcaggatttggtttttctctttttcttgtaaacctggagggttgatatattctttccatgcagttattagaacttagttttgttccaacagttaaacttgcaatgaaaagaaaatgtgccatttttttcactcagaattattcatagctgtatatttgaaactgctaattacacacgtgtgatgtatgttggttttttagtgcaatttcttctgtagctattctttgaccaaactgtgggtattgttaatattaatttatatttgtctcattttgtatgtatgtgtagtgtgtttgtgagtatgtgtggtttataatctgacaaagtcatgaagctcagtttggctgtaatttaattccccttcccttatttttatttatttttgtactgtgctgattcaataaaatgcactgaccatccattacagagacctctttttgtgggcaggctggggccccctttactaaatgattcatgcactcagaac

SEQ ID NO: 25091 - DNA, 4349 bp, Homo Sapiens
tttttgaatcggttgtggcggccgcggcgaggaatggcggtatttgtgagaggagtcggcgtttgaagaggtggaactcctagggcttttttgagagtgacggagtctacctcttgttacctagactggagtgcagtggcacgatctcggctcactgcaacctctgcctcccgggttcaagcgattctcctgcctcagcctcctgagtagctgggattacaggtgcctgccaccaagcccagctaatttttgtatttttagtagagatggggtttcattgtgttggccaggctggtctcgaactcctgacctcgtgatccgcccgccttggcctcccaaagtgctaggattacaagtgtgagccaccgcgtccggcctttcaaatggtatttttgattttcctcttccagtccttaaagcagctgatttagaagaatacaaatcatggctgaaaatagtgtattaacatccactactgggaggactagcttggcagactcttccatttttgattctaaagttactgagatttccaaggaaaacttacttattggatctacttcatatgtagaagagatgcctcagattgaaacaagagtgatattggttcaagaagctggaaaacaagaagaacttataaaagccttaaaggacattaaagtgggctttgtaaagatggagtcagtggaagaatttgaaggtttggattctccggaatttgaaaatgtatttgtagtcacggactttcaggattctgtctttaatgacctctacaaggctgattgtagagttattggaccaccagttgtattaaattgttcacaaaaaggagagcctttgccattttcatgtcgcccgttgtattgtacaagtatgatgaatctagtactatgctttactggatttaggaaaaaagaagaactagtcaggttggtgacattggtccatcacatgggtggagttattcgaaaagactttaattcaaaagttacacatttggtggcaaattgtacacaaggagaaaaattcagggttgctgtgagtctaggtactccaattatgaagccagaatggatttataaagcttgggaaaggcggaatgaacaggatttctatgcagcagttgatgactttagaaatgaatttaaagttcctccatttcaagattgtattttaagtttcctgggattttcagatgaagagaaaaccaatatggaagaaatgactgaaatgcaaggaggtaaatatttaccgcttggagatgaaagatgcactcaccttgtagttgaagagaatatagtaaaagatcttccctttgaaccttcaaagaaactttatgttgtcaagcaagagtggttctggggaagcattcaaatggatgcccgagctggagaaactatgtatttatatgaaaaggcaaatactcctgagctcaagaaatcagtgtcaatgctttctctaaatacccctaacagcaatcgcaaacgacgtcgtttaaaagaaacacttgctcagctttcaagagagacagacgtgtcaccatttccaccccgtaagcgcccatcagctgagcattccctttccatagggtcactcctagatatctccaacacaccagagtctagcattaactatggagacaccccaaagtcttgtactaagtcttctaaaagctccactccagttccttcaaagcagtcagcaaggtggcaagttgcaaaagagctttatcaaactgaaagtaattatgttaatatattggcaacaattattcagttatttcaagtaccattggaagaggaaggacaacgtggtggacctatccttgcaccagaggagattaagactatttttggtagcatcccagatatctttgatgtacacactaagataaaggatgatcttgaagaccttatagttaattgggatgagagcaaaagcattggtgacatttttctgaaatattcaaaagatttggtaaaaacctaccctccctttgtaaacttctttgaaatgagcaaggaaacaattattaaatgtgaaaaacagaaaccaagatttcatgcttttctcaagataaaccaagcaaaaccagaatgtggacggcagagccttgttgaacttcttatccgaccagtacagaggttacccagtgttgcattacttttaaatgatcttaagaagcatacagctgatgaaaatccagacaaaagcactttagaaaaagctattggatcactgaaggaagtaatgacgcatattaatgaggataagagaaaaacagaagctcaaaagcaaatttttgatgttgtttatgaagtagatggatgcccagctaatcttttatcttctcaccgaagcttagtacagcgggttgaaacaatttctctaggtgagcacccctgtgacagaggagaacaagtaactctcttcctcttcaatgattgcctagagatagcaagaaaacggcacaaggttattggcacttttaggagtcctcatggccaaacccgacccccagcttctcttaagcatattcacctaatgcctctttctcagattaagaaggtattggacataagagagacagaagattgccataatgcttttgccttgcttgtgaggccaccaacagagcaggcaaatgtgctactcagtttccagatgacatcagatgaacttccaaaagaaaactggctaaagatgctgtgtcgacatgtagctaacaccatttgtaaagcagatgctgagaatcttatttatactgctgatccagaatcctttgaagtaaatacaaaagatatggacagtacattgagtagagcatcaagagcaataaaaaagacttcaaaaaaggttacaagagcattctctttctccaaaactccaaaaagagctcttcgaagggctcttatgacatcccacggctcagtggagggaagaagtccttccagcaatgataagcatgtaatgagtcgtctttctagcacatcatcattagcaggtatcccttctccctcccttgtcagccttccttccttctttgaaaggagaagtcatacgttaagtagatctacaactcatttgatatgaagcgttaccaaaatcttaaattatagaaatgtatagacacctcatactcaaataagaaactgacttaaatggtacttgtaattagcacgttggtgaaagctggaaggaagataaataacactaaactatgctatttgatttttcttcttgaaagagtaaggtttacctgttacattttcaagttaattcatgtaaaaaatgatagtgattttgatgtaatttatctcttgtttgaatctgtcattcaaaggccaataatttaagttgctatcagctgatattagtagctttgcaaccctgatagagtaaataaattttatgggtgggtgccaaatactgctgtgaatctatttgtatagtatccatgaatgaatttatggaaatagatatttgtgcagctcaatttatgcagagattaaatgacatcataatactggatgaaaacttgcatagaattctgattaaatagtgggtctgtttcacatgtgcagtttgaagtatttaaataaccactcctttcacagtttattttcttctcaagcgttttcaagatctagcatgtggattttaaaagatttgccctcattaacaagaataacatttaaaggagattgtttcaaaatatttttgcaaattgagataaggacagaaagattgagaaacattgtatattttgcaaaaacaagatgtttgtagctgtttcagagagagtacggtatatttatggtaattttatccactagcaaatcttgatttagtttgatagtcgtcgtcggaattttattttgaaggataagaccatgggaaaattgtggtaaagactgtttgtacccttcatgaaataattctgaagttgccatcagttttactaatcttctgtgaaatgcatagatatgcgcatgttcaactttttattgtggtcttataattaaatgtaaaattgaaaattcatttgctgtttcaaagtgtgatatctttcacaatagcctttttatagtcagtaattcagaataatcaagttcatatggataaatgcatttttatttcctatttctttagggagtgctacaaatgtttgtcacttaaatttcaagtttctgttttaatagttaactgactatagattgttttctatgccatgtatgtgccacttctgagagtagtaaatgactctttgctacattttaaaagcaattgtattagtaagaactttgtaaataaatacctaaaacccaagtgtaaaaaaaaaaaaaaaa

SEQ ID NO: 25092 - DNA, 3084 bp, Homo Sapiens
tcgggagagggtgaggggtgaatggtgctgaggtgcgaggagagggaaggacagtaaagagcaggtttttggctttcatcgctttttctacatgtttttagcctcaccagaagtctttcatctcggtggtccaactcaggatctcagcctcattattttcttacccttctggagtgcatatgtgcctttacagtttctgtttgcaaacgctgtctagcatactaagaggatgttagcaaacctgttccatggacactaaatggcagttgtacatctcccctcatcagtcatagtgacaaccagaaatgccctccatattttccagtgatcccagtcttcaatgcgtctgtctcataatttgtaaacgtttattatcttgaagtcattgttaatctgtggtgaaaagtaattgctaaatagaaattctgagaagaaaaaggcctcatccttttcacatgatgtaggaaggtctgttgcatgagcaatgggaaatccagaaaacatagaagatgcatatgttgctgttattcgtccaaagaatactgccagtctcaattctcgggaatacagagctaagtcatatgaaattttgttgcatgaagttcccattgaaggacagaaaaaaaagagaaagaaagttttattggaaacgaaacttcaaggcaacagtgaaataacacaaggcatattggattacgtagtagaaaccaccaaaccaatttctcctgcaaaccagggtatcagaggaaaacgagttgtactaatgaaaaaatttcctctggatggagagaagatgggcagagaagcatcattatttattgttccatcagttgtcaaagataatactaaatacacatataccccaggatgcccaattttttactgcttacaagatattatgcgagtctgtagtgaatccagtactcattttgctacacttacagcaaggatgttaatagccttggataagtggttagatgaacgtcatgcacaatctcactttattccagctttattccgaccttctcctcttgagcggataaaaactaatgtcataaatcctgcatatgctactgaatcaggttagacagaaaactcactacatatgggctatagtgcactagaaataaagagtaaaatgttagccctagagaaagcagatacctgtatttacaaccctttgtttggatcagatcttcagtatacaaatcgggtagataaagtggtaataaatccatactttggtctaggagctccagactactcaaaaatccaaatacctaaacaggaaaaatggcagagaagcatgagcagtgtcacagaagacaaggaacgacagtgggtagatgattttcctctccaccgaagcgcctgtgaaggagattcagaattactaagccgtcttctcagtgaaagattttcagtcaaccagttagatagtgaccactgggcacccattcattatgcatgctggtatggaaaagttgaggccactcgcatattgttagagaaaggaaagtgcaatccaaaccttttaaatggacaacttagttctcctcttcattttgctgctggaggaggacatgctgaaatagtacagattctcctaaaccacccagaaacggatagacatataacagaccaacaaggaagatctccattaaatatttgtgaagaaaacaaacaaaacaactgggaagaagctgcaaaattgttgaaggaagcaattaacaaaccatatgaaaaagttcgaatatacagaatggatgggtcatatcgttctgttgaattgaagcatggaaataataccacagtgcagcagataatggaaggaatgcgtctctctcaagaaactcagcaatatttcactatatggatttgttcagaaaacctcagccttcaactcaaaccatatcataaacccttgcaacatgttcgtgactggccagaaatacttgctgaattgactaatctggatcctcaaagggaaacacctcagctttttctaagaagagatgtgagacttcccttggaagttgaaaaacagattgaagacccactagctattcttattctctttgatgaagccagatataatttattgaagggcttttatacagctcctgatgctaagctgataacattggcaagtctgcttttgcaaatagtctatggaaattatgagagtaaaaaacacaagcaaggtttcctaaatgaagaaaatctaaaatccatcgtacctgttaccaaactgaaaagtaaggcacctcactggacaaatcgcatacttcatgaatacaagaatctcagtacaagtgaaggtgtcagtaaagaaatgcatcaccttcagcgcatgttcttacagaattgctgggaaattcctacttatggagcagcatttttcacaggacagatatttacaaaggcaagccccagcaatcataaagtcatccctgtgtatgtaggagtgaatataaaaggacttcatctcctcaacatggaaactaaggctttactcatcagtcttaagtatggttgttttatgtggcaattgggagatactgatacttgttttcagatccatagcatggaaaataaaatgagctttatagtacatacaaaacaggctggtctcgtggtaaaactgttaatgaagctaaatggacagttaatggccactgaaagaaattcatgaaagagaagtaactgttactcaagccaccacattttggtgatgcagagtttcctttccgcgaaagatttcttaaaatattacttttgggccctagcatggcgggtcaaccctgtaattccagcactttgggagggtgggggcagggcgggatcaactgaagtcagagttcaagacagcctgggcaacatggtgaaacctgtctctacaaaaatacaaaaattaggtgggtgtggtggggggcgcctattcatcctagctactaggggagggcaaggtgggggagatcgcttaaccccaggaggtgggggttgttgtgagccaagattgcaccacggcacgctagcctgggtgacacaggaagactccatctcaaaaaaaaaaaaaaaaaa

SEQ ID NO: 25093 - DNA, 2925 bp, Homo Sapiens
atgaagatggcggacgcgaagcagaagcggaacgagcagctgaaacgctggatcggctccgagacggacctcgagcctccggtggtgaagcgccagaagaccaaggtgaagttcgacgatggcgccgtcttcctggctgcttgctccagcggcgacacggacgaggtcctcaagctgctgcaccgcggcgccgacatcaattacgccaatgtggacggactcactgccctgcaccaggcttgcattgatgacaatgttgatatggtgaagtttctggtagaaaatggagcaaatattaatcaacctgataatgaaggctggataccactacatgcagcagcttcctgtggatatcttgatattgcagaatttttgattggtcaaggagcacatgtaggggctgtcaacagtgaaggagatacacctttagatattgcggaggaggaggcaatggaagagctacttcaaaatgaagttaatcggcaaggggttgatatagaagcagctcgaaaggaagaagaacggatcatgcttagagatgccaggcagtggctaaatagtggtcatataaatgatgtccggcatgcaaaatctggaggtacagcacttcacgttgcagctgctaaaggctatacggaagttttaaaacttttaatacaggcaggctatgatgttaatattaaagactatgatggctggacacctcttcatgctgcagctcattggggtaaagaagaagcatgtcgaattttagtggacaatctgtgtgatatggagatggtcaacaaagtgggccaaacagcctttgatgtagcagatgaagacattttaggatatttagaagagttgcaaaagaaacaaaatctgctccatagtgaaaaacgggacaagaaatctccactaattgaatcaacagcaaatatggacaataatcagtcacagaagacctttaaaaacaaagagacgttgattattgaaccagagaaaaatgcatcccgtattgaatctctggaacaagaaaaggttgatgaagaagaagaaggaaagaaggatgagtctagctgctctagtgaagaagatgaggaagatgactcggaatcagaagctgaaacagataagacaaaacccctggcttctgtaactaatgccaacacttctagtacacaagcagctcctgtagctgttacaacacctactgtgtcatcaggtcaagcaacacctacatcacctattaaaaagtttccaaccacagctacaaaaatttctcccaaagaagaagagagaaaagatgagtctcctgcaacttggaggttaggacttagaaagacgggcagctatggtgcacttgctgaaatcacagcatctaaagagggtcagaaagaaaaagatactgcaggtgttacacgttcagcttcaagtcccagactttcctcctctttggataataaagaaaaggagaaagatagtaaaggaactaggcttgcatatgttgcacctacaataccaagacgactagccagtacatctgacattgaagagaaagaaaacagagattcttcaagtttgcgaacaagtagttcatatacaaggagaaaatgggaagatgatcttaaaaaaaatagctcagttaatgaaggatcaacgtatcataaaagtacctcaaatcgtttgtgggctgaggatagtactgagaaagaaaaggacagtgttcctacggcagtgaccattcctgttgctccaactgttgtaaatgctgcagcttctaccacaaccctgactacaactactgctggcactgtctcctccacaacagaggtcagggagagacgcagatcatacctcactcctgttagggatgaagagtctgaatcccaaagaaaagcaagatctagacaagcaggacaatctagaagatcaacacagggagtgacattaactgatcttcaagaagctgagaaaacaataggaagaagtcgttctacccgaaccagagaacaagaaaatgaagaaaaagaaaaagaggaaaaagagaaacaagataaagagaaacaagaagaaaagaaggagtcagaaacatctagagaagatgaatataaacaaaagtactccagaacgtatgatgagacttaccagcgttataggccagtatcaacttcaagttcaaccactccatcctctccactttctactatgagcagttcactgtatgcttcaagtcaactaaacaggccaaatagtcttgtaggcataacttctgcttactccagaggaataacaaaagaaaatgaaagagagggagaaaaaagagaagaggagaaagaaggagaagataaatcacaacctaaatcaatcagagaacgacgacgaccaagagagaaaagaagatctacaggagtttcattttggacacaagatagtgatgaaaatgaacaagaacaacaatcagacacagaagagggatccaataagaaagaaactcagacggattccatttctagatatgaaaccagttctacatcagctggtgatcgatatgattccttgctgggtcgctctggatcatacagttacttagaagaaagaaaaccttacagcagcaggctagaaaaggatgactcacctgactttaaaaagctttatgaacaaattctagctgaaaatgaaaagctgaaggcacagctacatgatacaaatatggaactaacaggtcttaaattacagttggaaaaggccacccagagacaagaaagatttgctgatagatcactgttggaaatggaaaaaagggaacgaagagctctagaaagaagaatatctgaaatggaagaagagctcaaaatgttaccagacctaaaagcagacaaccagaggctaaaggatgaaaatggggccttgatcagagttataagccaactttccaaataa

SEQ ID NO: 25094 - DNA, 2524 bp, Homo Sapiens
tcgcttggtggctccgtctgtctgtccgtccgcccgcgggtgccatcatggcggacgcggccagtcaggtgctcctgggctccggtctcaccatcctgtcccagccgctcatgtacgtgaaagtgctcatccaggtgggatatgagcctcttcctccaacaataggacgaaatatttttgggcggcaagtgtgtcagcttcctggtctctttagttatgctcagcacattgccagtatcgatgggaggcgcgggttgttcacaggcttaactccaagactgtgttcgggagtccttggaactgtggtccatggtaaagttttacagcattaccaggagagtgacaagggtgaggagttaggacctggaaatgtacagaaagaagtctcatcttcctttgaccacgttatcaaggagacaactcgagagatgatcgctcgttctgctgctaccctcatcacacatcccttccatgtgatcactctgagatctatggtacagttcattggcagagaatccaagtactgtggactttgtgattccataataaccatctatcgggaagagggcattctaggatttttcgcgggtcttgttcctcgccttctaggtgacatcctttctttgtggctgtgtaactcactggcctacctcgtcaatacctatgcactggacagtggggtttctaccatgaatgaaatgaagagttattctcaagctgtcacaggattttttgcgagtatgttgacctatccctttgtgcttgtctccaatcttatggctgtcaacaactgtggtcttgctggtggatgccctccttactccccaatatatacgtcttggatagactgttggtgcatgctacaaaaagaggggaatatgagccgaggaaatagcttatttttccggaaggtcccctttgggaagacttattgttgtgacctgaaaatgttaatttgaagatgtggggcagggacagtgacatttctgtagtcccagatgcacagaattatgggagagaatgttgatttctatacagtgtggcgcgcttttttaataatcatttaatcttgggaaaattcaggtgtttggtgtctgccttttttgttcttttttccagcacaacataacttaccactgatactccccctttagttattctgaattaggatatttttgctccaaattcttattttacttaaccagaagggaaaaaaagttgtattttcctgaagctacaggcactttgtcatgtgatttttgagtctcaatttaaggctttgtaaaatgaagagtagaattccaagaaaaatgagaaataattttgtaaaacttaacaaaatcactaaattaaactatatgggaggttatgaattactttttcttgggtagaccctaaaatgtcagtagcatgcaccagaatctgactcccattatgcttctaagcacatttcattgaccttgtctctcatacttcaagaaaaggacagtacattgctacattaccctagaaagtctgtgtgaggatctgccccttcagtctgttattgcaaagtaataaaatgtcacctacagggagcctctgagcctactctagttcaagaggctacctgaaaaaaaataaataagataaagggtcagcaacaacaaagaaaaagacaattacagaaaataagcaagatttggaaaggaagtataatggcacttttttcctcaaaggaagttcttgttttcctcaaaggaagttcttgttttcacataaaatatgaaaagcagatcctgcaggagtaacccccttctttaagagccaagtatttgccagtgcttaaattacaccataccgttctaattatatataatcttttgttcttcagttttttgttttgtttcctttttgttattgttgccgaaggtgagtagttttgcatttctgatgacagccttggaaagtatatttgtaactccatgtctggtaatgccaacccaagtcgacatgggtcttaggacactgaccacctcacatgccataccctcagttaagcatgttaacatttataggaggaaaaaaatcactttgggagaaaataaaattcaactcaagcataaagcttctgtttactcaggccttctaaaaagcaggttaaaatgctctaaaatgagaaagcctgtggtttcacttatttatataactcactgggacattgccaaatgagtaagcacttaattcgctgcttctgagacttctctgtcaaaacagccccactgataatattagacagaacgagaatgcaggggtctcttccctcccctggggtttaggaagctcatgaggagctcggcttaaaatgtctttgatgtctcttcctttgtctcaaaaagtaatgtcaattttatatactatttcaatattactatctgcatttgttttaatataaaaatgtttgctgcctacctttttctcccaaaaaatctttaagtaaagatgatctgggaaaatgtaaaaaaaaaaaaaaaaataaaaaaaa

SEQ ID NO: 25095 - DNA, 7496 bp, Homo Sapiens
cagctagcaggcttagattcaggccctcagcaaacaaggaacctggaaaatgtaaccctgaatgcacggtggggaggacatggcaagagaaaagcggcaggaataaagtgattttctgaatggtcttgcttctttgtctatcttgtctgattttctcctgtctgaccttttcctggttaaaaatctgggggaaaatgacggactccaagccgatcaccaagagtaaatcagaagcaaacctcatcccgagccaggagccctttccagcctctgataactcaggggagacaccgcagagaaatggggagggccacactctgcccaagacacccagccaggccgagccagcctcccacaaaggccccaaagatgccggtcggcggagaaactccctaccaccctcccaccagaagcccccaagaaaccccctttcttccagtgacgcagcaccctccccagagcttcaagccaacgggattgggacacaaggtctggaggccacagataccaatggcctgtcctcctcagccaggccccagggccagcaagctggctccccctccaaagaagacaagaagcaggcaaacatcaagaggcagctgatgaccaacttcatcctgggctcttttgatgactactcctctgacgaggactctgttgctggctcatctcgtgagtctacccggaagggcagccgggccagcttgggggccctgtccctggaggcttatctgaccacaggtgaagctgagacccgcgtccccactatgaggccgagcatgtcgggactccacctggtgaagaggggacgggaacacaagaagctggacctgcacagagactttaccgtggcttctcccgctgagtttgtcacacgctttgggggggatcgggtcatcgagaaggtgcttattgccaacaacgggattgccgccgtgaagtgcatgcgctccatccgcaggtgggcctatgagatgttccgcaacgagcgggccatccggtttgttgtgatggtgacccccgaggaccttaaggccaacgcagagtacatcaagatggcggatcattacgtccccgtcccaggagggcccaataacaacaactatgccaacgtggagctgattgtggacattgccaagagaatccccgtgcaggcggtgtgggctggctggggccatgcttcagaaaaccctaaacttccggagctgctgtgcaagaatggagttgctttcttaggccctcccagtgaggccatgtgggccttaggagataagatcgcctccaccgttgtcgcccagacgctacaggtcccaaccctgccctggagtggaagcggcctgacagtggagtggacagaagatgatctgcagcagggaaaaagaaccagtgtcccagaagatgtttatgacaagggttgcgtgaaagacgtagatgagggcttggaggcagcagaaagaattggttttccattgatgatcaaagcttctgaaggtggcggagggaagggaatccggaaggctgagagtgcggaggacttcccgatccttttcagacaagtacagagtgagatcccaggctcgcccatctttctcatgaagctggcccagcacgcccgtcacctggaagttcagatcctcgctgaccagtatgggaatgctgtgtctctgtttggtcgcgactgctccatccagcggcggcatcagaagatcgttgaggaagcaccggccaccatcgccccgctggccatattcgagttcatggagcagtgtgccatccgcctggccaagaccgtgggctatgtgagtgcagggacagtggaatacctctatagtcaggatggcagcttccacttcttggagctgaatcctcgcttgcaggtggaacatccctgcacagaaatgattgctgacgttaatctgccggccgcccagctacagatcgccatgggcgtgccactgcaccggctgaaggatatccggcttctgtatggagagtcaccatggggagtgactcccatttcttttgaaaccccctcaaaccctcccctcgcccgaggccacgtcattgccgccagaatcaccagcgaaaacccagacgagggttttaagccgagctccgggactgtccaggaactgaatttccggagcagcaagaacgtgtggggttacttcagcgtggccgctactggaggcctgcacgagtttgcggattcccaatttgggcactgcttctcctggggagagaaccgggaagaggccatttcgaacatggtggtggctttgaaggaactgtccatccgaggtgactttaggactaccgtggaatacctcattaacctcctggagaccgagagcttccagaacaacgacatcgacaccgggtggttggactacctcattgctgagaaagtgcaggcggagaaaccggatatcatgcttggggtggtatgcggggccttgaacgtggccgatgcgatgttcagaacgtgcatgacagatttcttacactccctggaaaggggccaggtcctcccagcggattcactactgaacctcgtagatgtggaattaatttacggaggtgttaagtacattctcaaggtggcccggcagtctctgaccatgttcgttctcatcatgaatggctgccacatcgagattgatgcccaccggctgaatgatggggggctcctgctctcctacaatgggaacagctacaccacctacatgaaggaagaggttgacagttaccgaattaccatcggcaataagacgtgtgtgtttgagaaggagaacgatcctacagtcctgagatccccctcggctgggaagctgacacagtacacagtggaggatgggggccacgttgaggctgggagcagctacgctgagatggaggtgatgaagatgatcatgaccctgaacgttcaggaaagaggccgggtgaagtacatcaagcgtccaggtgccgtgctggaagcaggctgcgtggtggccaggctggagctcgatgacccttctaaagtccacccggctgaaccgttcacaggagaactccctgcccagcagacactgcccatcctcggagagaaactgcaccaggtcttccacagcgtcctggaaaacctcaccaacgtcatgagtggcttttgtctgccagagcccgtttttagcataaagctgaaggagtgggtgcagaagctcatgatgaccctccggcacccgtcactgccgctgctggagctgcaggagatcatgaccagcgtggcaggccgcatccccgcccctgtggagaagtctgtccgcagggtgatggcccagtatgccagcaacatcacctcggtgctgtgccagttccccagccagcagatagccaccatcctggactgccatgcagccaccctgcagcggaaggctgatcgagaggtcttcttcatcaacacccagagcatcgtgcagttggtccagagataccgcagcgggatccgcggctatatgaaaacagtggtgttggatctcctgagaagatacttgcgtgttgagcaccattttcagcaagcccactacgacaagtgtgtgataaacctcagggagcagttcaagccagacatgtcccaggtgctggactgcatcttctcccacgcacaggtggccaagaagaaccagctggtgatcatgttgatcgatgagctgtgtggcccagacccttccctgtcggacgagctgatctccatcctcaacgagctcactcagctgagcaaaagcgagcactgcaaagtggccctcagagcccggcagatcctgattgcctcccacctcccctcctacgagctgcggcataaccaggtggagtccattttcctgtctgccattgacatgtacggccaccagttctgccccgagaacctcaagaaattaatactttcggaaacaaccatcttcgacgtcctgcctactttcttctatcacgcaaacaaagtcgtgtgcatggcgtccttggaggtttacgtgcggaggggctacatcgcctatgagttaaacagcctgcagcaccggcagctcccggacggcacctgcgtggtagaattccagttcatgctgccgtcctcccacccaaaccggatgaccgtgcccatcagcatcaccaaccctgacctgctgaggcacagcacagagctcttcatggacagcggcttctccccactgtgccagcgcatgggagccatggtagccttcaggagattcgaggacttcaccagaaattttgatgaagtcatctcttgcttcgccaacgtgcccaaagacacccccctcttcagcgaggcccgcacctccctatactccgaggatgactgcaagagcctcagagaagagcccatccacattctgaatgtgtccatccagtgtgcagaccacctggaggatgaggcactggtgccgattttacggacattcgtacagtccaagaaaaatatccttgtggattatggactccgacgaatcacattcttgattgcccaagagaaagaatttcccaagtttttcacattcagagcaagagatgagtttgcagaagatcgcatttaccgtcacttggaacctgccctggccttccagctggaactcaaccggatgcgtaacttcgatctgaccgccgtgccctgtgccaaccacaagatgcacctttacctgggtgctgccaaggtgaaggaaggtgtggaagtgacggaccataggttcttcatccgcgccatcatcaggcactctgacctgatcacaaaggaagcctccttcgaatacctgcagaacgagggtgagcggctgctcctggaggccatggacgagctggaggtggcgttcaataacaccagcgtgcgcaccgactgcaaccacatcttcctcaacttcgtgcccactgtcatcatggaccccttcaagatcgaggagtccgtgcgctacatggttatgcgctacggcagccggctgtggaaactccgtgtgctacaggctgaggtcaagatcaacatccgccagaccaccaccggcagtgccgttcccatccgcctgttcatcaccaatgagtcgggctactacctggacatcagcctctacaaagaagtgactgactccagatctggaaatatcatgtttcactccttcggcaacaagcaagggccccagcacgggatgctgatcaatactccctacgtcaccaaggatctgctccaggccaagcgattccaggcccagaccctgggaaccacctacatctatgacttcccggaaatgttcaggcaggctctctttaaactgtggggctccccagacaagtatcccaaagacatcctgacatacactgaattagtgttggactctcagggccagctggtggagatgaaccgacttcctggtggaaatgaggtgggcatggtggccttcaaaatgaggtttaagacccaggagtacccggaaggacgggatgtgatcgtcatcggcaatgacatcacctttcgcattggatcctttggccctggagaggaccttctgtacctgcgggcatccgagatggcccgggcagagggcattcccaaaatttacgtggcagccaacagtggcgcccgtattggcatggcagaggagatcaaacacatgttccacgtggcttgggtggacccagaagacccccacaaaggatttaaatacctgtacctgactccccaagactacaccagaatcagctccctgaactccgtccactgtaaacacatcgaggaaggaggagagtccagatacatgatcacggatatcatcgggaaggatgatggcttgggcgtggagaatctgaggggctcaggcatgattgctggggagtcctctctggcttacgaagagatcgtcaccattagcttggtgacctgtcgagccattgggattggggcctacttggtgaggctgggccagcgagtgatccaggtggagaattcccacatcatcctcacaggagcaagtgctctcaacaaggtcctgggaagagaggtctacacatccaacaaccagctgggtggcgttcagatcatgcattacaatggtgtctcccacatcaccgtgccagatgactttgagggggtttataccatcctggagtggctgtcctatatgccaaaggataatcacagccctgtccctatcatcacacccactgaccccattgacagagaaattgaattcctcccatccagagctccctacgacccccggtggatgcttgcaggaaggcctcacccaactctgaagggaacgtggcagagcggattctttgaccacggcagtttcaaggaaatcatggcaccctgggcgcagaccgtggtgacaggacgagcaaggcttggggggattcccgtgggagtgattgctgtggagacacggactgtggaggtggcagtccctgcagaccctgccaacctggattctgaggccaagataattcagcaggcaggacaggtgtggttcccagactcagcctacaaaaccgcccaggccgtcaaggacttcaaccgggagaagttgcccctgatgatctttgccaactggagggggttctccggtggcatgaaagacatgtatgaccaggtgctgaagtttggagcctacatcgtggacggccttagacaatacaaacagcccatcctgatctatatcccgccctatgcggagctccggggaggctcctgggtggtcatagatgccaccatcaacccgctgtgcatagaaatgtatgcagacaaagagagcaggggtggtgttctggaaccagaggggacagtggagattaagttccgaaagaaagatctgataaagtccatgagaaggatcgatccagcttacaagaagctcatggaacagctaggggaacctgatctctccgacaaggaccgaaaggacctggagggccggctaaaggctcgcgaggacctgctgctccccatctaccaccaggtggcggtgcagttcgccgacttccatgacacacccggccggatgctggagaagggcgtcatatctgacatcctggagtggaagaccgcacgcaccttcctgtattggcgtctgcgccgcctcctcctggaggaccaggtcaagcaggagatcctgcaggccagcggggagctgagtcacgtgcatatccagtccatgctgcgtcgctggttcgtggagacggagggggctgtcaaggcctacttgtgggacaacaaccaggtggttgtgcagtggctggaacagcactggcaggcaggggatggcccgcgctccaccatccgtgagaacatcacgtacctgaagcacgactctgtcctcaagaccatccgaggcctggttgaagaaaaccccgaggtggccgtggactgtgtgatatacctgagccagcacatcagcccagctgagcgggcgcaggtcgttcacctgctgtctaccatggacagcccggcctccacctga

SEQ ID NO: 25096 - DNA, 6263 bp, Homo Sapiens
atgattaacagttctttaagcatgctcttttcttatttagaaaagtatttctatgttacagatgaactgtctcattgtgttgagcctgagccatctcaggtgccaggtggcagttctagagaccgtcagcaaggtaagccccctcctctcccggctctaaaagctaagacatcttcacgttctggtccatatgccactgagataaagaagtcaactgatgattccatatttaaagttctagactggtttaaccgaagttcttattcagatgacaataagtcattcctccaacatccccgaggaacagagtccaaagaaaaaacagactcaaaatcacaggttgctgttgacttggtgacagatgacactactttaagagaaaatggctcaaagaccctatcacccagcaaaattgaattgaagcctgtgagatctgactcaccattccaagcagaggaagatatgctggtttctgaaagttgccaagataataatgtgaatatcaaatccaaattcatgaatttgtcccaaaaaggcaccccaaaggaaggcccaggtatattgcaaccatttgaaagctatggcaccccaagtcaagggagtaaaaatatggactatagccaagattcaaaaagcccaggaaaagggaatggggcatctccttcaaatagtaactattcctacagtgttctcaaggaatctgatgcagaaaaccaagttccatgcaacactaataatattggcaacttgggtgaagaagaacccaagtttcatgctcatgaagaaaatagaggacactcagaagtgaattttgactcttcaacagttgtcaaagaaccaggtttgaaagataacatgaatgcagagagaaagagcaaagtaggaaatacctatatcctgaaagcctccttagagccagagaatattaagtcaacacctggggttgccaacaatggctctccttggaagaagcctgaggtccaattccagcaagaagctggtgaggttcccaagaaccaagtgcagagagagaaatacaaaagagtgagtgacagaatatccttttgggaaggagagaaagctggtgctaagataactcatgaaaaacccacatcttcatgtagccaggaacaaccttctgctaaagcatatcagcctgtgaagaagtcacagggtgtatcatccatggacagtttatctacagaccagagtgaatataatcaggccattcccaaacgagtggtcttagatgaggatgatcaagcatcccagctctccaattcttattcctcaaataaatctaaagagaccaagccacaaatagcaggtccatccagatactatctttcagctgagcaatcagataaagtgtctctgtttcagaataagaaaaatgagcctataaaaagatcacaagtggcagacagtttgccttctagaagaaacattactttaccagcactgcaacctccctcaaatgtcgggagtgaacgacatgctccattggagaaagacagacctctagttcgtgaatcaaatgccaactttaaagttatgtccctaaaagaaagaatggatgaacccaatgcagaacaggtctataatccctctcagtttgagaatttgagaaagttttgggacttagaagctaattcaaacagtaaggataatgacaagaatattaccaccacaagccaaaaaaattctgcaccttttaataggcagaaacacaaggaattcagcgacattaaattatcaggtaaaaatacccatgaagcagaggtgcttctaagcccaaaaaaagttatggcaagagaggaaatggagaaattaaattcaaagggcatactccaggtgctaccagatgaaatcacatttcctttgagtccacttagaaagtatacttatcagttgccaggaaatgagtcatcaaaggaaaatgtggaaaagaatacggaagggattgttactccagtgtttaaggaagaaaaggattactcagaacaagagattcaagaatccataataaaaaccaatgttttgtctaaagactgcaaagacacttttaatgacagcttgcagaaactgctttcagaaacctcaacaccagcaattcaaccctctggtggaaaagttcatggaaaacaagtgcttgaaccaagtgtttctgaaaataggacatggcctcaaaaaacagattttggtgatactgaggaagaagtcaaaggacctgagaagatcattaatgagcatgttgacaaaacagtagttcatccaaaggttaaacggaactctttgactgctagtctagacaaactcctgaaggaagcaactggaacttcaccctctcccttgcaagccaagttggcgcccgttatcactggaaccaactctaagctggaagaggggagattttttggaaaagggatagaacagagtcacaatacttcagctgataagagagaaatactagctccttttccagtgagagatgaaacttttggaaatacagctctcctcaagaaagctgaaagtggtgagtgccagctaagcacacagaatttgattcaggtggctgcagaagattctcatccattggatccaacttcccagctttccagaaagggttcttttggggatgtggccagccctccccaagatatgctttttccccagggtgctcatcttgttccccaggctagggtacacccttctcaaatggaaatttcggagactgtagagaaagtcattcttccacccagacctgtattgaatgatgtaagtgctgcattacagaagctgtgtggagaagtatggttaagttatccagctggaagggaagtaggtcctggagaagtgaacccagaatttcctgaagcagtacagccagtatgtagccccctaaatcctccaggagtgatatcaccatgggctacgatggacaccatagttccagacaggaaggatttttattcctccaatgtagttcctgataaaactcatgaagttggatcttatttagctgcccaaatgtctccatcagaccagacgcttagctcatttgcttccattgttgctcaatatggcaaaggcctccctcaggaagtggaagaaattgtgagggaaacaattgttcaacccaaatcagagttcctcgaattcagtgctggcttagaaaaactactgaaggaagaaactgaaaccttcccctcaaaatatgaaagtgatacagggaatctttctccatcaaagttaataggtagtacagaggagcccaggcgagccacttctgaatgccatcctgaggaattaaaagaaacagtagaaaaggccgaggctccattaataactgagagtgcttttgatgctggttttgagaaacttcttaaagaaataactgaagctcctccttatcagccccaggtgtcagtgagagaagaaactcacgagaaggagtcctcacagtcagagcagaccaggttcttggggacagtgccccatttttacagggcagcctcacagacctctgaaatgaaggataaaagtaatggtttggaatctcaagtcaaccaatgtgataaaatgttgggaggagacgcacttgtgactgatttattggtagatttttgtggttccagaagtggagttgagatccctagaaccccacaactttatgtggctcatgaaatagggaccattaaaactgtaacccccccagaggacagggacagtgaaagtggggttgcagggggacaagggactcttcaggaacctggctttggagaggcttctgaagcaattagtgtgtccagaaataggcaacccattcctctcctgatgaacaaagaaaactctacaaaaacaagtaaagttgaattgactctagcatcgccatatatgaaacaagagaaagaggaagaaaaagaaggtttctctgagtctgatttttcagatggaaacaccagttctaatgcagagagctggagaaatccttccagttcagaagaagaacccagtcctgttttgaaaactttggaaaggagtgccgctaggaaaatgccttccaaaagtctagaagacatttcatcagattcatcaaatcaagcaaaagtagataatcagccagaagaattagtgcgtagtgctgaagatgtttccacagtgcctacacaacctgataatccattttctcaccctgacaaactcaaaaggatgagcaagtctgttccagcatttctccaagatgagagtgatgacagagaaacagatacagcatcagaaagcagttaccagctcagcagacacaagaagagcccgagctctttaaccaatcttagcagctcctctggcatgacgtccttgtcttctgtgagtggcagtgtgatgagtgtttatagtggagactttggcaatctggaagttaaaggaaatattcagtttgcaattgaatatgtggagtcactgaaggagttgcatgtttttgtggcccagtgtaaggacttagcagcagcggatgtaaaaaaacagcgttcagacccatatgtaaaggcctatttgctaccagacaaaggcaaaatgggcaagaagaaaacactcgtagtgaagaaaaccttgaatcctgtgtataacgaaatactgcggtataaaattgaaaaacaaatcttaaagacacagaaattgaacctgtccatttggcatcgggatacatttaagcgcaatagtttcctaggggaggtggaacttgatttggaaacatgggactgggataacaaacagaataaacaattgagatggtaccctctgaagcggaagacagcaccagttgcccttgaagcagaaaacagaggtgaaatgaaactagctctccagtatgtcccagagccagtccctggtaaaaagcttcctacaactggagaagtgcacatctgggtgaaggaatgccttgatctaccactgctaaggggaagtcatctaaattcttttgttaaatgtaccatccttccagatacaagtaggaaaagtcgccagaagacaagagctgtagggaaaaccaccaaccctatcttcaaccacactatggtgtatgatgggttcaggcctgaagatctgatggaagcctgtgtagagcttactgtctgggaccattacaaattaaccaaccaatttttgggaggtcttcgtattggctttggaacaggtaaaagttatgggactgaagtggactggatggactctacttcagaggaagttgctctctgggagaagatggtaaactcccccaatacttggattgaagcaacactgcctctcagaatgcttttgattgccaagatttccaaatgagcccaaattccactggctcctccactgaaaactactaaaccggtggaatctgatcttgaaaatctgagtaggtggacaaatatcctcactttctatctattgcacctaaggaatactacacagcatgtaaaagtcaatctgcatgtgcttctttgattacaaggcccaagggatttaaatataacaaaatgtgtaatttgtgactctaatattaaataagatatttgaacaagctaggaaaattgaatttctgctgctgcttcaaagaaaaagctgccccagagcattaaacatggggtattgttaagaagcaaaatgttcttgtttgccatcatgtgtttcacaccacaattctgtgccacagttaagagggtctggtacccttgcaggacctttgtaggttgtgggaaaaagtcgcagaaagatactcaaagtggagcagggaatggagacagacatcagtgatgataaaaaaaaaaaatggaccttaagaaactatttactctgtaatctctaataaaatatggaattccatattagggcaatgagactgaaactactggtgtttttctgccttgagaaaacaaacagttaaaacaagcctcaaatgtattttagtgccacccactggccataggtacaattcagttgttggcttgttttgacttaattctaaaataggtctcaagcctgtatttttatgagtttatttttttaaaaccctgcatatatatgattgtttttcttataactttactatatgaaagcagcataagagtagtcacaaacatgttttgcaacaaagttttaattagaatgtaagttgctcagttatactgttcttcttatgtatgtaaaattttcgtattttgtaaaaacccttagaataaattatcatttgatctaaaaaaaaaaaaaaa

SEQ ID NO: 25097 - DNA, 574 bp, Homo Sapiens
gcatggaaggaaggactgtgtctgtgagggatgatcatcctctcatgtgatccttggagatgccaggaagccccttgacacatgtggcatgggctccttcagaggcttttggatccgtcgtgaatgtggcatgggcatgcaaagaaagacagaggctgcaagggataaacttcatcttgggagatccctggagatggcagggaacccatggacacatgtggcatgggctcctttgggtgccggtggatcccttcatacggtagtgttggtgtaaaaggcaaacccgtgtcatgagggatggtcatcatcttgtgtgatccttggagatggcaggaagccctggacatacatggtgtgggggctcctccagaggctgttgggatcctcctggatgtggtgtgggcatggaaggaaggccagtggagacaatggatgatcttgttcttagcagatcactggatgtggcagggagtcctaggacatgtgtggtgtgggcttcttcaggtgctggtggtgttggcatgaggaaaggaggtatcttcgagggacaatcttcttcttgtgcgatccttgg

SEQ ID NO: 25098 - DNA, 4124 bp, Homo Sapiens
gcacagactcaaagccccgcgggcgagctcagcagcccggagcgaccgcggccccgccgcctcccccgcgagtcccggcgatgcggcccggcctgtgagcggccggcgaccctgggacgccccgccgcacaactacctcaacgccgtgccgcccccctcccgcccccagggaatctctggagattggttcaccttttgtggtcctgaccccttctgtcctcactgtaccttgaagtcctagagtccaataaaatcgctgcctcccagctgtttggatcacagagaggtttttgcactgccatagggcgcccccgtgaggcgcttcgccccccaccatgttccagcgcctctccagcctcttcttcagcaccccctcgccccccgaagaccccgactgcccccgcgccttcgtgtcggaggaggatgaagtggacggctggctcatcattgacctgccggacagctacgcggctccacccagccccggggccgcccctgcccccgcgggccgccctccgcccgcgccctccttgatggacgagagctggtttgttacccctcccgcctgttttacggcagaggggcctggactcggtcccgcccgcctccagagcagtcccctggaggacctcctcatcgagcaccccagcatgtccgtttacgtcaccggcagcaccatagtgctagagcccgggtccccttccccgctcccggacgcggccctgcctgacggcgacctcagcgaaggggaattgacgcccgcccgccgcgagccgcgggccgcgcgccacgccgctcctctcccagcgcgggcggcgctgctggagaaggcgggccaggtgcggcggctgcagcgggcccggcagcgggcagagcgccacgcgctgagcgccaaggcggtgcagcggcagaaccgagcccgcgagagccgtccgcgccggtccaagaaccagagcagcttcatctaccagccgtgccagcgccagttcaactactgagcgtccaccggccgcgccacgaaccccttgccgatcccgatccctgtcgggctcctccgactcctcgggctggacaccgaaacctcccttcttaaagcgtgtgaggttgggtgatagccgttccttccccgacaccctcaatttccccatctctgatcctctaatctgcctctgaacccattcacccttcaccctcactcctggtccccatacccagcatctaatcatccatgccccctactcctggcccctccatcctttcttctctggtccccatccctgtctctccctttcacccttgccctccagtcctctacctctggcctgcccctatttctgaaagcttcttccagtccctgatctggctcattccccaccttcaactcccaccttacatgtctcacactatcccatggttggcattacactcactcctgttcccttattcttcattcccagtaattccctaccaaatggtggggaccctgagcccagctctgaccaggtagagcctgtgcagcctgggctgctgtcattgccctccagtaagggctcagggttttgcttttagtctccccttccttctgccttgggggcggtactctgtggagctgcttaggcctggaaaggtacagtatgtagaagaggactgtgagacgtgagttagagggagaagatggagggaatctagggaacgaggcagcctattggagatgcggacaggacagacacgttgagaagctgcagggagcagggcaccaagggagtgtgcactgtgcttgctcagagaggccaaaccctgctcccaggctgaagcctggagtctgcccccacttcccttttctataatccacccttctgcaggccctgaaatctgaagggcttagttagtaccttgccactctacccccaacacgtcacccgagtagaagctgggcaaggccctaccatcctggccgtctgttcacaagcccaaggtgctagaactagcttaggagacatgcaggccacagggcttctaggcagggaaagggcacacaccctaggtcagcgtgcagagcagtgatgctggaggacacaccatggggtgaagccatcccaaggctgacagctcagtcttcaccttgcctctggccttgtatttcacaccctgctcagtatggctagccagcagtcctgagtaggagtccaggactcccactgtctcaatctgcaaattgttcctatccaggttcagggccttcagggggcctcttttcattttctcccacaggcctctctttctttctaggttgctggggagaaatgggtaccctatgatccccctccccttctcctccagtaaatacctggaagagggaacctgaatccctgggggagacagaaggggcaggggccaccagcctccccttcttgtggtgagactgaattttgggctcagacaccagcaacagcctcttgggatgccctgagttgcttcccatttcctctttctagccgtccttttctagtgtgtgctcactcttcctaggaacttttaagacttcttggtacctatgaacataggtcctcccctcaccccaactctaggtttccaggcctcacagccaagctgaagcttggagaaaactctgcattcccatgagggcaaaggcagctgccctccctgaccctatagccccaggcctcatggggggtatgtggggaagggatggggtatccccatggatgctgggatgaggacagaggaagacctgatggggtctcctattccagggaataagccaaattaacactaaaaacggatcaaagctcccacgccagtccactagggccccagtagttgacagccttgctcctctcccaagttctccttcagaacctagttgcttttattcttccagctaccacttgggcacttcacagccagcctagggtcttcggcacctccaagagctgaatctccctccaacccttcttgcctactcctcactgccagctgggacctaggctcagtcctgtgtggtgcccatgatccttctggtgggggaagagtttaagttatagggcatttggctcaaattttaaaaggccttttgtttacctatatttctggaggctcctgtattctagaacccaatctctcacctgcttggttgcaaggctcatatttttttgtacctttcctatagattctgtagcatttgagtgtggcaatattttaattgtgtatagatttctaagaaccaacactactcagtctcctgctagtctgactcctgaagcatcagcccttgtcatactgtattgactgtgtacgtgcctttcaccttgagcatgcttcaggatttttttttaaaccacagaacttgaatacatgagggaaccagagttcaaagtcctatgcaaccttaggagggggttagagagtctgttttgattgatgttttctgaggccctagaggagtttgtatcaatttgtgagtattaatgtcagtactaccagcactttgccaaaactgtcagagggacccgtttctagagtgagtcccagttacatcaaacagtgacttccagttattccccagtaagtctgagtggttccttcaagctgggtgtctttccagcctttgccagtctagccccagcagggcaccgtgtatgaatgcagtttggtgctgttttagagtatgcctgctccccagccccctgcctggaaccctctgagcaacttgctctgacctataatgtcttaggtgcaacacggaccccaccagagctcttggatacccccctagatccatgtggctttatgtgaggggactgaatgcagacacaccatagcccccttctactactttccctctcgccctgccacctagttccacatggaaccaacaagttgagtgcatccctgttgggtgttttgtgttgagactggctgaaatgaggagactttgaccatgtgacgtgtcaacagactcaaggagacaaccacctcaactgggtcatgtggcatgcctgtgtatgtgtgtaacagaattctgattgttagactgtaatgctattcctctatgggagaaaaaaattaatataaagaaaaacaaataaaaatatatttaaagc

SEQ ID NO: 25099 - DNA, 41466 bp, Homo Sapiens
tcaactttcatctaccactgctcccctcatattacctgattgcgtctccccaaatacaacatctccatgttccatgcaatcccgtaaagcactgagccaaggactggagatgccaacaatggtcctggtcctcaaggggcttcctacctgcccctccggccttcccccacccaactacctaaaacacaggcagagaacctctgaaaacacagcagatccaaccattcccctgcttgaacctttcggtggcccctaatgctcagagtgcaaagtccaggagcacaaggctctttctcaccttcccacaaactaccccgtgactccaggctccagcccagagcccggacagcccctgccccagcctttgcccaggattctcccttggcggcaactttccctgtggttctgcagcatcatctcccagtctgggtcagaggcctctccttagcctcttagcccccaagcctctccccgtaactgcacctatcaccctcaaaccattgtctggctgcctgtctcctcccacactggtccctgagcagaaacaaggactaatccatgtttttcagctcctacccctaatgaaataccctaatagatactgaaaaatgtttttgaaccaatgagacaagtctactgataataaacaggcaaataacagcaatgtgctaacagtggctgtttctggtgagcagaattttgaggtctgttcctttcacttcttggtatttcggttgtttctgtaatgactgtatcttgcttttgtaatcataaaggacagtaaaggaaacttcattttgaaaataatacaaagggattcggggacttcaaaagaaggtgactctcctcgtccactccagagaatcaggaaaggagtgtttaaagacccacagaattcctacaagtgacgttgggggggggccagccagccagggcgcatgccggccagcgagtggggtgggctctgggtccgggagaagtcagatcagtgctctgtacagggccttgagggcaagacgaggaatttcgacttaggtccttgaatctggagagctacagaaagtttgtgagctcaggagaagcgctccgagctcggcatctggagcagttcaaggcagcagcgagcaagtccaaagacgcaggagggagggtggggtggaggagtagagagaaaacagaagccgtctacagaccctttttccctctggggcaactaaacctcaagtgcaggaagcgcttggggactgcccagccctcagctgtgttattattcggtgataggtatttgctaattacttccaaaagcctcccatctgtcatcccacccagactgcgcgcttctaattcctcctaccccacatgctgtgcccaatgaaaagtatggtcagcgagcgaaggtttgcaaggagacagacgagggcgaaattaagccaggcggcttccctttaaatcctcgcaaagcagaagggcccctcactctggcagcaggccttggccaaggggcctttagccctgacgacccggggaagagtctcccaaagcagaacgcccggtccggcgcccagaccaaacgcgggggaaccggaagggcgaggcctccacgtaagtccgcggtaaaagtggcagggagtggctgcctgcaaagaccccaagacggcttgaagaaggagtgggtggcgggtgggggttagggcgactaggcggggaaacagggagagggtcgggctccgcggggcagctggggccggggctcgccgacctgggcgggggcggggggcggggggggtgcggcccgggcggggccggtggggcgggaggcgtggccggcggggggagtgggggcggcttttcccggcacatgcgcaccgcagcgggtcgcgcgccctaaggagtggcactttttaaaagtgcagccggagaccagcctacagccgcctgcatctgtatccagcgccaggtcccgccagtcccagctgcgcgcgccccccagtcccgcacccgttcggcccaggctaagttagccctcaccatgccggtcaaaggaggcaccaagtgcatcaaatacctgctgttcggatttaacttcatcttctgggtgagtgagcgcgactgccgcgcgctcctctcagggcccacctgttcgcgggccccggacactggccgcggccgcgagtgccggcagctggcactgcccgcaccgggcaggcaccgggcgggaagagagagcgccctgcggctgccagctggctccaaggccgggtccagagccgggcgggacggccgcgacgggcgcattcgggtgggggctcatcaccgcccagccggcgtggggagccgggccctcttgagatgaggcgtgcgggagggtcctgagcactttagctcgcctaggatttgagctggggtgtgtgtctgctcccagctcaagtccctccgagtgccagagaggaaggcagggagaagcggagcacccctctttgggccaaggccaaggaggactgtggtgagcagtatggcttgtgaccgggtggggtctcccaggtagtagggggcgccaggaagggagggtgcgggcacggcgagagctcagccaagagcggctctcacttttacgcaggagcggcaggggtgcctcggccgcgggtccggccccgggacccagtccctgagagtcgggggcccctccacccttgaggaggaacctcgcaggcccccgttccctcagactttgattctgagccaccgtgagagcgccgaactccctggtagctccctgaaagactagcttgtcttgatttctttcaaggacgataagtatcttcactggagagaactcagagttcgggagaggagggggcagatacctatctgcgcctctagtgggatgagtcctgtgtgtgcatttccgggagagatcaggtgccagccagctgcccgcccaggagagccttggccttgccctctcccctccccgccagcccaggcggcccacccaaggccaggcagggcgcagagcggacgttcatctggagaggccagcggggccaggagctccagagacacctgctgcaggccactcagcctctacaaatgggaaggctgagaggcgacagaagcaaggaataggaaacccttgtgtccttgtttctatagccacattccctgcacacacatgacaatacttgccgctctgcaggcaggaagagagtctctatgccactctcaagatagatggatgtagaaacaggtgcatgccaccagagtcttgtaacaaaaaagtgcacttggccaggcacagtggctcatgcctgtaatcccagcactttgggaggctgaggcaggaggatcgctttcatccaggttcaagaccagcctgggtaacatagtgagacccccatctccacaaaaaaataaaaaattagctgggcgtgttggcatgcacctgtgatcgcagctactcaggaggctgagatgagaggatggcatgagcctgggaggtcaaggctgcggtgagtcatgattgcaccactgcacttagcctgggtgacctagtgagccctgtctcaaaaaaagtagaaaagaaacaaatgcacttattccccctggagctggtcactgaggtccccacaagcctccttagggaaatcttctaagattcactcctccccagagctgaaggggtggttgaacagtttttccaatttgcagagactgacttcccccagtgcatcagtcaccataacacacaccccagtgaggacggcatataggtgtgctccttcccaacccttgacttgctttaaaaagaccctgctggccgtgggcacccctcctcctgtgttgccacccaccccagcaaccacccagctgccacgcttagcttctttctttcaccaatccctggcagcagaaaagtatgcgggaaggcagctggcctcacccacccttgaactttgggagttttcctctcccctcccaggtacagtctctcccggctggtgtgttggttagtcctcagctgtctgcctagactgcatccaggtttgggactgcagggaaacacagactgccacagtgtgcctccctacccccatctgccccatggcatatgcaggaagctgatgcgaggctcacagggccactggtatctactctgtctgtggcctgctggcctgcaatctgtccgtactgtcctcagcctgccaccccactcgtattcagaaccccctatgcctggccccagcctaggtgcagctgatgacctatgtagtctgaaacagaaatcactcacactggaaatgtttggaatgacttttgaagatcatgcagtccagctctcttattcatagtgaggcagcagaggaagagagatggggtgatttacccaggatcgcagagacagagccagtattacaattcctggggcccctactttacttctgtcctcttccatcttcatcagaggcaggaagatgggcagtagctatgttttcctgaattactgttcatttgtcctgtatctgggtccctatggagatgaagccctcatccctaggagatgatgtaatgaaaaggaagactgtggtcggtccacttgtgcagagtgttagtctttagagcctttcttgttctagtcccatgatgtagccaagagcaggaagcattgtccccactgtactgatgatcaggaaaccatttcccagagaggttaggtgacttatccaaggtgatgcggcagggtggtctcagaactaggttactttacccaactggttttggctgctgagtgggaatgggagaagggtgggaagaagctcccaagactcccttaaggaaaggtgtaacctaagggaactgcttgggtgattatgttgtcaccacgtccgtttctctcttgagaccagacatttataaacttggcattcggaacctgatgtgggccttgaaaagcaggaattgtgaggccagtgcccagcagcactttgcacagaggctgctgagagggggtgtccaacaggcatccagagagaggccaacctcagtggagtaggatggttattggggggctgtgcctcttccctggcctgatctcatccctgtgggtcactccctgatggccacagccaaaccagcaaatcagtctgttcttccaccacctccagaaccggccctcctagctctattttgattgtttctacatttccttcagacctccctgcccgcctgcccaccccccaaaaaacagttgagagggaaaacatcttgctgatgtccatgtggtagacacacaagtatttctccagctgaaatggggaaccagggttagggccagtccagtctgacacatgcatgtctgccctctttctggtcagagaaggggaggaactccttagggcaaaagagggaaaggtttggctatactgacagagcccaatcccctccccacctccctcagcccctttgcttactgtctctcatgcctcgctcactgatggaaacagcagtgtggggctgggaggtctctttcccaagaaaccatatcccctagacctaggggaggctggtgcgaaacacagagacctacactgggaattcagagacctggatgtgagcccagctctgtcctcaactcactttgaaaccttgggttggtcacttctgtgctctaagcctcagtttcctcatctgtaaaacaatagcttggaacaaatggtctcaaaaggtcctttcaagctcagtctatgaacccaacacccctacacataccacatacagcaatagaactctcctacacaacccaaaataggaaccaatattgggtacgatgtatactatgttggtgatggtcacattaaaagcccagacttcaccatgtgtaacaaaactacattcgtgtcccctaaatctataaataataatataataaacaaaatacaagccctgaattggaaatgggagatggataccaaggcttgagtcctcagaacttagcttttcttggcctttacctctggagcaagagcccagctggtgcttttctttgctgttgcttctcagttccctctcctcaccctgggtggggtctctctcaggggtgttcattgcccgtataccttagtacttggcctagtgatcaaagcaccagtcctgggttccatgtctcatcaccagatggggctggtgaccaccccacatggtgctgtgagagttaaatggggagtatgtgtagtgcacttagcatagtagattgcaccagacatatcttccaacagtagctattgttattcactagtggagagtagaatgaggccctggggagggtgagagcagttctctaagaagtgtggaagtctaaaccgcagatgtggccaggaggaccctcccaatccacacactggcctccctgcctcttcctgtatcagtgccaactttgtcctgtgcatcaaaaccctgactccatttcatgggttgctactgctcatttggctgcgggaaggccccgcttctgaaaataaaattgcctgtcagagaaaccctaaggatcaggattccggatctgggcagggcatggacaagttgggtggcagtggcaaaagcccctccccacggtctgccttttcccccagaagcaagttgctgggactgttgcataaaatggctcccacctccagtgcccagacagcctgcgctggggtgaagctggctacacgtgcactgaagctggcaggcttggggagaggtgagctgaggccaggtatctgcttcctttgcccaggattttgatggtctctcccctacacccacagtgggtgtgaacaacaaagacccaatcttttgatggtggtgaggattcctctgcacacgctcacactcacgttctctacccccttcttttcaacgtggcccacagcacgattccagaccctgctctattgtgctcagaggaagcagctgctggctccagcccgaatttgggagtgctttgatatgcagccctctctggggccctgccagtactgactctagatgagccctctgcggctgctgggctcacaaatcagccttctcaccccttcctccaggagcagtgttggatgagaatctcccccttacacacatagatcctgtgtttgttttgtctgcttttgtttgtttgtttgtttttgttttcctgttctgttcaattttataaggaggcatagcttttggacttggttgcagggttgggtttggaacttaataataccttggattgacaaaggcgccttttcttctaaagaacacaaaccttgatggttcttgcctgggtgtggttctcacctgggtgagcctggctgtgagggtagggggcctgaggtcaccccaaccacagcttctgtggtcctactggcagcatgttctagacagacctgtgtggagctggggaaaggagagtggagaagtttgaggaagctgcatgtttatgttttgtgttcctccctcccccaggttggggtcagcgggactttatttggatccaccacaggtcttttcaaccaaagccttgcagaaacaggctttaccccatacacacagaagagcaacgacttccttgttaagagtctgaaaatctgggtgagagcctgtcagacccatggcctcagagagcaggaaaaatcctttgcaactgggaaggaaattcagaagacaaaaaaaaaaaaaaatgcaggggaatagggggcgggggctagtctttatacatttctttctttctttttttttttggagacggtgctcactctgtcacccaggctggagtgcagtgttaacaatcatggctcatggctcactgcaaactcaacctcccagctcaggcgatcctcacacctcagcctcctgagtaactgggactacaggcatgtgccactacacccagctaaccttttaatttttttgtagagacaggatctcactatgttgcccaggctggtctcaaactcctaggctcaagcgatctgccaaccttggcctcccaaaatgctaggattacaggaatgagccaccgcgcctggcctacatttcttaaatttatgttttaaggcctgactacagattacttgcctgttttattccatggaaaaagtcatgctggtccagggacattctcattttccatcaagtgatggcatgcagccgtagaaagcaacatcctgtccccagatgagataatttttttgtgataattttataataattgtatctatctggtaatttcctccccccgcctctccaaaaatacttagttgtggatagttttaagtgctatatcctgtcatcctagactaatacatcttaacgtttttagggaaattcctttttagggaattccttggaatcagtacgacctgcctccagaaaaatgttatgtctgtttctggaggcccatagacattttttttttttttgcctttttctccattgcccaggctgcagtatagtggcaccatcatagttcactgcagcctcaaactcctgggctttacacaatcctggcctcagcctctcaagtagctgggactacagcacacaccactatacccggctaatttttttgtacagagagggtctctctatgtcgcccaagctggtcttgaactcctgggctcaagcagtccttcagcctcggactcccaaagcactgggatcataaatgtgagccaccacgcccagcctgagctcacgctataaatgccccatattggtttttctccctcagtttccagacaacccctgctctgtcctgagtcccatatttctgccataagaagcaggttgcctcaccgttccccgggggctgcaatgggggcatcacaggggactttgtgaaaggcattagaaatgataaattccctagtgatcaagtgcagctcagatgggacagctggcctcccacccatccctctgactctcagcttaatcattgcctaaggagtggttttcactcggttaatttaatgagtgctctgtatttctagtacacacgaaaaatgcaactgtatgatcttccagccaggttgggcctcttggcttagcttttcccagagcttggtgcttcatctttgttcaggaagaaaggaggtctgtctctcttctccttccctccaaatgcagacggaaagtctcgtcctctgaggacttgcagaaaggaggaatgtctcaggagggatcatttggggagctgcactcccaaggagttgagaagcagcctggttgagtaactgggaaaggcaaagcagcctgacttggagaggggcccggattaatgtgattccagaggaggtcccggtagagagaagtttggggactactgacttggagaaaaatcagaaacccgggtcttaagagcccttcctcttcaatccttaagccaggcattgtgcctgagggaagaaatagtggctcttatgagctctgctagaaaagtaacccttcaggccaggcgcggtggctcacgcctataatcccagcattttgggaggccgagacaggcggatcacctgaggttgggagtttgagaccagcctggccaacatggaaaaaccccctctctactaaaaatgcaaaattagccagtcatggtggcaggtgcctgtaatcccagctacttgggaggctgaggcaggagaattgcttgaacctgggaggcggcggttgcagtgagctgaaatcgtgccattgcactccagcctgggcgacaagagtgaaactccatctcaaaaaaaaaaaaaaaagaaaagaaaagtaacccttcacagcttacccaatgcacatccaagtttccagtgacacctctgagcaggctaagcagctggtggctcctgccaagccctctcctcggaactgagcttcacagcttcaggtgccagtcccttgctgacactcccagtctaagctgtgtgttagtctccaagttcagaaacaacacaatacatgggtcataggagaagaacctcgactgaggctaaaaataccataaagttaatcaggcagttttattaattatgaatttattaattcaaaacctattcaaggattttagttttttttgtttgtttgtttgtttttgttcttttttttttgaggtggagtttcactcttgttgcccaggctggagtgtaatggtgcgatcgcagctcaccgcaacctccgcctcctgagttcaagccattctcctgcctcagcctcctgagtagttgggattacaggggtgtgccaccatgcccggctaatttttagtagagacggggtttctccatgttgatcaggccggtcttgaactcctgacctcaggtgatccacccgcctcagcctcccaaagtgctgggattacaggtgtgtagtttaatgtcttttaaacctaagttgattgaatgtagtatgataatacagtgtactgatttattaaaactctaaatgaaatgatcagcaaaatcatactatttgtgaactcatcattgctttttttgttgtttgttttgagacagagtctcgctctgtcacccaggctggagtgcagtggcgcaatcttggcatactgcaacctctgcctcccaggttcaagtgattctcccgcctcagcctcctgagtagctgcgactacaggcacatgccaccacgcccagctaatttttgtatttttagtagagatgggatttcatcatgttggccaggctggtctcacctcaggtgatccacccacctctgcctcccaaagtgctgggattataggcgtgagccaccgcaccgggctcgtcgtagcttttcaagtcaatagaaatctggtgtttgaatccacatcatgtcttcccttgtaggtgggcagttgcagtgtgtagtgtgcatgcacaccccagatttatgcccaactccactggatgttttctgggtggggagtcatccatacctccctcagcggccccgttcctagagacgggaggcccttcccactaagacatattcctcctgctctccatggtgcaatgtaaacatcttctttctcacaatgtgggactgtggatttaaatttattattgctaagctcagatgttttaaagcttcctgtctacaagcctgagaaaatctcttcatactctcctttcctcctctctagtcaaattgtagccctggctccctaagacacaaccctttagagacccagactgcaaatttctttttttttttttttttttttctgagatggagtctcattctgttgcccaggctggagtgtagtggcacaatctcggctcactgcaacctctgcctcctgggttcaagcgattctcatgcctcagcctcttgagtagctgggattacaggcatgtaccaccatgcccggctaatttttgtgtttttagtagagatggggttttgccacgttgaccaggctggtctcgaactgctgacctcaggtgatacgcccacctcggccttccaaagtgctgggattacaggcgtgagtcaccgcgcccagctgggactgctcatttcaaatagaaattagattatcttctaggatgaggagggacactttggccttctttgtcatgggaggctggcactctcctctaggaccctggggtgtgtcttgagagctcgtgcccagggctataacacagagaggcctgtgctgatgtcatcttgttcttctgccctttgctggcagggtggttctggggaagggcagaggctccgggtcccactctggggctgttttcacgggggatggaaggaccatggccactgaacgggctgcggtcccgtctatggacacaatgccaatgggcagctgcaacagtgcagccaaggggaaaggaggatgtgcgagttgccctggagagtcccttcccagagcgccgcctctgtccaccctgactatatgaccagtggaaccaagggtgtggctgaagctctcaggacaaaggccagggagaggaagcaccggctgttttttttagactctcttcgagcacccactacccccactgcccccaagcgaggccaggtgtaggtggcatctccagcccaggtggccatgcagctgccctgctgtcagggaggaggcgcgtctgcaagctgccttccttccggtgcagatgggctcccttgtggcctttaaagatcgaaaacaccactttgaaatgggattagatatgaatgggggggaaacaggcaaaagggaaaaaattctggcttcagaatagaagaaatggatcaaaaacacaaacagcttaacaaaataattgagaattggggctctgcagtcagaccattctgggttcaagttctaactctgccacttacttgccctgtgatctcagttgagcaacttttttttttttttttttttgagaaggagtctcgctctgttgccaggctggagtgcagtggcgtggtcttgggtcactgcaacctctgcctcctgggttcaagcgattgaacagcctcagcctcccaagtagctgggattacaggcacgcaccaccatgcctggctatttttttatatttttagtagagatggggtttcaccatgttggccaggctggtcttgaactcctgaccttgtgatcctcccgccttggcctcccaaagtgctgggattacaggcttgagccaccgtgcccggcccgagcaacttaacttttgtgccccagttttttcatctaaaaaatagaagacaatattacctctttggtgggcctattctgaaaactaaatagttctggagaagtgcttagggtggggttgtggaacatagatagcaaatatttgagtacttgctgctagtaattaggtgacctaatatgaagaaggagctcctggcagaggggtagggcaggttgataggttagacaagagtttggggatcttggcctcccttgctggcttggggtttgcaagatcccatgttggagcaggagggccgttccaccaagcggtgccggaagtgcttttagccgaccctgccactccaggcaccacctggcattgcttgaaaactgtcaaggaaggagcatctcccaccactcagggccacgcacgcacgtggcggccaactctgcagatggaatgagagcaagctgctgcaagtggctagagtgtgtcagcaagagtgtgtgcagtcatcgccagacagctcggcgaggcatacacaacggaaaacaaatgtgtggtattctggaatttaaagcaaaacatccaaaacaatcccccacatcagatgattttggttaagatcagaatgcctgctttcagtggaaaagggatttatgggctggccagtgtatgctacgcgtctggcaagcaggcagtggaaacttgaaatgggatttcttgtttagaaagaggttaccttgggctggggcctccctcccaatcagccccaacatcctaacgccagtacacttcactgaagcttttctcctctccagggcagaggaagggctccaggtttttaaatgatgctgactttgtccttgaaaggagggaagatttctcaactcgaacttgttcagaccaggtagctgcctaatttccagaaagatatgctgagaaaaagcttacggagttcctcatcctctgccacaccctggagaggggaccaagctgtctcccttctatcagggaggagacaggtcagcaagtaaccgatctctgcatggcatgtgctgtgcaccgtcagaggaagagtgctgacagctgggtcactcatgcctgctctgtgaccacgggcaagtcgctttacctctcggagcctgtttcttcatctctcacagggatgattctaactagctctcaggctctaaggcagcccactaagaatcagaaggggcagcagggccttgtagtgtaattctagtctcctccctgggaaacctctcatgcattgcattactgttgctcccacagggaatgttctcttgtaaagtaatggcctgcaccagcctgaggccaggctcgaacatttacacacaacgagccaggcatagcaaggtggtggcacccccaggctgtagctgtctagggccaccttcacccttccacccaggagccccccagctgcactagcacccctggaaagggaggccacagagtcagtaggcaggctaagcatgtgcttagggcaccaacaatgcaggcagctcaaggaatccagggaaataggcactttttttgagctttatcttacaagttcaactttttttatgttgaattgtatgggttgtggggtaggtaccataatcatctcagtgtctagagcactaaatggccacagaaggcagaagttggcctccccagggacccagcttgtcatggaatgttgggtttaagtgtatgtgtggacccctctccccagcctgcccttatggtataaaagagtgacatataatagcaggggccatttatgacccagggacattgctggggttggggggagtgggccaggagcgggcaaggagttgtcttgatagaaacgctgattcccgtggggagacagcaaattagtcactctccttaagccttactttccttatctgtgtaatgaaggtaataacacaaccagcgtcttacgattgttactgggactaaggggatatttaatgtaaagctattatatgggcctggctcacaggcagagcttctgtgttagcttctgctgctgttgctgtagttgctgctactggtacctctccttaacatttttcacagattgaggttgtctaagtgttcacattcatccatatcttctcacttcagttcatgaaaccacatcacacaagatcagtcaatgctgaaatttacctccagtctttctccctctcgaacacgaattggaggacgtatctttccacctgtctataaaacactcatttctgagacttccccagtttggggaagacggataaagaagggaatcagttttgcactttgctggaagcgcctgtaagaatgccccattggcagagactcgctttgtggagctcaacttggaaattaatttacaatggaaattgaaggaaaatctacttcatgtccacaccaagaagggtggcctcaatgcctctccttcagttcactccttgtgccttccaaaaggaagttgattcttcgtatgtagaattttctggacacctagaacacccacacccagaaaccaggtcccagagagatgcagagccacggtcaccattgcttgtgtagacaccaggggtaggaagtggaaggaaggtagcgcctgagggtgcagcttcccagggaccaccacctctcccagcctcaatggcgggagagaacaaacccaagggagaagctacgggccagcatcttccctccctccctcttggcccccaccagggctagggtcaacaccccaaattgaaagcatctgttgtcaagctgcagcaggcagggaaaccctgtcaccaggttaaggcttaagtcagagcattttgccaaattcaacacgtccaagcctcccacttgtcccccaagaaaatttctcagggattcacatctttcccagtcaccccctggccagtgaggaagcaccgtgcatcgagaagagcatagctttgagtcgtctatgtggagctggttccatctgagctctgcctcttcctggctgtgtctttttgagtcagttgcttaaaatctctgagcctgattcatccataaaatgagggtgatgagaggattcagtgagagactgtacataaaccacctcctgtaatgtgtcgggggcgtgggtccttgtacatagtaacttctactgttaaattgctactgtggtgttattttccctaagctagacaacctgcaacttgaccattagcctcttttttttttttttttttttttttgagatggggtctctgtcacccaggctggagtgcagtggcgcagtgtcaactcactgcagccttgacctcctggatttaagccatcctccttcctcagccccccaagtagctggaactacaggcgtgtgccaccattcccagctaagtttttgtattttttagtagagactgggttttaccatattgcccaggctggtctccaactcctgagctcaagcattccgcccccctctcagcctcccaaagtgctaggtcaggtcagaggcctgaccatcagcctctgagtgtattcttttaaaaaattgtttttctagagttcggggaggtttgaggagaagtccagtctcatgcataacagcgagctggcctagggagcacagccggctgcagaattcaggggggaggttcttaccaggagtgccctgctgcaggttgtgggagcctctcacgggcccactgagtcaccagggcctgttaccagaggagagttcacgcaggcagggcctgggtggtggatgtgcatttgggagccaaacgcaggttccaacttgagccctttaccatgacttcctggctcagtgggttcagcacagagttgtccagccgttctctctcctttcttacctcttcctgccttcccacctctctgcatcctcacccttaatggtcacaatgccgcatttccagggtgaccccaggttccctccccgtggctcacagtgctggtcaaagcatttgagcccccaaatgccccactctccagatcggagtgtaaagtagtaggtgccagtcctgctccctcgtggggctgggcagtgagctctccctaacacacacaaagcacctccagctcagaggaagctcacacctcccatccatgccttcaggcttttcggcactggcatttagaaagctattctctggattcagaacccccagagagagcttttctctgtccttcctgattattggtgtgtaaatgaaggcctagagtagtggttcttaaacttgagcgtgatgagagtcacctggggaggtgttggaaaacagagtgccggcccagtcccactccagtttcactgagtgagtctaggagggaactgcgaatttgcatgtccaggttcctgggtcatcctgctgctggtctggggtcatttcgagagctgctggactggcatagagaagagtttcctgggttgcctttgaagataagaatttctgaaggtttgagcactgccttcagacagtggctcggtagaagtcccaagagcagaagttgtctggagaggagagatggcccccaggatgcgcctgaccaaccagtcatacctacaaaagggagttctggttctctagggctgtgatctctggggcttttcaacttggctgtagtaaaactaaagttagtaatatgccctgttgtcatctagaaattccgccatgagctattacagtagtttagttgggacgcttaaggagagcaagtcgtggcaatttcttctgctgattacagcggagttttggttttcttgttcccggtgtttactgtgtggtggagctggataagggagcaccccaaagcctctagtcctgcccaagtggctttgcccttccaaagacaacagccccagccttcatttggaggtgggagaggaggacacagagagggttggaggaggctgtgggcatcgggatcctgtttgttcttgctggcactgcctggcccggcttcctgaggagtgaatcagcccatccaaggcttggcatgcagtagtgagccaagggttgccatggagatgggcgaggcccagagcccacaggtctgggtggcctgacttgtttttaaatgttgaagtctgtgcgaagagggagggcctatctccacttctgtggctttcttaaagcgtgactggtattttggggcctggaaaactgctggtgtgggaaacttgcatccccagtatttggtgtgttgcttacttcctgggtgctatggacaactatgactaatgctctcccaagtttagtagatgacaaaaacaaaaaccagggctgacaagcatcttattgaaggagggtgataaagaggccaaggtttcctctcctgcccaacccaggaaaatcccctctctctctgttatctgctgctgtaataactcctttcagcagggttaatttgcccacggaagcagtttgtgatccaaggaaggacagaagcctaaaatctgagccaacagtctccctttagccttccttccccactttcctttggccattcccatccagtcttagtggagctctggatggcagtttgcaggtgtgaagcagataagtttatccattttcctccactacccagcgctcacacagactcccacagaaaccaggaaacagaaccccagtgtcctaaattcccccgctgccacccagccgccttctccgatcacaggaggacacaacagccgtccacagagggcccatgaattgacccagtgtcacctcacgtctttctcagggtttattattattgtcattttttttccctatggaatccggctggctgtaacacttcacagttttcagaatgttttacatgcatcactttatttaatcctctccttcaacctacgttgaaggcaggacaggtatcatactgttttttttccacaaacgaggactgtaacgttcagagaagctgaggaaagtgtgtagtgtcagagagctcctaggtagcagtgccagaattagagcccaagtttatatccatcacagtccagtcattctcaacagaggcgtgcaatagaatccctgggagcacaaagagtcccctgggattgctgaggcaggtgcatgtttagaaatcccccaggtaggctgggtgccatggctcacacctgtaatcccaagctttgggaggccaaggtgggtggattgcttgagctcaggagttcaagaccagcctgagcaacacggtgaaaccctgtctctacaaaaaaaataagaaaaaaaaaaattagccatgtatggtggcttccacctgtggtgccagctacttgagagactgaagtaggaggatcgcttgagcccgggaagcagaggttgcagtgagccaagattgtgccactgtactccagcctgggtgacagattgagacctgtctcaaaaaaacaagtattttcccagatgattctgatgcccaccccataaagaagcaggccctaggtggcacagctgtgcaggcagcagctcactattctttctattaagccacctgtcccttgttgaaaattgtgtatcattttgaccatgggctcagcagagtaaccaagtagccattgcttttccaggaggacaatgggaagttgggaagaaagttctccctccttcctggactccatccactcaccactgcccacctccaacccctcccaaagtggtagatatggccacctcaaggccaaggcatcctcagcgagaaatcactgtgagcaatgatctgctctccactttctgggctttccaaggcagctgaatagaggaagcataacaaatattttgtcctttttaaaaaatgggctgggtacagtggctcatgcttgtaatcccagcactttgagaggccaagctgggtggatctcctgagcccaggagttcgagaccagcctggacaacatggggaaacttcatctctacaaataatttttaaaaattagctgggcgtggtggtgcacacctgtagtcccagctactcaggaggctgaggtgggaggatcatctgagcctagagaggtcgaggctgcagtgagccatggtcataccactgcactccagcctgggtgacagagtgagaccctgtctcaaaaaaaaaaaagtgtatggccagtcagtacatattacagaagatgggacctggaggaaaagggggcccacgccaagagcacccagtttgtttgaccacaaaggatttttctttgcagtaggatttgtcccataggcaaacttggcttctcccacccggggagtggcatgcagtatgccctcccccacactgaaaccacgttcaacccactgctcttttcctcttcctctgggttacctcctctttttcagcacacctacttcaagaatttccatcaggaggccaggctgtacatacgaacctccccaggttctaactggaactggttttgcacacttggcatagagtccccagagcagccaggtgcccctaagctccgttacactttgatgttttttgtttaatcctcctttgaaattggaaatgtttcctgtaactccaggtgtgtgtttcagtgtaagatttctgaacctgtccctgcagcaagattttgcagtgtgagtcactgaaattctcatctttgcgtgggagccttgggtgaattgtgctctcagtggtgagtgggtgtggcaagggatgaccaggacaccattcactgtgggcctgagtttggggcactcttgggttctcatgtctcctgaggctcacataagccccaggtgaccagcttacctgtgttcgtcaaacataagagtgtttgactggacttctttgagggatgggggtgctggcagagttgcagataaagaccgaggacagcaatgcatgggttgtttttttgttgtttttatttttggagatggagtctcgctgtgtcacccaggctggagtgcagtggctcaatctccgctcattgcaacctctggctcccgggttcaagtgattctcctgcctcagcctcccaagtaattgggactacaggcacacaccaccacgcccggctaatttttgtagttttagtagagacggggtttcaccatgttggccaggctggtctcaaactcctgacctcaagtgatccgcctgccttggcctcccaaagtgctgggattacaggcatgagccaccgcacccggcctgcatgggctttttgtaaacttggttttccaaagtctgtataaggatttgcctgtaagtcacattgggacatgcttcaccaacagaaagggaaattgttgtcattccccaaatattccccaaccaaccttaatggggcttccttagtatttactctgggcaaataattgttctttgtggtttcttttttttttcttttgagatggagtcttgctctgtcgcccaggctggagtacagtggcgtgatctcggctcactgcaagctccgcctcccgggttcactccattctcctgcctcagcctcccaagtagctggtactacaggcacccgccaccacgcccggctaattttttgtatttttagtagagacagggtttcatcatgttagccaggatggtctccatctcctgacctcatgatccgcccgcctcggcctcccaaagtgctgggatgacaggcaagagccactgcgcctggcctctttgtggtttctgactcttgtgagacatttgaagatggatctggataaaaggcctgatgggaaaggaagctggtccaaatgaagaggacacaggagaggagatctgggtggatttcaaatactttttcactgaagtagtcattcatttatggagtaattacttactaatgaccatccgtccaaagcatggatggggcaaaggagataaaagaatgactcagaggtcccctggacctcaaggagcttgtgctctgctgagatgggaggcaaaccccagatagaggaagggcagagagtgtggagcatggatgctggagaggacaggatggatgcgacactggcctgctcacgtgcttggcttgctcaggggttgcatttgccatttgcatgggaggaatgggaggaaatgggtggggaagcagcaggcttggcttaggcgatcacgacagcattctaagagggacttgtactagcagaggcacaatgcacgaggctgaactcgggaaacttggagagattgcatctaaggagcagacaaggaggaggcagggttcagtggtgtcagctgctgtgggatcccaagacataaggattcagcaaaagtcttaagactcaccacccctttcgggttgggagagatgcagtgacgagccagtgaggacttggaggtggttaagacgccagctcaggggtgaaaggaaagcagagagcaccctgaaggagctgcgaggttgaagaaaaaaagggttctatttctggttttcttctgtttggatttttaggttagggagacctgtctgtgtcttcgcaaaggtcaaaaaagtggcagaggcagacctgcatagtcaggaaagaggttaattagtggagcaggttcttgaaggagacaggaagctttgaaagagagagacccctgcttctttattattgttttatacactttgttttagaataattttagatctacagaaaagttgcagagatagtgtagagaattccctcatcctcctccccagtttcccctattgtaccatctcatattactgtgtttcatttgtcacaactaggaaaccaccgttggtacattctgttaactgagctctggacttagtcggatttcactagtttttcatgtaacgtcctatttctgttccagggtcctatccaggacaccacaggacagttgtcatgccccctcagtcttctctgggctgtgacagtttctgtctttccttgttttccatgaccttgacagtttggagagaagtgctaggcaagtattttgtagactgtgctcagttgaggtttggctcatgtttttctcagggcctagcaccagtgaagaaacgaagaaatttccagtaaaacaatgggaaaaaatgacccttttcctctcggccctctcaaagggatggaaccattttttggccagatagcaaaggagcttttcccagcaaaaccagaatgtttccatttggcttttcttggaaacaaaagaggaaaccatgggcagggccgcgagctgggagtagaagctatgggctctctcctgcatccccgcatccccgcccgaccagctgggcatactacaggttgccatcctctctccagagccctgggaacagggcactgtctcattcagcatccgcatcaaacctgctctgctcctgggatgataggctggggtggggcagccatcgaagaaattacatggtcagcatgccgccatatgtctgttaattaacctgggtggaagccatcgaccccttggcctcccggactcctatattctcatttatggagtccctgaataattgacttggcaccctcttttaagggttaaagctctctttttttcttgctcctggcccctcccatttagtttctcctattattaaagtagctgaagctgggcgcagtggctcacacctgtaatccaagtgctttgggaggctgaggcaggaggattgcttgaggccaggaatttaagaccagcctgagcaacatagcgagacccctggctctacaaaaaaaaaaaaaaaaaaaagggtttaaaatattagccaggattagcggcatgcacctgtaatcccagctactcaggaggctgaggtggaagaatggcttgagcccaggagtccaaggctacagtgagctatgattgcaccactgcactccagcctgggtgacgagagcaagaccctgtctcaaaaaataaagcagctggggtgaaagccggatggggacaggggagcccctctatgccacaccagaaagtgagttctcctagaaaatacttcagagcgccttagatagcgctgcctgacaaccatgaaaggcattattgggtggcactggttatacaagttttgtgaccctgtgaccccaagccattgtgactcagccaactggagcaatgtctccaacagcgttacagaaaatggggcagctgatggttcacatagcatcccccccggccggtgaactcagtcattctgtcagaaaaggcagcagggttcactcctgatttttgtccaagtgttcccagtcatgcccctggccctcccttttctctgggttacttgaacctttctcctctcttattgtgagttgttaagcctgtgagaccgagacctatggcagcttttcccatttctccagagccagctgcttttccttcctggttgtagtgaaatgttgtagctttgacaaccaagccgcatgatgtaaggtttaaggtggggtccgaatgcgggggactcccgactccgggcttggcctggcccttggccaagataagagacctgagatgcttccttttccctcgtggttccagttctccagcccagcatccttcttaccacctgtgcacagagaccggatcaatgactggacttaacatattggctcagggtcctcgacattggggctctctataagatggaaggggccttacccctggaggttccactggggtaccctgtcattatctgagcgtggaacattcccagagagacgcagctcctgctcgtgagaggctgctgtgcagagcgtagctttacctcatcttacagcttagttccttggcagacctgggattgttttcgttcttttctgcgactcagttttcccagcagataaggggtggggtcataacttcactcatcaggggaagtaagatgacttgggagataattgcttgataagcacaagcctagagcaaaaaggacagtaatgagcactgtctcgctatctccctatgcgcgcaagagcatcacaagaccagggcgagagggaggaccagggtgagaaacaggttgtggctaaacgtggaccaaaattgagcaccggcctacagttttcaggttaacgcttttatgtccaggaggccagcagcttcagtcttccattcccaggggactgactgggcctccctggggttggggtggaaggagggaaggtatcacctttgtacttttttttttttttttttgagagggagtctcgctctgtcgcccaggctggagtgcagtggcgcaatctccgctcactgcaagctccgcctcccgggctcacgccattctcctgcctcagcctctggagtagctgggactacaggcgcccgccaccacgcctggagaattttttgtatttttagtggagacggggtttcactgtgttagccaggatggtctcgatctcctgacctcgtgatccacccgcctcagccttccaaagagctgggattacaggcgtgagccactgcacccagcccacctttgtacttttaatgctcagggacctggggggggacccaggccaggacttgccatgtacagagtcaagaccgcccagtgtgtgcttgtctagtcccttgtgtacgtggattcaagccacataactcttctagcccagcacgctcccagcagggcccgcctccccgcctaagctaactgcggtgctcttggtcggggaacccatggtctgaatgcgagtaccctgctgggtccaggacggtggagactcacgcttctccccaaccaaacagtgatctgcttgctgcctttggattaggccaggagaccctccctcactggccttttattaagaaagaaaatcagactcgtctttgaactcagaactctcaagttcatttgaactctcaaattcttgtgcctgtgtgagtttttctcctctgccttgtccagccgcggggcatgtggcgtcgtacagtccttaccaatgtttggagctgcctgccctaaggtgcggctgagaggctgagaagatgctgagtgacagtccacaggctgggagtgcagggctggtggggcttcatgctggtaaagtgaggtggttctcccagagcccatttggtaccttcctcttcagatgcacttctgatattatcttctttattctttagccatacctaaaaggcagggaagggccgcatctcacaatccctgctttacagatgggaacactgaagcaatagaatatgaagctagactctgcagcccctcgtggtggaagcacacctccctggcaggagcaaatccccttatgctcctggggggtaggtgagtttgtgactgctgcaggcggaggtctgggtggcccttcccactattgccacatctgctgtccacccaacatgcccacactcactgccatatcgtaagggaaaggagaggaggaaaggaggaaggaaagagaggcctgtccacaccatgggctatcaatagctcctggagccgagaaccaaggtccctgatgagcgggctctgacataagagtgcctctgttgaggagggtggaccagcaaaacctgggcccacccactcctgcgtccagccggctaccacactggaggcctgtgagtcactcccccggcaagccctggtacgggtgacgacgagggagctcagctggcactggggggacttggcaggaggcctcctgcacagcatctagttcagcagtgccagcgaggggaggccctggcatgtcatttactgagcagcaggtctccagggacattgcagctgccctccctggtgcatgtgtgtccggaactgtgtaaccatcacccaagtcaacagttagaatacgacacccccagccacatggcacctccctgagcataatttcctcctccacctaaacatcaccactcacctgataacaatgcttttcctttatcatttataggcacatgtaagcgtctagctctgtgtgcatccctaaacagcatagcgtttttaactacatggaatcatattgtgtgtgtgcctgtggctctggcttcttggtttagcattgtgagatgcactcatggtgttgcgtgtagctagagttactcgttttcactgctgtatagtgttctgttgcctataaaataccccttcagccaatgggcggcaggtaggtcactgtttattcctcgcttgctggtatttttagtacctgcatgaatcaaacacaccccgtaatggcatctacaactaccaggcgtatatgaggggcagagaccaagggtggtcacaaagtcctttgcaagtctcacccttaagcgcgtggggactgtgttgttgctggcagccagaattaatgctgatgtcctgtatgtcttgcagcttgccgggattgctgtccttgccattggactatggctccgattcgactctcagaccaagagcatcttcgagcaagaaactaataataataattccagcttctacacaggtgagggacggggaaggctcagtgaattcagaccctggctccaacaaagttcctgcaactttggaggccccatgttgacccagggacttgggcttgggaaagacttttgctctagccacgctggccagtcgtgtccctttcaagttgtgcagtttttgtgtgtgtcgttgtgcctgggaatttgcgtttaactgatgtggtttcttttcctgatggccaagtcaggcatgttgatggttctctgatgtgatgtagcctctgccaaagttgtactcattcttgagggtttacgaacctctgttctcatctctgatgctctctcctgattgtcttcttatcctgcatcatttccttaattcaaaaagctttgtcctggggatctgcagtgctggaagaagatatagacagctttcctcttcactgttcagatagggactctgagactgggaaaaacatcagcctcctggaaaacacagcaacaataggagagactagaatggactctgcccagtcctttggacccctggtactggggtaaatgctgtagtgtttagttttatttgtttgtatttgacacgacttttgctttgggagagaggcttccagtttaaacctgcctgggatcctctgaacatgaacagacttggcaggtttctttctacactcaggcttcttggcagccttgctagaccattctatccctctcgttgccgtatcaccacgtcaaagctcccttcagaggagggggagcctggtgcctgccaagtgcagttgcccgcgtctgcgtgaattcagactctgcggctgtactctgcctggcttggaggtaggaaacttttcatttgtgaggaacaaaggaaacctcctatttttaggatgacgctgacatgttgtcaggctcaaaatgtaagtttggtcacttccttcccacccaccaaaaaagttatttttacaaacgagggagaaaacagttatctcccagtccctcagggagaagcaaggctggccagccacgtagaccttccctttcccacctcttgaactgggtagggagagtctttaaaaacagctcctttggttgcgtaacatttgagccctgtggatagttttgctgggtttactgctttttattgttagctggggttttttggggtgtgtctctctattatcggaaagaaagtgagagaaagcacaatgtatgtttagaaaaaaaactacacatacacacagagtttttggggaacaggtttctatagcgccctgacttgttttggcaacagaccattttttgggagtctgtgacaggcttagaatgctgtcctgcagagcaggagggaggagccgggtgcgggtgctggggaagactctccacactccacgccgtgttccagaagggagccctgtgctgggggagcaggtctgccggcaggagcaggcacagtcaggcctgctttcctaagcaaaagccctgtggccggcgcgtgtgtctccaaagagagactcagtcctcccttgtcctggctgcttctaacaacccactttttcttttctgttacccaaagcctctatggctgattctttatatttttagatgtgggagttaagaatctcatgggtaagaggatggaactgggaggaagacactaacatttttattttttattttttttattttttttttgagacgaagtttcaatcttgttgcccaggctggagtgcaatgacacaatctcggctcaccgcaacctctgcctcccaggttcaagcgattctcctgcctcagcctcctgagtagctgggattacaggcatgtgccaccatgcccagctgattttgtatttttagtacagacggggtttctccatgttggtcaggctcgtctccaactcccgacctcaggtgatcctcccgtcttggcttcccgaagtgatgggatgacaggcgtgagccacctcgcccggctggaagacactaacatttttgagcccccttctttgtgtgtcattcattgtcttgtgtgtattatataatttaatccccttagctctacgaggagtgtggagtgattctcatctcacaagtgcagaaaccgaggcctagagagctgaaataacttgtctaagcttatattccctcaagaggcagggccaggttttgaacccaggcctaaaagagctgcttctcgggttgtcattgccaggttgtggggtctccctctgtaggaatggaagaggtctgtactggctgaatgtgccccattggcagggatggggtggcgctgtcttggcccttttacttcacccaaattgcagtcagggagagaaacccctgcgtcggtggcccagccagcagctgacaggtgggaaagctgcagggtggcaggagaatggtgagtgccattagaggagctggggctcacctctgggaacctcacaggattcagatcctgcaggtcattgcagggccctgctggtggccggtggtcctacctgaagtgaccaggagggtgatttgaaggcacaaccccaaagagacacagatcccctagttggggtctaagggccactgtccacttagctctgccagggaaatacagatcctttgcagcgacaccccattcggggaagagagcggagctttgaagacttcgttctgcctgcagaagcgccggcaagggggatgatgcacggtaaagttagaacagcagcactgtgtctgggcacagtgatcagccctgatctcaggtgatccgtccgcctcagcctctagcactttgggaggccgaggcaggcagatcacccgaggtcaggagttcgacaccagcctggccaacatggcaaaaccccacttctactaaaaatacaaaaattagctgggcgtagtggcgtgcacctataatcccagctactcgggaggctgaggcacaagaatctcttgaacctgggaggcagaggttgcagagagctgagatcacaccactgaggctctgtctccagcctgggagacagagcgggactccatctcaaaaaaaaaaaaaaaaaaaaaaacagcagcacagcactctgagcactgcttaggtctgagctatgccctgaacgtcactgaacgctttaggaaataataattgtcgtccatgggcaaagggccaaggaggcgtcgctctgtgtccccttccccacgaggctgtgagaccagccttctgtactggcccagagcccttctcctagcagatgagcttggagtgccagccacaccctggctacttttccaagggatagtcatggggtgaccgccccttgcactgggccaccaactgtctgcagagcaacccacaggccagcctgaccatgcagctgacttttcaggaaacctgaacagcccaggggtgtcttttctccagtggggccacagcttaccaagtagagaaagagtatataaccaggcagaaaagcaagtgaaaacctttccaacattcagaacagtctatggtaagtccagagcagctgacagccttatatgggccttctctccaatccaggcctggagattcagcccgtcagcaagatccctaatcccaggctgcaaacttgttggggaacttcattttcttggtcctaggccagcagcctttcccagctccctggtgtccctccagaaccatggctgctgaatgagggcatctaggggggctccagccagaggccgtgaatgcccccccttcctcggccagccccctatccatgatgaggtgcctggtgattttcaggacacgcgacacttggccttagtaagctggcatccccatcctggcttgtgacctggggcagttcattttattgctctgggcttcatttttctccctcctgaaaccagcacagcttacacaaccacagcacagcttacacacccactcccctctggggcaaagaagtacagtgtgtggcaaatggaattccattgtggcacttattcccgtgaactcgggagggcgggaaccaagacgaaaccagtcggggcagaggtagggctcctttgaacacctggtggagttatttggatataataaacttttattgcaggccagaggccctaccggattttgttctccttcacacaaacgggcgtggtgagtgctgtttgcaggacagagctggtgtagggacgggagcctgctgtgtcctcctctccctgggctaaactgagagccctggtgaacagtgaaaaacactgttccatttcttgtgtaaaggacacgctggcatatgctactgctgctacaccagcctttcttttttttttttttttctgggcctgtaatgtcagcctgaaaaaagcagaataaacaacccttaagcaaattaataccgtaatcctagagaaggctctgtgatggataactttttccatgagtcagacagcaagctaacattcgcttgttttataaaggggaacactttgtcatttatcaacagcagccttggctaacaagcttggggtgtaagcgatgagtagcttctccaaagggaagcactgaatagcccttgtaaaaaccagcccgagccctgcagtggttccgtgacttccatggggcctgcttccagatgagctgtcctgtagcttgccggctgctgctgagtccccgaacacagctgccaggggatcgcttcccttttcccgtgactagagagggctaaagctaggcactgcagatccgtagccatccacgcaagatttaaagcccacaaaacccgtgatcctaaaatcttcctctgctgagccctagcatgaatatttaatattaaccacaagccccattaggagcatgttctctttctctgcgtgggaaatactttctctttagtagctcacttgcagctaatccaattcccttggcctctgccaggaccgccaggttcaagaactgggatctggacttagagaaaacatgtctgcctgttcgttcccactccacggtatttcatgtgtttgtaaatccttttgatctcttaatacctcctgtttattcagcccctgctatggagctcaaaggagtgacctcatccttccttgacttgcccccattagatggggagaaactggggcctttctactgtccccatgtgagagaaccaaaggaggctgccctcttacccagtgccccatgcgtggggctgcacagcctccccaagcccagcttgtggcctcaacagcgtttgactgcccaggaagatgcgacctgacttgaggacaagctacatttgtccccttgcccagtgtgggccaggcatgcacaagaacaatacccatattcttgcaacatggggtttgccagtaaccccacgtgacttgacctcacgacggatgtgggggagaagggggaggaacaaacgctctctgtgtgcattctgctctgtgctgcccgtgagcctcagctgcgggcagactgcatggtttgttgcctgcaaagtctcacccctgctcggggtgcagatgtgggacagtgaagtcagcgtgtcacctgccgagggttctcatcgagtgtcctgctgtgtattgtggggaaacatcacagactttctctctcgcgtgcgtgttttcagcccctacatcaaggatatctctctggtcccagtgaaaggacagtagggatacagcagcaggttaaaattcaccatggtgattattaatgattgttactcatgcttggtataattgagattaacaacagctagcatttgttgtgcacatgtggattatatcacttaatcctcacagcaatcctggaagtgggcattattgctactcctgttttacagatagaaaactgttgcacagagaggttaagtggcttccccagagtcacagatctggtgctctcgacatgtgacagtagcctctcccaaggctagatagaacatgcctgcaagacagggaggcacagagactttgctgctggttttcctttgggacccatgtagggctggggtgctgattaagggaatagtccctgcaggacagctgtggcttctcaagaatagaactgtggggtggcccctctgggcattcctttggtgggttgtggaacgaatggggccagtgctgctctactgtttgtgtcccaggaatttgcattgttctgggtttgggcaaaagttatagaagttgctgcccttctctcacctcctttccatgagccactcagatcaagggcttagtaatggtgtcactcatcctctccttagcaaggaggagcctcttcacccttaacctgcaataactgagttatgactgttaagatcttgttagcatgctatagagatcttttgaaatttccaggaacatacctctttaattttactagtaaggaaattgaggcccagagagggaaaatgtcttaccccaggtcacacagcaattagcatcagtgttagggccaaaagaagggtcttctgacacccagatctgtgtcctttgcactagagtcaggtattggacctttgccaagaggtgcctttgggtgttcctaactgtatgtgcctaaccaccacccagcaacagggcaaagaggcccgccttctgggaacaggcagagttggttccccccacccctgggtaggggggtgcctaggtgtgcacggccccttcctgctggaaatctgctctgacagcgtcctctgtaaggcagggtcccagaagttagccagagtgtggaaggtatatgctaactagcttgagtggattcatcttgctggaaagagctgacagactggaccagtttgcattccgaatgtagggattcccatggatattctctgtcctggattgagggctaatgggcaccttccagaagggctgagggtaaggtaggagcgtgagcttgatgaagcagagtcatgcaagagaggctggtgggaaggagacctggggcagaggtggaagaggaggctgtattttaaggaaagggaacttcttccctgagatgaggggaataaggaggtggggaggcaggagttaggcagagggaaacaggaattgccggagatgcctgggcctctgaactgatgtctccacgcgtgtgtgcttcctctgtcctcccgcaggagtctatattctgatcggagccggcgccctcatgatgctggtgggcttcctgggctgctgcggggctgtgcaggagtcccagtgcatgctgggactggtgagtatcccctcggcatccccacagccaccctgactcccaccaacaaaaacctcagcaggcccagacccagaccacagaacagatggagggggatggggtcaggaaggtacccaaagggcatgagctgtcctcagcctgggcccctccccgatgtgaggcgtcgcccctcttcctttctggagcctgtcttatcgcttcccctaggcaactaaaaggactatgtttcccccttttctcgaggaccacgtttgctttttttccctgaatccacaggtacctttgccttctccttcttgtttcaaaatctgttttggtcttttccgaactccacggagtggattcgctccctttacttgcccaaatctcttgtcttttgtgaacaatagtagttgcctgctcactgactcttaactaacgccttgtaaatgctagttctgggctcagctgtgctcagctctttcctcatgtccgggcaccttgcctcactgtggcctctgtcctgggcttggttaactgcctgttctgtgaacttcttccctgcccctgctaggctattcatttgtgtcaccagatgcctgttcccagggagttgtccttcttccttgtcccaaaataccctttgattttcctggctggttggctgggactgttctcaccccgtcccctcgttgccttccagttcttcggcttcctcttggtgatattcgccattgaaatagctgcggccatctggggatattcccacaaggatgaggtaggtttttcccatgagatctcttgggtttgggagttgggggatgggggacagtgaagcagggggcaagtcctggctgggcactttgttcagctttcagctgttgaccaggcctcttatctcatcgcgtccctgtgtgccagcgaatgtgccctcctcggggcagggaatgtcagtgcgcttactgtcctgtccgagattgtgccagccatggtgttgactcatagtagatgttcagaaactacccattgggcctgtgcgtgtgtctgtctgtccatctcacacctcagcagcccttccccacaacttttagaaagattactcaggaaatacaggctttctgtgggctggacacccttgcctcctcctctgatctataaataacatgttcaagtgctgcccccatgagccaagtgctgcccccaagcctgtgcagggtccacagatgtttgaactatgggccccacatccggagacttggccatctagtatggggaaaagacatgaaattgataagggtcatagaggtgatttatatccaaagtactatgggatttgaaaaggtggggctgggaagggaatctcttttggcttcatagagaagggagccgtgacctaaaccttgaatgagagatgcgttcaggaggaaagttagtggaggcaggggacttccagtcaaaggggctgagcatggctgagcttgggcttacgtggggagccctgcagagttttggaccaggatgggccatatcagagtagtgtttttggaagggctgccttgtcatgttcagcaggaagggggaaggaagagagatgctgagatgctggaggcaggaaccctattgttttgttttgttcttgagactagtcaagcgcggtagtgagaaacagggaagagtagaacaaggacttccatctgtaactgacgtgagcaatccattgagataactcactacttttagcccagccaagggaactctgtttaaaaaaaaaaaaaaaacatgtctgtaagcaataacagctacagccatagaaataggaggggatcattgtgaaaaatgtcagacagatgctgaaggaaaaatgctggctgttggtctgttaactggatgtggtgagcatcaaaggggcagacagacattaaattgggatgcgccaggcgcaggcacataataatacatcccctatattatgatacaatagctggcacgtgctccagatttactctgtactggacatagtggtaaaggcttaacatgcaatatttcatttaaattctcacaaataatctatgagctgtagggacaaatgtggaaactccatacagagaggcttagtaatttgccaaaactcatacctaagtgaagagaaaaacaagatggaagcctgagaaaatagtcaggtcaggagtagtatttcaattattatcatcctctagatcatagagattcaatttaggagccaagttaggagccaagtagagctgaaggactgaccaaagtgtaagggacagggagaaacggcccgagtgggtttctggaggatgtgggaggagatgggaagtgcccaaaggccctgagagaaggcagtgctagcagctgccatctgcccagtgacgttgtccaagcacaggcatctggtggctgagagcttagagagaacaagatggaacgcataacatttgttcgtggaggaagatgtgaaaatgccgtctctgcccctctctcgtctgcccattgtaggtgattaaggaagtccaggagttttacaaggacacctacaacaagctgaaaaccaaggatgagccccagcgggaaacgctgaaagccatccactatgcggtatgtcgccttggcaaagacaccctcctgcgctttctccggattgtgtctgcacacagggtgctgactgcaccagaccagtgcaaacattctaatcgtcttcttaaaatttgtttctctcatccccatccctgccttctcgctgtagttgaactgctgtggtttggctgggggcgtggaacagtttatctcagacatctgccccaagaaggacgtactcgaaaccttcaccgtgaaggtaaactcagaccaggatcctggtgtccctgcccccattgctctggacaaaccctgcaagcatgaaagtgacagcagccaagtgctgcttcagcaagacccgttctgcctgtgaaagggccccagggcacccatctctttctctcccactttgggccctctgtttactcaagggcaataaaacaaaggccggaccaggggaatgacaagtgttctggcaccgcccactgctgccagcccggaagctctcaagggcaggcgtgcttctgagtcttggactcccactctgactttgtcagtggctcctgtctgtaagccagagttaatgtccaactccagaatagtaaaaagtgaccttacaaccatgtcagaaatagacccccaagcagggcctgtccctcctccttccctgacgtcctgcccagattttagggatccactagcatagccatccctttgttcccctttccatccaccagccagaacttctcttatccccgaacactcctgtccccagcccaccctctgcccaccagttctcccgggtgagacgggggccatgggagggaggaggtgccctgggaggaaggattgtgtgtgacccaggtcttggtttgtctccccaagtcctgtcctgatgccatcaaagaggtcttcgacaataaattccacatcatcggcgcagtgggcatcggcattgccgtggtcatggtgagtggcaggacgtcgtcccaggagggggactgaggagttcacattgattcagcccatgctctacccagacaccgccgcactctgtgcatttgtcaactcactttgtcctcgtgcccttagtatttccattttaccactagggaatggagagacagagaggccgatgttctgatcaaagcctctcacctcctgagtggagtatctgaggctccccctgggcttctaaagagtcgactctcttagccgttaaggttcagggcacatgggtggcagtgctggcactgctagtcctcggagcatgtctcctcacgcacctgctgttcttctccctaagaaagtcgttcactagaggctaccggcgtgggaattgttccatttcctgaagtgcatctgaacatgggcagccagaaggaggtctctcgctaatcagcccctagaaaccaacaagggccaaccaggttccttggggtcatgtcctctcttcccatgagggacagccccagacggaacatggtcctcgctgggatggccttggctcactgagtcttcccccacccccgcctgcctctgccctcttgccagactgcccccaaagagagaatcgcctcctttcttagtggttatttgcacccttcaccggcatcttaagaaaggcatgaagcacctttcagcaaaatatacgacaataccttcttttttttctttttttctttttttgagacgaagtttcactcttgtcgcccaggctggagtgcagtggtgtgatctcgactcactgcaacctccgcctctctgggttcaagcaattatccagcctcagcctcccgagtagctgggactacaggcgtgtgccaccatgcccagctgattatttttagtagagatggggtttcaccatgttggtcaggctggtctcgaactcctgacctcaggtaatctgcccgccttggcctcccaaagtgctgggattacaggcgtgagccactgtgcccagccaagatataacaatacgttttaaaatagaatattaacactttgggaggccgaggcaggcggatcgcaccacagcactctagcctaagcaacagagcaagactccatctcaaaagaaaaaaaaaagagtattaaataacatacacacaaagacaaatgcaaaagtactaacctgtatggactaggactataggaaaacctggaatttgagcattaaatttggctctgagcttactttcccaccctgaaagttctccaaggaaaatgcttgtgcagctgactgccaacccccccagattcctcacgtcccgcacccttctcattatctggcctgcatctctcctgcttcagcaccttctgactcgtttggcctcctggatgccattctccttgtcatttttcttggactgggtgacccatgtctctccctttccctcagccttccttcagatcaaaccaccctgatcctcatgtttcttcctatctcctagatatttggcatgatcttcagtatgatcttgtgctgtgctatccgcaggaaccgcgagatggtctagagtcagcttacatccctgagcaggaaagtttacccatgaagattggtgggattttttgtttgtttgttttgttttgtttgttgtttgttgtttgtttttttgccactaattttagtattcattctgcattgctagataaaagctgaagttactttatgtttgtcttttaatgcttcattcaatattgacatttgtagttgagcggggggtttggtttgctttggtttatattttttcagttgtttgtttttgcttgttatattaagcagaaatcctgcaatgaaaggtactatatttgctagactctagacaagatattgtacataaaagaatttttttgtctttaaatagatacaaatgtctatcaactttaatcaagttgtaacttatattgaagacaatttgatacataataaaaaattatgacaatgtcctggactggtttttgttttgtttaattattttgagagctatttggtttgcaaatgtctttcaactcctattaactccacctgcatttttttttttttttaagacggagtttcgctcttgttgcccaggctggagtgcaatggcccgatcttggctcaccacagcctccacctcctgggttcaaacaattctcctgcctcagcttcctgagtagctgggattacaggcatgcaccaccacacccggctaattttgtatttttagtagagacggggtttctccgtgttggtcaggctggtctcgaactcccaacctcagttgatccgcccgcctcagcctcccaaagtgctgggattacaggcgtgagccaccgtgcccggccccacctgcatttatatgagaagtagattgggaggttgctcaccccagtttactaatgaaggaaatctagatgtggagagattaaaggattctgatccaaagtcacacaggtgtcaacagaggagtcagcaccagcacctggtcctcagacgctcattcagcagtggggtatatcttggggatatgacagtacacctcacaccatggtggcaggaactttgttttattcactacctagcacctagtatctggtgcatggtagtgttcagtattttttatcagttaatattttttggttgaatgaataaatgagtgtgtacccatcagggtttcatcagagaagcagaaccactaagaggtacttgtttgaagagatttgttgtgggaatttgaccttacacagtcactggcactggggctgcttaagcaggctctgcagacaatcgggaaggacagacggatataaagtaagggaggacaagcccaagtggaagcccttgaaggcagacacatccgtctgtgtcagttcttttttgtttttttgagacagggtctcactctgttgcccaggctggagtgtcatggcccaatctcagctccctgcagccttgaccttcctggtctcaagcaaatcctcccaactcagcctcccaagtagctaggactacaggcatgagccaccacacctggctaatgtttgtattttttgtagagaagggttttgccatgttgcccaggctggtcttgaactcccggtctcaagcaatccacctgccttggcctctccaaagtgctgggattacaggcgtgagccactgcacccggccccatgtcagttcctgcctctgctgaggtgagccagcagagaagccacaattcgtgtgagctgtaaaatgactgctgcttcacttcccacctccaaaccttccacaagtttctcctctgtgctccactctaaccggaaacacacgggaagggaattctgggaagtgtggttcagcttacccaggtggacagatcacaaagccaccgctgcatgggaggtgtgatccgtgcccagactgcactgtcgtgggcaattcggaggcaagcaggcaatgatggcagagtgggatgaacaggagaaaggtgaagtgcagaggcataagaaaccgatttttatgttccactccttgattccatttgggttcctccttaacattacaaaaagaaaaccaggaaagaaggatcaaaatgtccctgaatgccattacattcaaacatcagaacaccaaagttgatagcagcat

SEQ ID NO: 25100 - DNA, 67986 bp, Homo Sapiens
tccactgatggatatttggattgtttccatcttttggctagttttcaccttttggcttttctgaataatgctgctatgaatatgggtgtacaaatatctgtttgagactctgctttcaattatttaggtaagtaccaaaaagtagaattgctggatcatagggtaattttatgtttaatttttggagggctgccatgctgttttccacaactgctacactatattttacattcagactggcaatgcacaagggttccaatttctcaacattcttgccaacacttgttctttgctgtttttgcttttgttttactataatggctatcctaataggtgtgaaggaagaatttttagtaactagtcctacaccacagtgagatcagctgtctcaataggtgggtcatgatgaatgtgttctagcaaagactggacagattgacatattcagatatgcaggtgatgcactgtccaagtgtgtctggccacagagtgaataagggctgaaatccagcacatgtttcacgggccaagatgtgaactgcctcttttgggaggaagcagttaagtttttctttcccgaaaatattgtcagcttgccaagccacatgcccaaagggtcacctttttttaatataaacaatggcacttataaaagctattagttattctggttggctgattctccctcctagagaagctgtaagattagtgaacagggtaatatctagtctaaccctactagatgactattaaggcctctttcaatggtggttttctgtagatctctttgatggttttacaaaatggtccctaaattctttgacactcctcacactaagggttgggctctatataccctcaccttcaatctgggatttgtgactgcttgactaatagaatcaagcagaaatgacacggtgccagtttctgggcccagcccttaagaaactggcagcttccactttctgtctctggggacattcactcttggatccccgccaccatgctgtgaggaagcccaaaccacaagtctccacaagtctttgtggagagacgcacgtggagaaaaactaacactcaacaccaagcaagtgaactgtcttggaagtggatcctccagcccctgctacatggagcaaaaacgagctgtcccagacaggctctgcccaaactgcagactgataagcagagtaaatgagtgttgttattttaagccactacgttttatagtaatttgtttagctgcagcagatagccggaacagcatgggatataacatgaccagtgctccaacctcacacttctaccatgtgctgactctagcagtgcactgaaggactccaaggcaggccttccctgaggagaccccagtttttactcacatgtcacaggcagtggcctttgtccctcatctcctctcccacccccaatttaggataaagtatctgccgtgataaagacgttgagacccactttctgtaaggtcggcttcttcattgtttgaatttcttgaggtttcacggagccacgcgctggaaccttccatagtctctcctgaggctccttctttgccctgggctggaggtctgtagccgtgggatgctggctacaagggacaagatagaagcaaaccacctgatccagtaaactgctgtccacttcggctcctcaacggcctctaagcttaagagggagcacgcaagccaagcaaaggcggcagggaagacggagaagaaaccacccgtgggccctggctctgtgtccagttgttccgtcacagatcaaatctgcctgcactaagaggatgggttcctctgcaaggcctttcggaattctgagtcttgtctgtcaaactctaccctctctcctccacatcccccaccttttctttcaggaaggaaatagttaaaaaagactcctgcccttcagggcctggaagggggcggcagctttgtgctttttagtggccgcgtcccaggatagctggaaggttaggacgctcttgcggtcccagagtggagtggaaggtctggagctttgggaggagacggggaggacagactggaggcgtgttcctccggagttttctttttcgtgcgagccctcgcgcgcgcgtacagtcatcccgctggtctgacgattgtggagaggcggtggagaggcttcatccatcccacccggtcgtcgccggggattggggtcccagcgagacctccccgggagaagcagtgcccaggaggttttctgaagccggggaagctgtgcagccgaagccgccgccgcgccggagcccgggacaccggccaccctccgcgccacccaccctcgccggctccggcttcctctggcccaggcgccgcgcggacccggcagctgtctgcgcacgccgagctccacggtcggtgcaagtctttcttatcggggactgggactggggcgggtgcggggatggcggagacgctgcctgggcccctcggtcgggagaagacgagagctgggaacgttctggcccgaccgccctgcagcttgggcgacccgtcgcagcaggggctggcacccacttgccccagggcgcgcggggaggcgggcgccttccgtgaggggtgcgctgcggacacgtgtagagttcggggaacttcacctctccacgttagggtttaggattcggagttttaggaagaggaagcccaatagttttccctgggtgaccccttttccccaggcatgcaagaactttgaggaacgccaagctctgtggcttgctccagcgccttcttgtgaagttggctccacagccttttcttactggcttgcttttcctcccccacatctgggtctgggtatgccaagggtagccaagggcactcggtgtgagggactgaggtgtttggggaaaccccctgtgtagctagttttggaaacctgcctgtggaggtctgggcgttttgttctgtgctcgcctttaaaggacacttgttgcttctcacgtgcagaaaacaagggctgcttctagataatcaccctctgtttacatcatcctaatggctttcccctgatagagttgggggtgggaggcatattaaactcaggcgttgtctctaaggagagttgctcatttcttaaccagagagcaaaacctcagaaaacttgtaaaaagttcctacttttacttgttttttcctccacctgtagttgtctatgtgttagctaattgagaaacaccttggcagtcatttcatgtaaattgaatgctctaaactcatgccattttgataaggtctgaatttccaaattaccaattacaggtgaactttgatcctgagagtctcatatgttaaatggttaaagtgtaagcgtaaggattcagtcctctttcttaataatagtttttgcactccccaaactctcagattccaaacaggaagaatgctgaatctatagaccatgtccttcaggtctgaacctgagatgcttcactagcgctatgactgattatgagtgatgattcaaagcacagcctgactcagattcctggaaatgagctacagacccaccttggaagaacctgcagttgaggggcttctttcatttggttttgtacttttcagccaatgataatatgacatccacaggcctttgccaagtatcccttagttttgcagcttaacatgtgtggagagctgatagagaagtcatcagaaatgatttctgtagtggtgtcattgttggaggaggaaggaagggggttttaatgatagctggctctcatgccttaagaacccacagcgttggccttacctcctggcataatcagctaaccaagcagaccagcatgctaacgttcaaagcaccacaggacctctgatgagtagagcagtacccaccgtagccaggtcagttcacaggtcagttcccagccgactgtaaccggcagagagccattccatttctgcaaaggccttctctctctcatttttaagaaagctgttattgaaggttccctttcatttgggaagctggaagacgttagtcacgaaacagcacaagatatgaaagtatttcttctcccccctgtatctgtgatccaaaaaggaggatgacaagaagcttttctcttggagtcctggtgttccctttggaatggaaatggtgtcatttcataggtctatcaatttttggccagatactcactccagattataagaagcaggaaaaaactgcaaactgtttataattaagtctagtcagagctgacaaatacatggcctgcctctagccttgaaaaattgatatttttcccatttaatcagagtgagtcaagtcctataagcaaaattatgtgtcctgccatttcttggctttgaaaccttgacctaaatacttcttcaagactctggtttccttataagtaaaatggagatattgctcctgcctacctagagtcgtaaagctcaaggcagataacagatacatatataataagttactatatgtaaatactattattatttcagagttcagggggaaatctctggggaaggcaaaagtatccaatactcgcactttatatataccctatactttctatgcaacttgaataaatcttattttatccacgtattggccaaacctaagctttactgatttcccaagataattgtcaaaattcctaaaagtggttaacatcaaccttgaatacactcagaaaaaggattcaattttattttttactttttatttatttaatttttttttttttgagacagggtctcactctgctgctcaggatggagtgcagtgactcgatcatagctccctgcagccttaacctcctggactcaagtgattctcccatctcagcctcccaagtagctgagactacaggcacacgccaccatgcctgtctaatcttttttatgttttgtaaagacagggtctcactaagttgcccaggctagtttcaaactcctgggctcaagtgatcctcctgctttggcctcccaaagtgctgagattatagacatgagccaccacacccaaccaggactcaatttttttaagattaaattatgacctgggtatatacatcacagacacgtacacacaccaccgcataaatcagattatgtcttcatttgaagattcataaaagcctacagaaaaggaaatatataaaatattgaaataggatgagctatttttaattatctttgattattccttattaaggtctcctagacttcctggacaggaaggaccacttgctctctgcaagtgacttaaaaataaataaataaataaataaaccacaccagatggtctttgaaaatgtctaaccaccctcctgagtctattgcttcatctaaactctggagacttctttaaaatattttacatacaaataaagcacaagaatgagagacaggatggtttagtggttaacagctccggctcagagttggactgacctgccttagaatcgcagtgttgccacccatcacctgtggccttgacaagctgcttcaccctcctgggcctctgtttccctatcttcaaaattgaaccgtggatctaccccacaggaccattgtatggattacagggcatcatgcacatatagtactgagtacagtgactggcataaaataaatgtagctatataggatggttaaaagatagcatggggacaggtgtcccttggaaaccaaaatactatgactagcctggaaaagttcattactcccatttcattcatcggcaaataccgtattgtgatgataatttctgagaaatgaaaaagcaaaaaaactcctgtaaaaaatttagattttacacattaatcatcaaggttttcaaaacaaatgtttttatcaattatttcattcttaattgaaactaaaattgttagatgtgttaatggtgttaaccagagttctcattaacatttcataacactttagatggctacctgtgctgcacttcatccctatgttcattatttatcatatgcaagacagcacacattttagaagattcaatttttacattcgataattttattttatgcctcaataccctgtaccctttactcagcatataatgccttttctctttcattaaaaaatatgtttgtatctcaactcttgaagatttttgtaattcaggttcttatcagcctgaatgtagagaaagaagtaactactacttaaaggaaaaactgacatagcctactacttaaaggaaaaactgacatagcctcatccatattatgatgtagatataagtatagctatgtatagagatgagtgagagagacaaagctagagagatagggagatggagatagagctagagatggaaatagagacagagatagatagctatagagacggaaatggagacagagacagagacggagatgacagagatgatggagatgatggagatggagatggagactgacatagaggagatagagcttgccctaatagagcttcagtttttttctggttttgctctgtcatagggtaacctgatatacatatatcttatctaatcaccaaatatatcctgcattttaattgaatcaataaataatcattgactatgatctttttggcaactgggttttggaacaaaaattatttttccttttgtttcaggtgaaaaaaaagtgaaggtgtaaaagcagcacaagtgcaataagagatatttcctcaaatttgcctcaagatggaaaccctttgcctcagggcatccttttggctggcactggttggatgtgtaatcagtgataatcctgagagatacagcacaaatctaagcaatcatgtggatgatttcaccacttttcgtggcacagagctcagcttcctggttaccactcatcaacccactaatttggtcctacccagcaatggctcaatgcacaactattgcccacagcagactaaaattacttcagctttcaaatacattaacactgtgatatcttgtactattttcatcgtgggaatggtggggaatgcaactctgctcaggatcatttaccagaacaaatgtatgaggaatggccccaacgcgctgatagccagtcttgcccttggagaccttatctatgtggtcattgatctccctatcaatgtatttaaggtaggaagtaaccacaaatgtatttgcaaatttaaacccatgctctgattccacgtggagagttgctgcagacttttctgacctttggaattttatctgtgtttttactgagagctatttctgctgtcttctaactactagttttaagatttacaaattttattatctgtcttatgttacacttagtttctaccttaattgtaacaaaatagtatttcagggatgatggttcaaaatcatggtgtttcatgacttggattctcatgccacccctgggcttgctggttggataggctgtcttggcaagatccctggatttttatgaaatgcaatttccagagtgagagctactaggcccagaaaatacttgaaacaaacatatccttgagtttagttaccgttgaatatgatgctgttcagaagccagatatctacagtccagcttgaaatgaattgtatttattttattttgactgtctagattaatgattaaagccaaagggcatcctggcttttctcagtgatatgggtgacttagagataatggggtccacatgatagcaggccactgttgaccttgctgagcagcattactaactaataccacttaaaatttgcctgctttactgtggtctccttcatttcttcagtctgcatttattgagcacccactgtgtgcccacccctgagctaggcagtaaggaaccaaaaagaaacacaacaaagtcagtgcctcagtgtgagaggaagataactaaccttgcttacagactgtattaggccatttctacattgctattaaaaaaaaaaaaaaaaggctgggtaatttataaagaaaagagatttgattggctcacagctctgtaggctgtacatgcatggctccagcatctgcttctggtgagggcctcaggaagcttccaaatatggcagagggagaaggggtgcaggcacgtaacatggcaagagcaggagcaagagagaagggggcaaggcaccacacttgcaaaccaccagatgtctcgagaatcactcactaatgcaaggacagcaccaagccattcatgggagatctgcccccatgagccagacacctcccaccagttcctacctccaacattggggattacatttcaacatgagatttggaggggacaaacatccaaactatatcagagactacttagacccaaaacaaactaaagccgaaggaattacatattccatatttggtctagttgttgggagggaaaaattgctgcaagaattcagatatactaaaattcaaatgaaatggcctgatctatgccagattttatgaaatgtgtttattctaaacccaagaagagtattttcctcagccttgttttttccttctatgtattatgcatagaaagcaactattctaagaggtaatattctgaaatattactttaaatggcaagttttgtcaattgaagatacaacacattttaagtaaaacagtaatctctcagtttccaataagtacacttaagctgtggttaaattatattaccctagcagaaaaatcagtggtctgataatatagatgaaaacaatggttacaattttgacattgcaaataaaaacttcccaaaattacaccagtacactgtttccaaaattgaagagattagagaacaaacaatcaaaaaattaccatctctttccacaggatagcataaatacatgtgttttctattagagcttaaaataggaatttagaactaaactatgatgcaaaattgaaaatgtgtaattgatttaaaatgtttagcatatgctacataactttaatcttttcttttaaaaagttttctctttatgatatactatgtgcacacaaccacttgactttctcctgacatttctccttaatgataaattggaaaattcaaattttgactcttcagccatcagagtgtggagtatcaaacattgattattcaaacttatgaactagtgaaccaacccatcatggctcaagaaaataattatccatctctgcatttataactccctgctgctgttcaccctgaagcacactatgtagacttgccatgtgcaaagcagcttcttagccaatcaatatccacaactgctgggaaggatacctgcttatctctttgcggtgctactgccaatcaccagactaaacatcatttctattccatggcaacgttttaagtcagaccatctggaatgtctccagatttggtaaaaatgcaaataaaactttgctttacattcacctagcaatgaataaaaattaacatattcttatttgaccatattgttctcccctcctgggaatccaatactttgtataccttactgtagttctaaataatgtggacagtttgactggtacttttacatcataggtaggagtacatttgtgtaattcctgtttttccaaaactcgtaatgagtcatttaactatcattaattttagaaagtaaacctttaggctaaaaaaacaaatactctttagttatttcaatctttttccagaggaaaagagaaaaaagcactggagtgtgctaaaaaggctcacagtatttaggagcaatcgccacatctttctgtcatcctcttctctaggtcatgagatcatacatgttgctattcttctgacttctaagcaggatactcaagagatccttccaagcaatgtgagtcacaggcccccatccctttcccccatagctgcctcccatagtaaaattctgtgggagtctgtcacatattaaacctatagattcctctaaccatatcaagttcactacctctgtattgcagggcaaggtagcagctgtccatctcactttaccattacatttatgtagctatgaaaataatgcatacaattggagaatattcagttaaagggatgtgtgagccttctttatttccctattagaaggattaggttgaaagaagaataaatagttgaaagtatctaatatgctcttcaaagaaagatgagttttgaatcacacctatttttgtgtttaacaattatattaattgcttttcttttttaatttgtataaatttatggggtgcaagtgtagttttgttacatgtatatattgcatagtggtgaagtcaaggcttttagggtatccatcacaaaaataatatacattgtacccactatgaaatttctcatcatccactcttagttgcttttatgctcagttctaaggtgtctccagacagacaacattgctttgagtcatatcagagtcagcataagtggaagtagactatttaaagattgtattaatatctgaggcaagctagaattactgataagactgtaataatgttacaagaagaagaagaaggcactataaagtattcttcctattaacgttttattccctttctctcactttgaaaaagattgtactgaaacggtttcatagagcaatgtaatataaaacacaactgaaaagtaacataacaggtatcaaacagctgggctgtttcggatgtcattaacctgtgtagctgatgcttggtggctctggatggcctgtggcatggaaggtgggatggggtcattccacccctaaattttcagaaatttcttaatttcttaattgatctccctatcttcagagcttcttccccataacatatccgggactttgcttccatctgtcaagtgccactgcttctaaaaaagcacccaggagctcccacctgtcccccttttcccccatgtttagcaatcaaggccctccacactttggccatacttcacctccttcctactaattcccaaaatgcatggctcagctctgtcaaaatgctatcactacccccaaggaacatactttgccctaaataacattctcagagagactgaatgtagtcaccgaattgctgctgctgaagcatttacagatcctagtttgaaaaatgagttaggcctagaattatatatgttgcatctaacagaaataacccaaaagatgaaaagaagttcctatagcccttgcttacatacactcacacacacacacacacacacacacacacacacacacacaacctgatgataaaagaaactcagcaatctaagaaagtaaaatgcaaggcagaaggaaccaaggcaagccaatgaatgccagttgccttcttggttttgaaacacaatggccttgcaaatgctaatgttgaagaaaaaactatttctaagattatcaaaggataactgatttttagttgttcaaaataaggataatattactaattgcagtagaagattgacaaaagcaggaaggaggaagggaaaggagttagcagattttttcatatacccaagcttataacccatactgctggtggattcattcttgtcaataaattacattatctgatatcctaaattttcaagaaaaacaaaaacttagccaagtaaattaatctgtacataggatatttacatttgttagaatggcaaaatagttaaaacattgtctccatgttgggagactgaaaataacccctgattactagatgacaaaatagataagtatagaatttaataattatattatttaatgattcatgagattacatgtatgccatagagtgttgtccatagggagatgggttataattttgaacagagtggaagccctaaaagtgatatttgtgcatgagccaaggcttggcaccatgtagcttcaggataacagctccgccattatgcacacacagacatttccatatatcactgtacctcgtctcttaagcagaaacaagaatgcagggagatgtatgtatgagagagatggagtaagggaaagaagtaagaggtacagtccaatggcttgccatagacgcttttgacgtgcatagcagggagttgatgccgtggataatatgccacgtaaatcacgtctccacttagcatgtggcacaaagcagatctgtgagaacaacagtgatagaagccggtaactctgttgattactaattttgtctaccctaagcaaccaccccttattgaggacaacaatgaaaaataaacacatcttatttctgcatgaagttaccacgaatattttgcaatgaaaagtcaagactctcaatatgttgctctggcagaggatctgaacaatgtggaaatgagagacatccacatagagccagttatctccatgttcacacagcctttgacatcttgtgcaactgggatccatccttctggggcagctttacaaaagctgcttcttgacatatcaaatcaccacagcaaattgtgtcttaaaaataaattgtcacaacttacagattagatacctcaagcatagtagatgttcagtaatgcttgttgttatgatttgatttgataagggccttcactcttaaattaacttcaaatcagattaatctgagatattcaaattaaaatgatgatgaaggtgggggtggtggtggtgatgatgatgatgatttgtcaaagggattcttcatttatagacaaggcagaagacattatcagtggtatgcatatactattccccaacttagtcaagttacccaccaaattccgtatgtgataagcatatttcccttttaccgcatcatcaagcaaataaaaacacacttttctcatgtactccaagaatcatgctatcatcataaaattagctatagaaactgcattctctaaattttaagagagaaaatgtgtcccttgaccaagatctctattcctcactggtgcattgtattccagctagatgttttcccatagggtagctctgatgctgcctcctctgtgagcacctctctttccatgcttttccgctacctctctatactccagctaacctggtctatctatctgagtccttctacctggaatatggtccttctacctggaatattttttcctcaggccttctctggcttcttccactttattccttggatctcagcttaatcatctctttggcaagtatccatgatccaaactgggttagtgccgctcccaagaccccctttattaaccctgtactggcacttaaaacatactctattgtatttgccagctccttggcctgtctgcaagttccttcaggcatgctgccatcattctcatttatcactgtatctcctgtgcccagctttaaaaatattaggtaaatgagtgaaaaaagaaaatgtactatagttgcctctgttagaatgtttttctcccatgcaattccagatctacaagcagacctgcttattgagtttattgaatttctacctttttttctgaaaatcagaatatctcagggtccataaatctgtgagaaactcgtgggaagcagagcagcacataacagcaagatgattttccccttccttttgtctttaggggtcaagaattcttgtctcatggttcaggcattgtgttaactatttctgtgcattctttaagcatagttgtaactgtagttttgattgaaatattaacctataagtgatttggaatatcaaaataaacattcatatcacagaagttttttttttttttgctcttgagagaatacgaagtaggttgatttttctgccattactatgatatatgtacattgcaaaacattatgctaactagctagcttaagaatatatgtacatataaaatgacagagtgacaaatttattagccaatttgctgtttgttataaggaagttgctgtctggaaaggcttcagaaccctgtccagctctacctccccttctgacttttcgtttcctgtgtctgggaacctcattgccttctctcatggtcatgttaagtaattattctcatgtgaggttactctgctaaccctcggcatttggctcacagcacagttattcccgcgtcagtgatgggggatggaaaccgtccatcactgcaagactgttcccatggctgaggagggagagatggtttcagtcctgttcttgttagtaacgtgttgagatgtaaatagattcatggctgatgatgttcccccatcaaagagttcatttagctcataggaagagtttgctatattctaaatttaacataaaataatgatgcaggaaagttttaggtttaagaaaataattttcacatgatacattgtgtatgcgtgtgtgtgcttgtgtgtgtgtgtaaatgttgctctggttccagcattctgatcaataaaagcagaagttcaggccattttatcctgaagtatttctatagggtagtcttatgagttgcttgattattatacaaagtatatacagttagtataaagagtgtgcaaactaaaatgaagggggctgaggaatcaagtgtgttgtcgctgaagttgattttgagactggagtggttaaataaaggctgttctaagaaattccatcaaaataaatttgatatactgccagaaattctacaactgccttctggatctaccacattctcttgggagttagaactactgctttctatagctacaattttattcttaactaggtctagtttttattggaaaaactgtcctaagattaaaagttaatagttgaaattaaatttaataataaaactgaatgtgtcattcagcattaatttttggtagccttatgtttcaatttgaacatcaaatattatgtaaaactgcatgctctgaagcatctatttaaatttggtacatttttgcagaagagcaacctggaaaaaaattaaataaataaatttggaaggtttgaagccttcaatgttctggggctcaggagcctaaaatcaaatgtgccctcagaaagacttaatattattttaggttgtgcacatttagaggtcgcttctcagaacttaaacacctctaagagttttattgacactctaacttttaaaacaacttccttggagactagtaccaagagaggaagcaagtcaaatcttgcatctcatacttgccctaaacatgagactcctgttattttagatcaaatttatactagaaggcaataaagatggcaactcattcaccacttgtttactcagtaatataaggtatttattctctagctgctcttcatttattcaataaagacattgggtaaatagcagcaaacaaaacagatagatatccttgcccttgtggattctggtagaagagcaagacaaaaagggaaataagtaagtaaatacatagtatgtaagataagtgctaagtagataagtacaatgggaaaagagagtggaaagaagagagatattgagtgggtgacctcaatacaaggtgacagttgagtaaaagaagggatgaaggagcaaacaatgccactatgtaaggtaagagcattccattagaggaaacatcaagtgcaaaggccctgtggcaggaatgtgcctggagggttaaaggaagagcaaggaggccatcgtggttgagtgggagagagagagtcgtggcaaatgagatcacaaggatatgagggtggagcaagagtaggggagaggtagagcacatagggcctgatagcatggtgactatatcatctattgtccaaacaggacaattttgagagtgaagggagacactattatgtcaggacaataggcataaaccaggactgtcctgggtaaacaaggaaaacctatacacctttaaaagtctttggcttttttctctgaatgagatgggaagtttttggaaagttatgtccagatgagtgacatgaacttgtttacattttaacaggaacattctggccaggcacagtggctcatgcttgtaatcccaacacctagggaggcagaggtgggaggatagcttgagcctaggcgttggctgctatgttgaaaagtatttcctaaatcaatgaagggaaaatatgcaatcttaaaatatgttatatatactaatatataacatgagaatattacctaaagtgtagcgtttactctatgccaagctaagtcgtatgaccctcccaacaaatctatgacatgctactgttgcctgaatgataatatgaaaaaagtgagtcccagactgttaagtaacttcctcaaagtcacacagctagaaatggcaggtccaggatttggatccagcctgatcccagaggctgtgctgttagccagcctgccgtactgttcttccacacacctcgtaagacaaaccttatcattaccaaaatgtcatccctaacacaaatagattttcaaagactgttcaaagaagaaaatcatttcctttatcttctccactaaatctaacagcttcattagttccttctttaagacagaagtaacacattgtaaagaaaatgtacaatagattgcactccaaaatagcatctatgttgtaagtcttgcagatggccttgggacatctggtgaacaggatttgtgtagcctatgttcattgtcatgtcagtgaggtcaactgacagaaggagagccagaaaataaaaaataaataaactgagaggaaagattgagttatttgatggactgattgcctcgacacctctgctcagagaaatgcattttgccaaacgaatggctcatctagttatcacttgaaaggctaggcaatttgtctgtggacaggatacagaagaatgaatgtctatggctagcccatagtttcagctgggttagaaacatcaggcttgactgataaagctagaggttgcttttctagacttttctccttgggggtttaccagatgcacaggagttaaaaggaggatgtggaagcataacagatgacatttgtggatatgtctaaactgatcattaaaaagatgccagcaatcctcaatttttaaagatttgcatataaaacgtaccttttgtgaaacctttccattaaatctaatgcataaggaacttcattattaattcctaattttaaaagcaacaaataaaggaaacattattgaacattttttcaatgtccaaaatattgcttatcaaaatatgaaaggtaatggatacacgtttcttaacaaaatattgaataacacattacactgcatcccacgtaagttttatgccacaaaagtaattctgcagaatgtctgtacaaaaaaaaatctctaactactgtgaacttttagtttgaaagaagatttaaatttcagttttcaccaaatagaaatatctagaatacagcaaagtttctcttttaaaatggtgtcattgatgtcataagtatgggtatttctctgcatattttcattgtttccacaaattttacttgcttaaagaagaagtgaaatctatgaaaattagggttatgttatatcatttaacagtcataatactttttaaacttttaaatatgttattgaaatgtagcatacacatagaataatgtgcctaagcattggctctgttaattttcacaaaatgaacacatgtgtaaccaggatcaacaaagagagcattatcagcaccctgaagtctcctagtcactatcctaacccctaagccactcactttcctgacttctaacagcatgaatttgcttgcctgtttttgtgtttctagcatatggaatcctatgatgcctgtaggtattgttttgtgtctggcttgtcttactcaacattatgtttgtgagagtcatccatattgttgcattcagttgtagttcagtcattctcattattgtatagcacttcactgtgtgaatatcgcactttctcaattctactaaagatgggcattattaagtagtttctagttttgggctattttgaatagtgcagctgtggacattctcctatgcatctttttggtgcatatatatgttgaatatgtaagtatatagatataaaaacctatagctgtgtacataatgatatctgtcatatttatgtatcaacatagatagctgcatactaagtatatctaaatatatacttcttatttaatttttcttgatcataaccttttatattttactattcagtaatgttggagaattacactaggttaaggtacagaattaagaactaggcaatagaattcttcttttttttttttttttttttttttttgtttagagatggggtcttgctttattgcccaggctggtttcaaactcctggcttcaagtaatcctctcatctcagcctcccaaattgctgggattacaggcatgagccaccatgcctggcccagaattcttttctaattctaaaagctttaagtcttgtgtggcctgtgtatgaatttggtccatgataattatttgcctttcaagaaaatctgttatctgccttcataatggataattcccagatcaactcacacattgactaagtacctgtagaaaacacagaggaatctaggctagccgtgccttcaagttgctgacgttctatttgaggatacaagcaaatagccaataaagttagcctggataccagcggagttttatactcaagtattttcttggactttttttttttgagatggagtctcgctctgtcgcccaggctggagtgcagtggcgcgatcttggctcactacaagctccgcctcccaggttcacaccattctcctgcctcagcctcccgagtagctgggactacaggtgcccgccaccaagcctggctaatttatttgtatttttagtagagacgaggtttcaccgtgttagccaggacggtctgcatctcctgacctcgtgatccgcccacctcggcctccaaagtgctgggattacaggcctgagccaccgcgcccagcctctctcggactttttgagaccaaagaacacaaagatactatttttaatgtgaaatacctctaaaaatgttcattgaaagtagaaagattggcatcttaatacaagattgccagggtagggatggttgtcatagaaatttaccaaattggaacacatgaagacagagctaaaagaaaaatttatcttaatatcatcagcaaaatttgcatttgcaacatcccaaaaagaaattttatttatgaaaacccactgaccacatatgaaatggaatcatcttacaatgtaaacactcccaggaagtcattcagaactctgtgaaatgtctgagcactgcatttttgcaatctcatgaataagagtttaaatgtgagtcattgacacttttcctgctttttgttctggggaaatagcttcacggtaatattttcattaattgtatggagtgacttcagaatcatctccagctcctgtaccatcataaaggaagtcaacccagagggagtggtatgcactaaggtgaccgtccagagcccactttcaagcactgctgcttgctcctgcttgattcgctcacccagggcccagcaaactacagctagtgagccaaatctggcccaccacctgtttttgtaaatgaagttttattggaacacagccatacctattgcttacgtattttctatggcagcttttgagtagtttcaacagacaccatatggcccagaaagcctaaaatatttactatctggccatttatggaaaaagtttgtcaagcctggtggcatctcaccaactgccctgccccttcctctcatccctggctctcatctacctccatttggacccacaggcagtcaaagcccaagatctgaacttcagaaatgtgaataaggcttcataacctttttctctttttaatagagatggggtttcactgtttcccaggcttatcttgaactcttaaactcaagcaattctcttacctcaaccttccaaaatactgggattacaggcatgagccactgcgaccagacacttcataacctttgatatttttaagtgcctaatgccttaaccccaagaagtaaatgggcataatctcaagaaatcaaaatatgttttattttttaaaatggtttgtcactgatcttgaataaatcacttgacctcccaagtcattctttttctttttcttcttttttcgagaaagggcctcactctaccacccagtctggagttcagcggcataaccacagctccctgctgccttaagctcctgagcccaagcaatcctcccacctaagcctcccaagtggctgggactacaggcacatgccaccatgcccatctaattttttgaatttttgtaaagatggggtctcattatgttgcccaggctggtctcaaatttttggactcaagtgatcctccttcctctgcttcacaaagtgctgggattgtaggtgtgagccaccatgcccagcctgaagtcattattttgtatttgaaaaaaataaataatgaagggaccatttcatggtatcccactaggcataatgacataaagtaggcttattcctaagctgacagccaaatcagttacaacaaccaagatctattgtctcttcgttgtctcgatttatgttagtaaacatcagaactttggtctcatgagaggtcttggcaaccacaattcacatgttttctaatcaaaattaaacaatttttaaactctttgtcacacacttagaaatattcaatacatcgtcctttgggtaattaaaagcagcactaagccaggtggctagatttttgggtagccatttatgtttcagttaagaaaaagaaaaaggaaaaggagatgatgaagatttttcatttattttagagaaatttcatatgaaaatatagttactctctaaaagtctttttttttttttttttttttttttgagacggagtctcactctgtcatccaggctggagtgcagtaatgcaatcttggcttgctgcaaactccgcctcccgagttcaagcgattctcctacctcagcctcctgagtagcagggattacaggtgcccaccaccacacccagctaatctttgtatttttagtagagatggggtttcaccgtgttggccaggctgatctcgaactcctgatctcaggtggtctgcccgcctcagcctcccaaagtgctgggattacgagtgtgagccaccacacctagcctctaaaagtcttaaagataaagctttacatacttgaagttactcagtcagaaaatcacaacactttatatttctttggaaggaccaattgaattacaagatcataactaaaaacagatgaattttcttacctctatgctgtaaaaatcagggactatttctttaataatggacagaaaggccatgtcttagacaaaggggaaagtgggggataagataagaaatatctcatgttccattttttaacattaggtgtatgtgtgtatgcatacatgttattttttgtgacacagatgttctctgtttacattagatttttccaaactgttagcagtcaggtgcggtgattcacacctgtaatcccagcacattgggaggccaaggccagaggctcatttgagcccataagttcgagactagccagagtaacatgatgaaaccccattgctacaaaaaatacaaaaattggctgagtgtggtggcacatgcctgcagtcccagctactggaaggctgaagtgggagaatcacttgagcccaggtcgaggcttctgagccatgattgctcccactgcactccagcttggaaggaaaaaaaaatgttgggaggaaaggacaggggagctacaggggatggaggtaaaaaaaaaaaaaaagcagagttgggtagtggagacccatccttagggctcaaccatgtcattctgccagcacccaggtgacatttcatatatttgaggaagaaagggagggagcatggactctcaaaatgtgaggagtcaaaatatgtagttccaactatgtgaaagcagcttgaagaaccagagcattgacctattcgtgatttttgcagaggcactcatttggattggccctccaaacaggctggtgtaagagcctctcagtatctacaccaaagcccatctctcttgtggttttgaaattctttacttgtttgcagtagctccagtgaaccctcatgaagtgataaacatttagtttatttgtggaaatggcccagaagaaaaagctggtattagaaccgaagatgtctaatgaagtatatttttcttagccagaaattttggataaatgaatgagtggagaaaagtaagtgcctgagggctcaatatttgtccttcaattactttttaggttgtgattcttggtacatgccatattctgttcagactacctcttctctactaaaaacatgcctgtgcaggggcagttcccacactagtaggaggtacagtctcacacatttatgcctttgtataaattagagaaaatcctaatgtttcatgttttgaatagggaatatattcaaatggatcaaaaatcaagaaagtagaaaaaggtacacattgagaagtcttcctcttagaccagtcctgatcaccaaatttccccactcccaccctctatagcgaatcacctttaaaagattcttctgtatctttccagtgtttcttcatgcaaatataagaaaatccaaatatatatttctgttctctcccctgtttattatacaatgttctgtacattgcttttttcaattgacagtacatcctggagatctctgaatatcaatatatgaaaagctgcctcattttttaaatagtttcatagtatcccattgtgggagagtgccataggttatataatcaattgttccaatcttttgtttttgcagactatgctacaattgtaaccatatgcatgtcatgtttatatctgtgggtacacctatatgacaaattcccacacataggattcctgtgccataggtcaagtgtctgtattactttgatataaattgccaaattgtcctccataataattgtgctgtcttgcactctcattagcaacgtaggagttcctatttccccattgcctaaacatatttttagattaggcatttctctttcctttggattatcttaaatagaaaatgtcagggaggaagtctttttttgttcctatatgctaagattgcctataaaaaaatggtgaaaaaataggaaactaattttggaaacgtattgggtcactgaatcaaatgcccagtgataatttaatgtgtcatttactcttgcaaaagtatacatttttacccataatgaagaggacactaattcaagaaagtatcatagaaaattagatattttttctactctgaagcaatcactgattgtcagtggattctatacactaaattatttcagaattcatacacctgaaaattgtcaaatatataaactctaattattaaattattgatatttagaagaaggatttgtgaagcatttgtgccagtttttccctgtcatttatatatcaaaaaagtactcataatggaaccaaattatttccatcttcaacttgaacagctttttgatatttcaggttgaaaccaagataagcctgtgcattgagtctgaagaattgtactttttccaaatattacagttttgaaaactaatttatgaattgaagtagctaagttccatccagtttccaactcccattttttgacacagatcagaatgaaaaacctagaagccaatatccaaactttactccagacctttccactgttcaggcagtagttgaggactgagacagacgttctgaatgacaactttacggtgacaactgactgttaatgtcatgtgataacatgtctgtagcttttttggaaataatctaggatgatagaatgggaggtatctcttcaaaaatatgtatttagcctaattgctgaaatactttatatttttaggactgatatgactgctttttttcatttatttagtttataacttcatgtagtatgaattcagcctgaaattgacatttaaattttgtacctaaattcgtaggtttagtttttttaagaaaacaatggctttccagtaaataaaataatatttttacattttcttttgttcagccttgagtttgttttgagagctttagtttggataaaaaagagaaatgtcattttaaaatttgggagaattgtaaaacaccattatattttttcagatacgttttaaaatttattttgtacaaaatatttatagatatgaggcttcactttgttgaattcatcatacacacacacttctttttagcagaaattaatagaaagccaattctaaattaatgtaggtaatacataatctactcaactggatgaataccttggttgcaagtcttgtcctgagcgagctaagtgacaacactctcaatctactgagcttccagcatctaggcagagctcccaggacaagcagaagtcacagggaacaggaagcaggaaagagcaggaaaagatcctttagttcccatgtgtagaaacaaatgctcagctgcctctgtattgaaccatactgatgcctgccactatattgttcattgtagatagaaatcattataagttgcagtcgattagaaattgcaaccacctctttcaaaaaagtgattaccaaaattttgaaaggaagagaaatacagattgtaattttttgctataccagcaaagaaaattaaatattaaaaatattataaagatgcttctgacaagctatgtgaccttcagagtttcgtcgtcaaaacacagtattaatctagatcagcgtttctccaaatttttgttctcagcacccctttatactcggaaaaatcattgaggacaccaaatttttcttcatgtatgttatattgatggatatttatgatgttacaagttaaaactgatcattttataaaaaatatttattaattttcatgaacataaccccattaaatgttaacataaatgatatatttttatgaaaaaaattatattttccaaaacaaaaaaattatttagtgcgaaaaaatggcattgttttacatttttacaaatctgtttatttaacgtctggcttaatagaagacagctaaaactcatatcagcttctgcaatctgttgtactatgttgttttggttgaagcatatgaaaaaactctagcctcacaaaaaaaaatgtcgtttaaaaaaggatgaggattttcatcgtcttttcagataattgcgaatattctttgatacgacatcaaaactctcccattggcagttctgtaaagattagttgcaatgtgtaaagtgaaaccatattaatgaacttttcagacactactacattaaaatatgttgtctctcttgtactttgcatagatcgtttacataagcatggttttgcaacatcagatattggccgttacgaattactagtttaccaattataaggatcttctcaatgttgccttatttaattacataatatcaaaaaactacattcgttaatatcaccaccaatcctttgtcacgtggaatattaaaaagacatgtacctaagctcaagatatattaaaaatttgtaatttctctgctgcttcaacagggatatcttaagggaaactcatgaaacatgatccataaggaaaaaaaattggaccttatcaaaatcaaaaacttttactctgcaaaagaccctgttaagaggatgaaaagacaacagccgggtgcggtggttcacgcctgtaatcccagcactttgggaggccaaggcaggcagattactttgagctcaggagttaaggaccagcctgggcaacatggcaaatctccatctctacaaaaaaaaatacaaaagttagccaggcatggtggcatgcacctgtggtcccagctactctggaggctgaggctgtagaatcacttaaacctgggaggcagaggttgcagtgagccgagattgcaccactgcataccagcctgggcaacaaagtgggaccctgtctcaaaaaaaaaaaaaaaaaaaaggattcatatctagaatatacagagaattctcaaaactcaatggtaaaaaaaatgaataatccaaatagaaaatggacaaaagacatgtacagaaattttactgaagggtatatgcagatgacagataggcacatgaaaagatgttcaatatcattagccattagggaaatgcaagtcaaaccgcagtgagatatcactacaccctatctgaatggctaaaatgtaaaaaaaaaaaaaagagagagagagagagagacaacatctaattctgtcatggatgaagagaaactgctggtggaaacggaatgtagagccactctgtaagagagtttggcagtttcttttttcattttttttttttttttttttttttttttggaggtggagttgcgctcttgttgcccaggctggagtgcaatggcatgatctaagctcactgcaacctccgcctcccaggttcaagcaagtctctcctgcctcagcctcctgagtaactaggattgcaggtgtgcaacaccatgcccagctaatttttgtatttttagtagagacggggtttcaccatgttggttaggctggtctcgaaccccaggcctcaggcgatccacccacctcagcctcccatagtgctgtgattacaggcgtaagccaccctgccccgccggcagtttttttttttttttttttttagacagagtctcagtctgttgcccagactggagtgcagtggcgccatctcggctcactgcaagctccgcctcctgggttcacgtcattctcctgcctcagcctcccgagtagctgggaccacaggtgcccgccaccatgcccagctaattttttgcattcttagtagagacggggtttcaccgtgtcagccaggatggtctcaatctcctgaccaggagatccgcccgccttggcctcccaaagtgctaggattacaggcgtgagtgaccgcgcccggccggcagtttcttataaaactaaatatgcaattaccataagacccagcagttgcactcttgagcatgtatcccagagaagtgaaaattttgttcatgcaaaaacctgtacattgctctttccctgggttcccagtatcctggcaggttcctgaatatttgtcacagcaatgagctaaagcccctggaagaggtgaagttgggaaactgtggattgccaagactcaaggaaggactgaggtgtcatttactttgaatgaagatcttgcaaatattcatgatattggccgaaaagcagcttcagtcagtgctcataaagaacatccatttgtcttgcaaaatattggaggccatatatgaacaatatttactgagagctcatcagataagctgtcttcggaaggaatagtggtacaaagaactgaatgccaacagactgccagtgaaaagtacatgagattaaaaagattgcaaatagaggaatcttccaaacctgtaaggctatcacaacaactggacaaagttgtaacagccagttttgaacctgttgctaatcaatacaatactgaatgtgaaaggaaagagaaaacagatggaaaataagctccagctaataaacaacacgtttcagacatgctattttcagcctttagaaatatcaatattatcatcttaaggacttggtggacatcacaaaacaacctgtggtatacctgagggaactcttaaattggtcttcagaatgtaaaagagatccacaaaaacacgtgggagctgaaaccagagtacagacatcaccaaggagaagaaatgagtgattaagatggctcctagccagcatgttagtgaaacaacagtgatgctaagcaaaacgcattgatactggaaggcttgaacaccgtatgttaatgggggctaagtggcaatactttcctttctctcggtaaattttctaaacctataactgttgtaaagtttcttcagtgttttttgaggagaaagaacaaatttatttatagacttaacttgtattaaaccaggctattcacaatgggaataagggttggaggattaagaggatttctcttaaatattagcttttagcatgtaaaattaggaaatggtttttaaatgaggactctctgcccttgctgtatctctgaggagctgaggtagtacagaatcaaagagaataatatagcaagaaaaaaacagtcaactacagaaattcttaaaaggaataaaaagccaaagttccttattttgaggggggaaaaaaaaaaaccctgtacattaacactcacagtagtttcacctgtaatagccaaaccctgaagacaactcagatgttcttcaatgtgagtggtcaaaccaaccatggtacatccataccagagactactactcagcatgaaaggaaacaagtcactgttacacacaaccatctgggtgaatctccggagaaccgtgctaagtgaaaaaaagtcaatctcaaaagattgcatactatattactccatttatataacattcttgaaatgatagagttatagagatggataacagattaatggttgccaggggttgggaatgggaaggggagagaagggaaatatgggtagaagaggacatcaaaagggatccttgcggtgataaacctgttctgtatcttgactggtgataaatacacaaacctacacatgttactcaattgcatagagctaaatgcacacaaattagtatatgtgaaactggggaaataaaataatattggtagattatatcaacatcaaaaaaattgtgccatttcacattcccaccagctttatatgaaggttttaatttctccacatcctcaccccaacacttattattgtcagtctttttcattacagccattctaatagtgtatagtggtatcccgtggtggttttaactagcatttccttaatggctaaggatgttgagcattttctatgtccttacctacttatgtatctgctttggtgaaatgttcacttaaatctttgcacatttttaattaagtatttattttattttagttataggagttctttatagattctagacagaagtccttcatcagatgtatgatttgcaaatatttttcccagttagcggatttgtttttattttcttcatgtcttttgaagagcaaaaattctttattttatttatttatttttttgtttgaaatggagtctcgctctgtcacccaggctgaagtgcagtggggcaatctccactcactgcaacctccacctcccgggttcaagcgattctcatgcctcagcttccagagtagctgggattacgggcatgcaccaccacgcctggctaatttttgtatttttagtagaaacggggtttcgccatgttgtccaggctggtctcaaacccctgacctcaggtgatccacccacttcggcctcccaaagctctgggattacaggcatgagccaccatgcccagcctgaagagcaaaaattcttattttgatcaaatccggtttatcaaatttttcttctatggatcatgccctagtgtcctatctgtgaaatttttgcctaacccaagatcacaaagaatttctcctatgttttctttgaacagttttagaggcttagctcttacattcagttctgtaatcttttctggctaaatttttgtgtatgatatgaggcaggcatctaagttatttttttgcatatggatactcagtttttcaacaccattctttgaagactattctcattgaattgccttggacctttattaaaactcaattgacaataaatataagagcttgtatctggactttctttctggtccagtgacctgtgttctattgttatgccaataccatcctgtcttaattactggagctttatattaatagtaagtttttaaataagtactataagttctcctactttgcattttgtcagaattgttttggctattctagatcccttatatttttatgtaaattttaagatgaatttgttagtttccttggatttggataggaattgcattgaccctttaggtgaatttggggagaattgccatcttaataatatcaattcttcttttgttatatgtattctcaactattttattcttttttggtacagttttgaatggaatttttctttaatttttttagatttttcatggctagtatgcagaaatgcagttgttttctgcatattgatcttggatcctatgactttgttcaagttctattccttttgcagcatcagctttcttcctgcgaatgtgtgatggtgaagagtacaatgacctttaggtagtttggtgccacggtcgtgattcatgcgaaagcaccagcagtttacctaccattgcttttgtactaacagtgcaaatgtcaaccagtgaaaaaaggcagtaatctctgagtgttattttgattttgcagacctcaaggaaggttcccagggttccccagtggtctgcatacaacactgagagaaccagtgatctagatcaggggtcctcaacccccaggctgcagactagtaccagttcatggcctgttaggaatcagccacacagcaggaggtgagtggcaggcaagcagtgaagcttcctctgtatttacagctgctccccatcactcgcattacctcatgagctttgcctcctgtcagatcagcagcagcatcagattctcaaaggagtatgaacccttttgtgaactgcacacacaagggatctagattgtgcattccttatgagaatctaacgcctaatgatctgtcactgtctcccattaaccctagatgggaccatctagttgcaggaaaacaagctgagggctcccactgattttacattatggtgagttgtataattattttattatatattgcaatgtaatcataatagaaataaagtgcacaataaatgtaatatgcttgagtcatcccaaaaccatcctgcccccgctgccaggtccatgtaaaaattgtcttccacaaaacgagtccctggtaccaaaaaggttggggaccgctgatctagatggtctctaagctcccatccaagtgtaaaatgctataatttttaaaacctaagatgaacagtgttgatcagatttgactttacaacatttacttaaatggctggttttcttggcagtcaatatttcttaggcaattgctgcatgtggaacaatgtatctagtcctttgagagagatggaaaggaaatagaacactggtcctaatctcaagaaaatggcaaaagaaggctctctgggtttgcaggtgtctaggaaaggaacccagtgtcactgtaggctgattgtattagacctcaaatttgtatattttttgttctactaaaaataaacaaaatgcttatagtagagatacaacatatatcaaacttcaagactagaagtaaaactaggttaaaatctatcattctaggctagtacaacctaatgttatctcatttccaaatgaccataagacataaagtaacatcaaactaatttttacaactttttcaagtagctttaattttacattattgtttataacagacccgtggttggaagcttaaaatctccacttaactgatattttttctacattttatatgtaattcaaattatgtatacaatatgatgcttacagctcactgggcaaatttactatacattttagcttttcctttgagagtaatgaaatagtgttcatatattcaaggcaaataaatagtctcaaggcttcaatatgtgggattctccaagttctgacatccttaatctttttaggtagaaaaaaagggactgaagcactctttcacgggaagaatgaaaagaaattgagaaagcaaaattaatcatatacagtacagggaagggtgcaggttagcttagagataaatggagttaataatagtttcagataaactagttacagactagagttctgatatgaaaataatgtacaatttcagagctggtagagaattcagagagtatctagttctagcctaacatttcttgtttggcagaggagggagctaaatcttctagatttttgacagagctagactggaagccagcatttctaacttctcctttagtatgttccatccttccatctctgcattcaatagaacttttgtggttttaatactctcgacaccacaaattgcatttccctagaagacagcctggcttctaaaactttatagtgaattattaaaatgtatgccattcttatctgaagtttcataatatgattagtaagccagccatcctgactttgtcttctattttgcttaatgcctcaattatgagtaattgtgaagttttattttctaatgaatttctgttgttaaatattcaaaatcacctcaatcttatttactatcaagtcagtgagagcatcaactttattctactttattctttttttcccgaaacacacatatggtattattttgctcatgctgcataccatatcttttttggctcattttttccatctacactcaggataattgtgaccacatgacacattttacaataaagaacttaagtttcttcagaacttatacattagatcattaaatcagctgcatactttcaaatatgccatttgttttccctttttcctattcatcatcacctacatcactgataagattttgggatccactacctaaatctgtatgtggggatctctgctattctgttttatcttgttttgttctgctttggttttgcctgcctgtttcttttaaataggcactagcatgtctgaccatagagactgatgattaaaatcaactataaaacttttccattaggttttgggacttattgtctgtccgggtcaaagcaccccatttctatgatgggagctctgacccagacacacaataaggcccaaaactgtgcttgtatgtttttatgacaagatgtagggctccactcacaacacatggaaaatcttttctccattccatgaaaaccagggtctttctttctagcatgaatctcctctccattatgaattaaaccttaaagtattgacacacacaatcagcacaaaccttgcaatttcaatattgaggctctctaatttttcttctctaaagttccattcttctctatccaatgatcctttggtcatatgcttacaaaataagtaaaagcctcaagtccctcacttttggattggtactcttacagcaaagagagttattaaaaagagatattcctcttgattcccaggcttcaggtgactgagattctcaggggtgataagcccatatcttgggtgaataatctatcctcaaaggaaaaaatcttcatggctctggaactctggctttaaaaagttctctttctccttgtttcctctcatccaccttgttgttattaacatctatgtatttcagattctaaaaagtgaagacctcaacagagactgaaacaccgaatattcagtagtgaaagatgtggttagtgagtagcaacaattccatctctttccatctaaatgcagtttagcaagaagcagttcctcagaatccatctcctacgggaactaacatttatgatttgctatagatcaggccctgctgtaagtgcttttcatgtatgaacccatttaatacatcaaccatatgcatgggcactctctttatctgcagttttccatgaggaacagttaacatgtctaagtcacgccaggggacaaagtcacccgagcctgttctctttactgttaggtcacaccaccctcttcttctgtggagctcccagggaagattgcttagagcttcttgagaagctgttatttctgcttatcttctggtggggtcttttgttcttgtgtggcctgccaccaccctgcacctggtgacctggaccatgggtgaccataaccatgaaccatcaatagttatggctcacacttccatattctgacttctgccaagcccttcctctggattctctcttcgctggcccacagtaatcctctgtggtagctaccagaacgatcttcattttatagaagagaaaactaacaggcacaaaggttaacgagcatgccaatgtcaaaagatcaggaagacagcagagcttggggtcagtctgcccccaaggaatccagcttcagggcccacgctctgagctactatgccaagccagctgccttgattacaaggagggcttctccatccccccagctcagggagggcacctaaggccagagtcaaaaccatttatggaatttctgctctactctgcatttgtcatacatcctgaattcttggactggtcaggaggcaagaaaagcctgttcaaaggaaaaagtgtatggataggggatagggagaggccatagcttttatgacatttgtatgaatgctctgtctcaatcctgaagcaattaatgcataacagaagaacaaaatctattcttggtcacacacagtgacttatttcgtagtatctgcagtggccagagagcacgttctcataaatggcctgtcctgggcatcacaatctttataatcatctcagtctgtgctgttggaagatgtttttgtttgctactgagtcaactatgtaccaacttttacatcccagtcccttccccagaaagaaagaaaaacctcagaacctcagtttttaaagcctgatacctggtcagtcatgtccaattctaagcgaccctataataattcatattgaagggaagagaaggttttccttgctttgaggtttgcagctattacagactgtatttgtaaatccctcattcctgtctaggacaaacaggagatgaaggagaggagaagaacccttcggcctcacaggatggggtgagaggaaaatcagcacaaagaaaaatatgccactagttttatttgtaccattttaagatgccatgacaacaacaaaaataatgtacaagtaataggattaagtagcaggggatattaacatctggaatggataaagaggcataagttcgtttatattttcatggttgtgcataaatggtacgtttcagtttacgattacaaattatagcaattcaaaataacgtttgtgtgttatatgttcagtttgcagaattctttcatatgcattaacccatttgagcaccccaaatgagcatcatatccttgtggcaggtatgagaactacccccatttaacaaatacagaaacacagacttacaacggggaactggcttacccaaggtcacacagttagcaacaggtcaatctcgtacttgaacctaaatcttataggttcacaacccatcctgaatataggggagaacagccttattttgtagtgctaagctggtgaggcctggggcagtagaacatctgttattgtactgtgactttatgtgctgatgtctttagggactattgtctttgggtgagagtgtaaggggatgcaggctacatggccccaacacgattttttctttttctttttcttttttgtttttttgagacggagtttcactctcgttgcccaggctggaatacaatggcatgatctcggctcactgcaaactttgcctcccaggttcaagtgattctcctgcctcagcctcccaagtagctgggattataggcgcgtgccaccacacctggctaattcttgtctttttagtagagacagggtttcaccacgttggccaggctggtctcgaactcctggcctcaagtgatcaatccacctcaccctcccaaagtgcagggattacaggtgtgagccactgcacccagcccaagattttttatttcttgtgactatattttatacctttttctgctcctcctgttccatttgactgtcagctgtcatttttgctgaccatggcacctctagagcagtgatcctcaaagtatggttggtgagccagcagcatcagcatcacctgagaacttgctagaaatgcaaattctcaggccctgccccagacctactgaatcaggaactctggggatggggcccagccatctgtgtttcaatgagccctccaggtgattctgcagctgctaagtcttgggagctgctgctccacagcaactattcacaaccttggctgtccttgggaatcccctgggacccttaaagactactaatgcttatgtcccaactccaaagattctaattttgttggtctaggacacagttttttaacctcagcaccagtgatatttgggtggggggatgattatttgttggggttgtctgtcctgtacattgcaaaatgtttagcagcatcccaagcctctacccctagatgcgagtagcacacccacccccagctgtaataactaaaaatatctcagacattgccaagtgttccctgtggtggtggggggaagggggatggcaaaattgtcccctggttgataagcactggcctagggtgatggccaaggcactgggatatggaagagctcccaaaatcattctaatatacaggcaacactgagaactatgcctctggagagtctctattaatgaacagctctggatgtgcaatgggccagagcacaataagagctaagctttacaccactgggtgtagagtgagaatcagtccccctgtggtggagactcaggcagtttgctgaggactaacacacatgagctttagggcataaatttcacaactttttggctccttacatttttgtttactttctggttgtcaggtatgttctagaaaactaatgtaaacagatatgttccccatacttaagaggtcccaaccaatgagatcttgcattgcactaaatatagtggtgaatgtacatcctccatctggctctatccattctacaaacagggtgcatatcagtgtatcatatggtacaagttcttccctaaatctgtttttaatgggttaaaacatgcagcttgtcaattctatgatgttgattttgatacaatccaaatcaaccacacaaatgcaaaattcctatattaatctctgctgtttagaagagctttcattttcaggtggggatcaggggctttaactatatttcaactatagaaaaattccctgagttagaacaaagacatgtaaaatcctggcccagcagattgccttctgtgtctccacgattctttctgtggtgttcttctgtgatctgcttgagaagaggagaacatgatgtacatttagaccatgggatgtgcctcacctccaagggcctgccctgcagctcttaggaaggtgggcagtctcatcacagcccaaagtgagatgtctccaagcaaagagtaaatggcagcctctcttcagcctagactcttaaatagcacagtattctcccacttcctcaaacaactcgatggtaggtttctttcaacataaagagtgggagcactactttgagacactgataaacaactttcaaatagaaaataaatttcaaagtgaatgtgttttcagggcaaaattggtactgtctcatttcaaactatgaaaatatgatctgatttaatgagttggagtcatccattcatccagcacctactatgtgctaggtactgtgtaatgtccttggaaattataaatatgagggtggcaaattataaatattagggtacatagactcttgtagcaaaaataagctatgactgatctgaggtgcctgattaaccctttgaaccaatacgactcgtcagcttgtcagactcttttgggttttgttttgtcttgttttgttttgtttttttcattgaattgacagttgcttgttaacattagtgaaatcagtgagttctttgccatggtctaggatgtattctcttaaacagttacttatttattcctctcctagtctatttcattaacatgcttttaaaaatcaaaactttttgattaagcaatagaattgctctccagaaaattactccaggaaaaaaagatcataatggagtactaaaagatattatttccatatgttcccacttgttttctttttgtaaaaaaaaaaagcatatgcttctatgtacataggatgttttctggaagaaaacacacttagcaattaacagtggttgcctttgggcagggagtttgggggccttgactggaagggagacttaactttgcattatataagcttttatacagcttaatttttaccatcttatgtattatatttttaattttaagtgctagtaaataacaggatgcattcccagtagtccttcagaagctccaagtgcttctgctaaataagagaaaaccagtgagccccactgtttgcctccatgaggactcctgctcctgctcttgctccagcagagcaagctgaaaggacactttgaatgtaggactgctccaacactggttccatggaagagattaacaagcgggttctacttgaggttagatagttaatgagggcctctttgaggaagccacatggaaccagagaggaaaaggaaaagagggggacgttgcctacaggcagggacctaatttcctcctagcagcattggacacttactacccatacatcctttcagaatgaaggacatacaagttagggaagtctacacagtgattacacctaataattttctccaatgatttctttccttcccctttatctataattcccaagaagaatcaatgctcactcctaggaaaaggaaaaagaacaccaccaccaacaccacacctatttgtctcaaagaaagacaattccatgatcttttttgcttcccactgattccatgatgtctttcctctctgtccttctttatgcctaaccctaacctaatcctagttaaaagtttaaggaagcatgtaaaaggaaaaaatgtaattgagattggaagaatctgagagaatccatgttcatttgtggtttttctggatcattttcttagcacttgccactgagaccttcacaggatttcagagtctcccttattaagcaagaacatctttttcttttctttcattgttagatgtgtgaattgggaaatccattcatgtggattatcagggtcctcttaatctccgggaatgaacaaacaaacaattcaactgttccagagtatatcccataaccgtgcctacactgttttaattacatatatctgtggtctttgaagaattataattctgagccagaattctaaattcttattctataaaaagtagttttcaggttttcttgtttttatagggtgattcatctcagaaatagtgttttatgtctttacttgcaccaagcattaataaccagcagtcagcaatggcataattatttgtcagcttcatgaaaaccataagaaatgaaggcagtgtttgtgcaaagagttttgtggttgtccttggacaaaagtttatgaggaaattttgagaagacaccaatcgagactgtttatagtgagatgaagaagaaaccagaggcactattggattaaagaaaaaggttattttcaaaaactatttagaagaaaggaagtaatcacgaaaactaaagagagaaaacctctataatgaagttttatagggtcttagccaaaaatcacagagtgagagactgccctgtgtaaccaagttctcattctttatctacggggtactggtttcccaaactctttcaaaggactcgtgttatggatcacactgaccatggaattaaacctcacatcatcttttggaaatagtagaaaagaaattcaaagcttagcttagagttactatggcaaaaagaacttttcaaaaaaaaaagaaaaaggagtttgtcaagttagtaggatactgtttcctagtgagttaagtttaaattgagtcactaagcaaaaaattagaaaggaaatcaataccattttcacacttgaaaaggcatcatatgttcagcaggaacttccttcccccttttaggtagctgagctattatttaagcccatgctcctagtataatacctaattagacaaatacagagtactggtagctattgttatgtgtctgctacccagcacagccactagagggtgtccactcttgccttgcaaacaaggttggaaattgtcaacatggaagaacagatttttctgcatgtgataccaacagatcaaggtaaccacatttttctgtatagtaaggggaagtttgagcctaaatagagaaaagccacttacatcacatctactgaagcagagtcagccccttaagcacagaggaaaatgtaagttcaaagtggctttaggtgttagctagctgccaaaattagtagcttctacaccactttgtttttttccagtattctccctaacctttcattcttaatttcagagacaatataatctgccaattccagtagttgaaattatttgctttactcatggtttagtaagcacagataaaaaaccactgtcggcttctcagttgagctgtctcccaaaatcccaaacttttactactgtttgaaaagtaggcagcgtgactagttgatgtgagatcaaaggcacatctcttctgttattaaattgtattatataactataatatatttaatatatatgtattatattaatacactatattgatttttatgtattaaatatatatcacaatatattcatgttactacatattaataataataaattatatctgtatatctttccagactaaaaattgctgaggctttaaaatacgaaagaaaaaaataacaattctaatactcttttgctacagtgctaactgaaaagcactgtgaataaaatttagaagttgggacgcataactaaaactgtaagtgcccacatgctccgtgccagctctaccatttcttaccactgtgtctccttctttcagctgctggctgggcgctggccttttgatcacaatgactttggcgtatttctttgcaagctgttcccctttttgcagaagtcctcggtggggatcaccgtcctcaacctctgcgctcttagtgttgacaggtaatgtggttctttccctttgctctttggctgggcttagaaaagcatttttctcaaaaagaagaaaagtcaagagaattcgtgcccaggacagctgttgattagcttcaagtgaattaaagcattaaccatcttgcctttgctgtttagaattgccttccacatttgctgattattagccatctttggctcagacaattatgtacctagagcattttatcaagaatacccatttgacgcccttttggcaataaagtgaaaattaacatattagatggaataaactttgtgaaaaggagattccaggatatgcaaatcctatatttcacctggtaaatttatcataaaaaaagatactgttcaattatatctgtaatgtttaattaattgagtgagaggtaagtgcaccatattgctatgttcttcaccctgcctttttgaaagactgaaatgtttcataagttttaaaaagagtgcaacaccagaagcatccctttatccaattctgaaaactccatcaaatgtcccgaagtctttccagaatccgcacgcatgattgttaagcgttctctaaagaagcccttctgaattctgtgaacttctagatggtattttctttaccttctggttttcatagcagcaattataagaatgaaattaggaactttataacacattctgtggcactcttttatatttactataatctcacacaagtggtgtataatggcctatttaattagcctacatacaatttagaagaggttttcattctaactcattccctgacaatcactttatcagggaacctgagtctcatcattatagaaataaaaggctcactcttctaaagaacattaaagagtttacagatattctgttattttacatttataattattgttaggacaaaaattgttactgttaaaacataaaaatgtgcattcaatcagcaattagaaaattagaatggtatccttgttataaatttatgtcagctgggcacggtggctcacacctgtaatcctagcactttaggaggccaagatgggctgacttcttgagcccaggagtttgaaactagtctgagtaacataggaaaaccccatctctaccaaaaatacaaaaaattagctggacatggtgatgcatgcctgtagtcccagctattcaggaggctaaggtgggagaatcacctgagcccaggaataaataaataaataaatggctataactgtgaaacacaaaataaaaatgttattaaaaataaaacacaaaaaataatttcattagtaatttaaaacacaatcataccattgacaaaaatgttcccattgcaatggtaaacacaaagatcagaaataaccttatcatctattaataatacccttcagtgatttgtaggaaagtctagggtctctttgggttacatctacattatattagatgttaaaggctgctgcataaaaacacttacataccataggtggccactatataatcttgagatcatggtaccttagaccataaaaagctgaataaacacttatgatgtggatttgattcactaataaattctcactctgatgttcccactcccagcatcccaatatcatttcttctttcattcaaaatgttatattatctaaaaattaaaagcattaaattgcacctattacattgctaatacaagtaaaatttttcctgtattcatcaagctgcatatcatcaagttacatttctttcagagatgtaaccatgtattttcattataatatctaattaaattttttagttataactctaaaattcatgtagagaaaagaaatgggaaaataatcatgacattttgaaaaaagaacaatgtgtcctacacacatgttcttcctatatgatttttctttttattaaaatacagggtcttgctctgtcacccggactagaatgcagtggcctatatggtcattttaaatgctataaagctacaatgttttaaacaatgtaatgcaaacccatgaacacactgacaaatcagtgggaaaactcgactcaggtgctggaatacacaagaatgtattaataatataggctgaaatcactttgaatataatcgggggaggaaagatttatcaataaattatgctatttagccatctgagggaaaaagcatgttaaagtcttctgtacatatcaataataatatttataattattaccatttattgaatattactaagtgttaggccctattgaaaatactttacaaaaattagtttagggctgggtgaggtggctcatgcctgtaatcccagcactttgtgaggccaaggtgggcagatcacttgaagccaggagttcaagaccaggctgcccaacaggtgaaaccccatctctacaaataatacaaaaattagccaggcatgctggtaggcatctatagtcccagctgcttgggaggctaaggcacaagaatcgcttgaacccgggaggtggaagttgcagtgagccgagattagacaacagcagctgcactccaggctgggggatggagtgagactctgtctcaaaaaaaaaaaaaaattagtttatgtaactgtgatagttggtgtgttatctccactttacagatagggaagctgaggttgaaagagattaaccaagtcagcatggctactaagtgctggagccactaatcaaatgttggtagtctgcattcttaaccactatactcaagcatgtaaaaactcaaaccattgttgatgaagaaagccaaactctgaataatagttgaagagatgtattctgaaccaaatgtgaagaccatgacccgtgacacagcctcaggaggtcccgagaacctgtgcccaaggttgttgagttacagtttaattttatacattttagggagacagaagttacaggcaaaaacataaatccatacacgtaaggtttacagtggtttggcctggaaacatgggacatcttgaagtggaggttgggtgaggagggcagggtggtgcttccacgtcacaggtggattcaaagatttcctgactggcatttagttgaaagagttaagttttgtctaaagatttgaagtcagcaaatgctgacaagaagtgcttggggttaggataagggggttgtggaagccaaggttctatgtagatgaagcctccaggtagtatgagaatagatagtaaatgcctcttatcagatcttaaaaggtgccagactcttagttaaatctctcctggatcaggaaaagacctggaaatggaagggaataatctacagaatgtaaattttctccacaagagatgcctatacagggccatttcaaaataggtcaaagaaatatattttggagtgaaatacttctatttctttcagggccttctctctgtcacgtgatgctatactagagtgtgcttgggatttggtatgtcactgctacagagagtctgttttgttgggtgtttgtttttttttgttgttgttgtttttttgttttttttgtttttttttttgagatggagtcttgctctgtggcccaggctagagtgcagtggcttgatctcggctcactgcaagctccgcctcccaggttcacgccattctcctgcctcagcttcccgagtagctgggactacaggtgcccaccaccacgcccggcttattttttgtatttttagtagagacggggtttcaccgtgttagccaggatggtttcgatctcctgatctcgtgatccacccgcctcagcctcccaaagtgctgggattacaggcatgagccaccgcgcccgtcctgttttgttagtcttaagatctgttctaacgttaatgctggcctgttgtgcctaaattccaaagagaggaaagtatgaagaggcaggtctgacatccccttcccatcatggcctgaactcgtattttaggtttctttgaaatccccttggccaagaggaggagtccattcagtcatttgaggggcttagaattttatttttgtttataccataaaggagtagaagaaaatagactatctttttgatctctggaaagggaaggaagacccttctgaactttaaaagaatggtagaaatgctggacaaaattataaatgtattttaagatatagtattttaaaacctttggattaaacattcataaaacttaaaaaaaaaaaaagtagtaagctaggaaaaattgtcactcctcccacaggcccagggtgcagagctggttcctcctcacttttttgttctgcctcctctttcttccttggggggatctaggagcatcatgcggagcttcagtcatgcccagtgttgagtcggggagatactgggaaagttaggtcatagattcctatatctagtgtcgggtcacctcacccaataccacctcctctcttcatctcatgcatgaagaaaaagaaataagatgttccatcacgataaatagttgtgtatcaaatgaaatgtgagtcattcttagttaaaaagaaaggaaggactgaaggaaggagggaaggaaaagaaagaaaagaaaaaaaagaaaagaaagtaagaaaaaatgatgccaagaatctatctcattaagatttgatctgagttgtagatcaaggaaatgaactattttaaaattccactctcacaaaaatcagccttaatccaaaaggtctttccttgaaaataaactaatcattctttgttccctagacacacactttactatttttacatttcatttggtattgaccctaagcttcaggacttgtatgtagggaatctatttgacatttctatttcaaaagctttcacacgagagaatgaatcattcacacttaattcctgaagataagattccatttgctttaactcttaatttggttgcattatattctactactacaaaaaaaaataaaaataaaaaataaaaaacactttttaaaatgaaacaaggaatgaaaagggagtttggaacctgttgcagtttgtgaatccctgctttcattttatgagctgaataaattatggcccaggacaaagagttcccatgatttttttacacagtattttaaaaacataattatctcacatttcagagttgtttgaaagaaaatgagagaaaccttacatccaagttctataggatttctttattacttcgtcaatcaatgattacagaatgatgtaagatcaaagaaaatatctagctttctcactatcagcttttaatctgaataagctaaacaggactgagagaaagcacatgatttctgccagaatggataggctttcattgctaatttcaactatggacttgtctcagtttaaccttttgaataattcctccgcaaatctagtttcacatccttggtcatttgagaaaaagacaaatcaggaactgaagaaattcagaaacaaattttgacccctatccagctttcttgttgaattatctttttaattctaaggcagtatacttctataatgaataaacttttcccaacaaaaatgaataaccagccattaccagctattaaaatagttatttttacatgctgaaagtgacaagttttatatattactttgagtttgtttggaggcaaaaaaaaaaaaagcagcagcaggagaggggtaggagggatcactgttgatctttgcaaaatcgtgttaaagtggaagatgatgatgatggggtcagaccagtaaaaaggtctgggtacagatccaacttgttaaaagttgcctggggaagaaggctataaaaagataaaactcttttaacaactattccagagtgatgtgttattagatacttggaaaagttgcaaagatccattaatgaggcagctttgttttatatggctgaaaagctgatgtcagttcttgaacccatcatttcaaataattgatcagtggtctctgtgatattctcaaaggtatatcctaactcaagaaacatgaaggtggttttcagaaaaacctctttgttagagttggacttggtttctccttattttcctggtgttatggttttctattgcaccatgacaatagtgaagacacagaggaagggtctgagccagaagacatgagcagggaactggacaaagtccaaggctggctagggcaataggatcttatttgggagtctgttcactatcgtactgagttatttgttcttttatcttattctattgtcaagatcaggcaactggttaattttgctaccccacttctctttgataactaccccaaaacttagcaattcagaacaacaaccgttttatcatatctcaccatgttgaaggtcaggaatttgggcaattcttctgctccttgtcacgtcacctggggttggtggacttcagctgactctgagcttgtgtcagaggtccaacactcacatgcctggcaccttggcagggacagctggatgtctgagctcagcagagcccatctccccctccatgtagtctcagggtcctctctgtttttgctccagcaggctcaaggctcctttcagaggccagacctggaactgcaaaacatcattctagccacactcaattgatcaaagtagtcacaggccagctcaatttaagaactcaactgaagaagtggtaaagcatttgcagctgtcttttaattcaccacacctgattctcttctaaattggaattggccaagcagttgcagtggctcagccttaggaggccgaagcaggaggatggcttgaagtcaggaattcaagactaccctgggcaacatagcgagatccttgtctctacaaaaaatatttttaaaaattagcctgtcatggtggtgggcaccaatagtcccagctactagggagcctgagataggaggatcccttaagggagtacaggttctggaggctacagctatgattgtgccactgcacttcagcctggatgacagagtaagaccctatctctaaaaaagaattcttcctgctagcatttagcttccaaacctccatatggtatgagagatataaatcattaacaaccattacaaatgatcaagtttgctgttaattaaagatgtgcagaggtaaagataggggcggcactgtaccttatggaagtggtaaataagaataaataataaattctaacacaggcaagcattcattaacaggcacttggtagaaacttctttcttaaggcacttcagccacctatttattccctgatccagtaatcccactcaagataattaatccagaaaaatcattcagaaagagaaaaaaaattatgtgtacaaacaagcttataggcgtcttattcacagctgtgaaacactagaaatgatgtgaacatagaaaaaaaattcaagtaaattatatcaaaatcttgttatactgtgtagccattaaattgataagggccacgcccgtgtagaaacataggagagtatttttaatgtaaataaagctaaaatttaaaaattgtgagtcatatgattatagtctattcaaactatgcctgtgagaatcaaaacaagaaaagaataaaaaaatagattttgttgaagtggtatctttttaatttgttttattttataatgttttaaagttctttcaagaataaacatttttaaacttaatgactatcccagaccacaccttcaagattcaataaacatgcattaaatgcctctggccttaataacatgtaaaaatctatttataggcacacgcactaacaaacatctttacatgaataaaatatatattttatacttttattttggcctatcacatgacagggtacaaggtgatataatgcaaaaaggctctaccgggagttggcagccctgagccatggtccagacgccccaggttcactggagaccaggcagaggatgcgacaagatgccagctctcaggttcccaactggaacatatggggcagaaagatcagcccatagatccctcctttaaattattgaatctggtcctctaaaagtattagcttttaatctgtggcctaattcatggctagcttgaaaaataggaaaatgatcagaatgtagtgtgctattagctttagccaattaaggtaaggtaaggttacacagtacatctgtgtaaacataactcttagaattatgctgactgattcttcaccagaattccctagagattaagaattccctagccaattaaggtgaggtaaggtacatgcatggtaacaggcatgaaaacgccaacaaaaagacacttcattcaacaggtatttatttggcacttgttgttctaggtattgtgaccaacatacaaaatgtcagcctttatgaagcttatatgctttttttcacttttttcttttcttgctttcttttttttttttttttttcagacagggtcttactctgtcacccaggctggagtgcagtgccatgatcagggatcgctgcaggctcaacctccctgggctcaggggatcctcccaccccagcctcccaagggaatataggcatgcaccaccatgcctggctaattgttgtatttttgtagagatggaatttcaccatgttgcccagggtgtcaagcgatcgcccccctcagccttccaaagtgctgggattgcaggcatgaaccatcgcacccggctgggaacttacattctaaaggagaggggagagcatagatgataaaccaaataaataaatagaacattgttggtcacattgtagtgctatggggaaaaatgaatcagggtgagagagacaattctggagggggagttggcaaacttaagtagggtctccagggaaggcttctgtgaaaactgcaattgagtaaaaaccggaaggaagtgaggaagcagctctgaggacacctgtaggcattctcacaggggtgggaagccactggggggtttggagcagagggtgctatggtctgacgtaacagcctcactccagttgctatgttctgacgtaacagcctcactccagttgctatgttcagacgaggctgtggcaaagcaaggtggacataggaagatcagttaggaagctatggcaatcatcaaggcactgcgataacaggtacgatggtgaaaagtggttgcatttggatatatcttgaaggaagttgttgcaagatttgctgaaggattggatgtgtggtggaagaggagtgaaatctaacccaatgtttggggccagagatgggaacaactgcagaaaggtttagccacaaggaagacaaggagtctgatttgggagtgtttagatgcctgttaggtgtcctagtggagctcgcaagtaggcagttggaggtacaagtctagagttaaaggtgaggcaccaggctagaggtataaatttaggaattaccgctagatggatagttaaatgacattaaagccacgagactagatgagatcaccaaaggagagcgcatagacagaaaaaacgtctgagcactaagccctcagacaaatccaatactaagaatttgtggagaaagcggggtccagccaggtaaatgagaaggaatggccagtaagtcagaaggaaaactgggagattgtggtggaaatcaagtgaagaaagcatttcagagaggagggattctttctggaacagcagttgtcagtggtggaatctacacttgcagattttccatgacaactgaagatgtcatggatatacagagagagatgtatatacatactgactagatggaaggctatttataatcgcacctcatgagaaaagcatatttgtgtgtcagtgtgttgtgccattatattcaaaatagaaatcagttttgaaacatccagtgtttcatggtttccatacatttccccacctccattatcacaaatgattgttcctaattgttcttatggctgttttccccttatctcatggagatgttatcgagatctgtgtgattataaatggaaaatattctaattttcagtgagtgggttaatgaaggagcagactgatcatgaattatttgctaaactagactctaaaaatgacttctacttatttgtgaatgttgaatttacattggattatggatgtgtaatattctgggaactcatggcgctttataaaaatgaagttggtctgtgaacatgttcatcataagaacatgttgaccacattttattccttaagccacttttcaccccaaatcctggcaaggaaatcaggttttcttactctctaatgaaacagggtgttttatttaaatcaccttccctggtaaacaacctgagagaagggaagaagaaatagatgtaactccgttgacagccttgggatatagacatcctgtctccattcctcttagctttactgggtatcaggctgccagtttaacaagggaacaaagaaaaataaacaatgatttttatcccactggacaatttatggaaataaccataaattttaaaattcaatcttgattatatcataaaaggattttcttggtctgtttgcatagctgtattttatcccattttgaaataatctggacttttttgagatttgtattgtacacaaatcttatttaccctaaaaatcttttataaaacatttctccagtaaattgtgctatataatatgccatgtggcatcatcgtaaaatacccaaatctgtacatgctcatctctagggaattctggtgaagaaacagtcaacataattctaagagttgtgttttcacagatgtactgtgtaaatgtactgagacagtacactaaatataactgatgggggcttgtcttggtggatatgggtagcttgtatgttgccttggctttattgattaatcttctacattactttgcatgtcctgcaaacccatgagcacctgtctccaatgcattcggtctgttttacagccttctggcactatctaatgaaaactataaaacgaaaatgtttcttttccattacggcagcaacaaaaatttcaggaatgaggccacaaaaataccataccacgtcacaggtctcttcttaatagtaagtctaaaagcagttagcattagaccttcacatcaggtcaaagaacatagaatttctaaaccaaaccttccttagacataacatttaaatgtgattattatcactaaaatagtgaagtaaaaaatagggtgagcataatttcttattatcagacagttttttgattgacataatcattcagtcacatttatgttatatactctgtttgaaccattcttttctgttagattgtaaaccctaaagattaggaaccaaagtatctttaaataagttttatctgctctagcacagggccataatgggagtgatataatccctctttgacatttaccacaaataggtatttactaaaactgccacctggtacaagcccactgtgctcacataagaagggaggaaacaatggaatatctgtggtggttattcactcaaggatatctagacccacttcatagataatgctttaaggtttctttttttattttataaagaggaataacatattactataacaagtaccagcagctttcatgatccctcccatccatccaatttctcccccagcttaaaaaacataggcacaactgtctgttaccgccacattctaaactctcctaagatttctctagaccaaataaagacctcagactcaggcctgccacgcagttgatttccaaatgggtggaactcttaaaagccccacttgtggccgggtgtggtggctcacgcctgtaatcccaacactttgggaggccaaggcggtcagatcacaagatcaggagatcgagaccatcctggctaacacggtgaaaccccatctctactaaaaatacaaaaacaaaattagccgggtgtggtggcgggtgcctgtagtcccagctactcgggaggctgaggcaggagaatggcgtgaacctgggaggcggagcttgcagtgagctgagatcctgccgctgaactccagcctggcagcctgggtgacagaacaagactcagtctcaaaaaaaaaaaaaggccaggtgcagtggctcactcctgtaatcccagcactttgggaggccgaggcagacggatcacgaggtcaggagatcgagaccatcctggctagcacggtgaaaccccgtctctactaaaaaaaaaaaaaaaaaaatacaaaaaattagccgggcgtggtggcaggcgcctgtagtcccagctactcgggaggctgaggcaggagaatggcgtgaacctgggaggcggagcttgcagtgagccgagatggtgccactgcactccagtctgagcaacagagcgagattttgcctcaaaaaaaaaaaaaaaaaaaaaaaaacccacttggttttcataccaagactcagaaaattcctaaaaagacaattactggtattggcaatgaggaggaacttcccagcacttacaatttttgtttaattgaaatacatttaaaatttcctaacaacttggttccattaccctttttttcaggtacagagcagttgcctcctggagtcgtgttcagggaattgggattcctttggtaactgccattgaaattgtctccatctggatcctgtcctttatcctggccattcctgaagcgattggcttcgtcatggtaccctttgaatataggggtgaacagcataaaacctgtatgctcaatgccacatcaaaattcatggaggtactaaacgtttaaaaggaattaactggggaagggaggaggtcctccgttagacttcaccatcttgagacttgatgacatcgccacaatgtcaagtgtggtttcttctgtcaaatattcctcagttgcatgaaaagtagatgttaaacctgtgtctagattcttgaatagaacagttatgctggctttcactcttgtattataccacaatggtagacatatctgttattctgcaccaaaccactaagaataccaaagcaaatttactaagagggactagatgtgtgtgtgtgtgtgtgtatgtgtgtgtgtgtgtgtgtgtatatatatatatacatatgctatttgtttttataataatgaatacaacacaacaatttccatctggaagacgtgctgatgtttatcttatgtcacttggggagaagcacatttctcacattctttaaagatggatttactaattcaaagtagagagtagtacttacatgtacttatattagtacggtttctatgtctaatatacaaataatataaaattgtagaacttcttaaaataatattttggtttaacaaattcagttgttggtttttttagtacacctgaccatattaatgtttttctgaaaagcttaatcacatgactgttttgggaaacctatttaaaatgcatcttttctttgcaaaactagttacatgtggactgaggaggaaaaccaaaaggataactatttctcttaaatcagtataatttagtgctttgatgtaagtttcatgtagctcacattccacatgtaattatttacagacatctcaaggtatgctttcccaacttggaaaattcacagaattcgtggttttacagttgaccagttatcctgcttggaaattcttgttttaaaattaaaagtgctcatgaaaactgccaaactaacaacttaaaattgaagtttcttactgggttagtcttcaaagtgaaaaacaaagtagacagtaggagattgtcagaatttgggctgtgtgaataagcaatctagatattccagatgcaaacattagagaaaagaggttcactataagaaggagcttactaatccttacagccagacaaaatgaaatgggctgtttcataaagactgtctcctatctagacgtgttcaagtaaagggtagctacccttcaggcatgggtgggctagacggttgcagtaaagggtatgagttgaacagataattttttagagttcattccaagtctgaagtcctgttctctttttctaaatttatttcccctattttttccattcttgctcttcaactttaccctagactgatggtaggcccctctctacccatgttgatgacatcagttccaaagagatgcattacccatttctctgtgggcctttgccatggagggggcaggggactccattcagccctctcaagggtcagcctctagaccctctgcagctgtttctgcatcatttatacccagccagcaaatgcacccggaaaaagaggatacaaaagaagggagaatgggtgctcaaaggagtgttcgtgttgcacttcaaaaaagagagagagagtgcttctgactttttttaagttcaggactgaaatctttctacagtgtgttgggaacagggaaatgtttgtgtaagcagtttagaataaaccaactcctttgggagtttgcacttaacctgaggatagaattcagggatctgtgaacttggttggaaaagaaacaacatgtttattttcactaacttctaactgaatttattatttccttctattatgaatgtacccaacaaatcaccatagtgtttaccagtatcatgactttttcagtaataaaaatagcagacattttcatacgatataacacttgtataatctcaaaatattatttatgctcttcagaacttcaacacttcaacagttcggtagttattagaaccatcactaggtttgttatttgtgaataaacacaatattactatatctaaatttaatttctaatattttgatagctgtgctttaatgtaattggtttccattgcaatcttatgtattttattttatgcatgtaaaagtattattctcagaagggattatagtctttaccagacttccaaaagggtctgtggcataaaaatagtcaagaactcctcccccaaattttttgtctttaggaaccatttttagattattttaatagccatgttataaatgcagccttcttagcctctttctatattcagaaactgtcccattttttacagagcaacatgattattttttactgtgggaactgcattgtccttagtaaattaacaatctgaagaagcactataaggaaagaaaaagcatttcgtcccaagttggtgattaattttgtgggaagaagaatttagatatcatttttcattttccatttttatagggtattaagttttcttctttaagcagaagtaaaaccgaataatctcggtatttataaatcctgcccagttagataataccagatatgcttcagttgagatatgctgcctcaatagtttccaggtggtaagtattaaaggagggagaagagtatagctattgaagttcaaagcggctggctttaaggtcacatagcaggcataccaggcagagggttaacccctattaaccaaagctacacagataagccattcgtaaccttcaccgtttcaggttaaatacactttcaccacaatagtcaaaagtaaagcaggcgctaacaaaattttgaggttcatccagaaataaagataaacatgtatattcttttgtctcaaaatcatgttttatgagctttagaaggacattatttttattgattagggctcttccgttgtgtagttgaaaccttcaatctatgaaaagtatcaagtatccttgtcaagataatttttgtaagtgcagtttctttatgtgctgtttaaagccaggataatttctgaagcttccaactgaattgagttttgagccccactcccaaacccatcactgcaaccagagagcatgattttacagatgtatctgcaagtttaaagaccttaaagctaccagaggcacagcatggttaattgacatgactctgctcctccttttctctttttttttttttcactttgaagttctaccaagatgtaaaggactggtggctcttcgggttctatttctgtatgcccttggtgtgcactgcgatcttctacaccctcatgacttgtgagatgttgaacagaaggaatggcagcttgagaattgccctcagtgaacatcttaagcaggtaaatcccataacatcatgaaaatctggccaggactggttagtccttgacagcagcaggcctgcaaataccatctttagtagaattagcctgatttcctaaaataaaaatactatcctgtaactgttttctttatagtaatagtgttagaaatttcttttgtaaaatgggaaacctgcttgtaaaacaagtggtcctgaaggctgggcccaaatagagaagaactatccctctattttgccaagagtgtactgagcatgtgtgtatgtgagttcgtgcattcaattgggcttgaaactgtaccaggacacaaaaaagcatgtaactttctccccatgcagatttacagtcttgttgtagaaataaaatatgcatgcaaaacaactggaatatagaaccacaggtgtggtaaaagtagcctgtgctatggaaagccaggaagggtatgagatagagtcatggggaagctgttcatggatgagggggattgaaccagaccttggaggataagtgggatttgatggggaagaagttgacagagagcatttcaggtggaagaacaggagtctagttagaacgtggaataggaaccatgcatttggggaatgggaaaaaggagatgaacctctctagagcaatgtctaatgtgagacttatgctaggaaatgggatcatgtacattagaagaggtaaagtgttggaggacccaaagttctagaaggaatttgaacatgtcaataggaggctaatgttggtccctcctgggtgaaattagaacagataaagctgtgggctttcaagggcaaaactagactcatacttggctctctgaccttgggcaaattgcttaatctctctgaacttctagtttctcataatatgtatgtaataatacatcatggggattacctgagacatataaggtgcctaatagtacccagctcctagtaggtattaagcaaatgttaatttacattaattctaagaggaaacctaggacttcaggtaagttccctgttgcaacagaaaagtatataatggtggccaactacaccaaaagttaatgtgagttgttgatggagtctgtaaatctgtcctatataattaccatgtgcaagcatagttcctcatcagcaactcttcaactactatactgatttttctgagcttcagcttttcatctgtaaattgggcataatatatgaatcaatagtattatgaggatcaaaaggatgaatgtgtatgcatgtactttataaaatctaacatgccatacaaatggtagctattatctttcattgacatttagcaagaagattacattgagaaaccttagtatgactttgttcaggcatgaaagtttcaaatactccaattgcttaatatgtttacaattatttcctctcattcttggaatggaggtagttagtatgggtttgtgaaaaacagtgttttaaaatatggatttttgcattcgcaccatgattgagcctgtttaagctatgagtggtatttgctgtggaaataattaaatagttaattatttaattttggaataatattaattatttaattgtggaaagaaataattgtcatatgctgcttcatgtttacacagcattttttaagtttttaaagtgcatttccatttccatgtctttttcttatttgattcctccaagcaccctctgagatcagtaggatatatattctttattatacaggtgatttagaggtttgctcaaccaaatggagattagaacccaagattttgtcctcatgcagttaacgttccttttggtgccactcaaatctgtagcaaatcctaagtacagaagagcaagtgtggctgaaagtcctgcagatgggactgcgggagaaacagcatagagcacaaaaccttgccatcttgactaatactctgtggggctcatagttttgcttcttgcttggttgtctctaatttctcctcatcataatgatgacagttttatcaagtaggggttgtgttcggatgctgggaacacaaaacccaaaataactgttagttgaccaagaaggagtttatctttctcccatagcaaaaagttcagacatcaagatttagtggtcaagccaagttagaggccaggtatctactgttttgctgatctttgcttcagtctcaggagactgtagcagcagctctacttttatatctgatttccaagcagcaagaggggaagaacagaaaacaacccgtcatgggtgtgcatcaaaagagtgtccctatacttctcagtagctcttccggaaacccatgcaatggtttctatttcatctaacgggtcaaaaccctgccaagtggccatgtagataattaggccaggttccccagctgccttaacaaatcaagaccagagtgatggtaaggaagacaggagaatggatattggttaagcaaatatcagactatcatggcagtgtactaatactgcttttaaaagcgttatcctctttgagtatgcactcaggaaaggtaacctctcccctaatacactgcttttctatttttctgggcacactgtctttctggacacacaaaatgacccttttaaaaagagcccccattcctgaagatttgaatattttatttcttccctcagtcattactccggagccatatcccagctagcccaataactatgagaggttaaagaactcccagttcctttagctagagtagcgagttatgaaaactgccccagaatattttgaatggctcagccaatcatgtgagtttattgtaggcttcccggacttaatgttatatgtttcaggttgagccagcattacccttccagaccctgtttttaatcagttttattttgacattaactgatcccagttacagacaagttgcattttgtgttcctagtcaggcttctaaatgcatgcaatataatactcaaataatgcacaccaatgaatggttgcagataattcctaatttatagattttctgatcctgagcagactgaaaggcatgcaaaccttccatgaagtccgtccaaggtcagcatgtttcagattttctagtcatcactgctgataatcctttaccctcatccttctgcttgcaaacaacatataatatttttatatgtcattaagaaactacatgtcattaagaaaagaatttaaagagcaaaaaatcccaataatagctatgttcaagatcaggaaaaggaaaaaacatagtgctatgacttttccttttctactccccactcctattttgttttctccaggtctttgttgatttgtccatgcaatatcatgtgatgttcagtctccttgccttccatgccatcattaatgctaattagttacctgttattaagagtcattagctaaccctttcccccatgcagtcacactccaccccactacacacacacacaggcagactcagccacctacacacacacagctgcagactcagctggctcacctccagccagtttccacctctctcctggcatataacctccgtcctggccctaataaccaacctgaggcccccatccttcctggaagctgcccagaagcatcattagcaattccttcgttagaacactgaccttagaatcttgaagaggtagaggcagtgtaagccaggctgttctcctggctcttctttgaattattctttctctggtgtctgctacttcttggtactgtagttcttgcatctagtataaaaacactaaatttgttgtcctatttttttctcactttcctttagcgtcgagaagtggcaaaaacagttttctgcttggttgtaatttttgctctttgctggttccctcttcatttaagccgtatattgaagaaaactgtgtataacgagatggacaagaaccgatgtgaattacttaggtatgatcctgtgtactcgctagaaaattggagtttctcagattttcatatttataatacttttacaaaaccagctactctacatgcccgttagccctgaaaattaaaactgcaaagttgatttttttctttagctgacatagcctataactgatcccaaaatgtgtgcaagccacatctgttatcttgcccctcccctcctgaggctgtgcataagggtttgagctaaccaactagtgatgtatctgtaactgtcctgcaaaactgaaactgccgtttaaacaagcactttttacaaaattctaactgccacccatacgaaatggcttctgggcaagaaaaatgcttattctaggaagaaatgctagtgagcagattttaaaacaatatattctaattattctacaccattttcttttgctctagtttcttactgctcatggattacatcggtattaacttggcaaccatgaattcatgtataaaccccatagctctgtattttgtgagcaagaaatttaaaaattgtttccaggtaagatgatttttcaagtattttttaaagacaacaaaatgagtatattaaacagtcaacagacacagccaattccagttgtaatattactttgatcagctatactactttttagcagtgaagtgaaaatcatgttttattacccagaaagagagtcagattgtcggcataacagaaaagcagttcctatttagacaaccacatacaaagaggttaaaatcaaaaggactaaatcacatgccagtttagaaccctcctttagagagaaatgtttcaatgtatgctccaggccacagagagtacataagacctattcataccttactttgtcttagacttgaaccaaagtcttgacaaaatataagctctattgttaagaaagcgctcactgatcgagaccatcctggccaacatggtgaaaccctgtctctactaaaaatacaaaaattagccaggcatggtggcgggcacctgcagtcccagctactcggagaatggcgtgaacccaagaggtggagcttgcagtgagccgagatagcgccactgcactccagcctgggcgacagagccagactcagtctcaaaaaaaaaaaaaaaaaaaaaaaaaaaagaaaggtctcactaaatgctgtttaattgtgtacttagtaatagaatcttcaaggaaagtaaatgcttattgctgtgggaatctgaacaaatataattttattcaaaatcagtttccttctgctttcaaacctccagccagctcagccacccatgtccttcagaagctctaagcctgtcttattgatgtgtaattttctggttcctgaaatcattttagcataggcttaatcctcactggattttgttatcttggaccaggctgtttaactttagcttatggtacatatgaggcagagtgcggtagaggtcaagaatgcaggctctggaagcaaagagcctcgatggacattacagccctgcacttgctaactatctaccccaggtagtgcctctcttgctttttcagtttcctcacctataaaattggatgatcacagtatctctctcataaggagggtaatatatgtaaaatgcttgaaataataagtgctcaatatgagttgattactattagggacagagtagagaggaaaaacacagtaacgacctgcatggaacttacagtctaaacagaggcagacatatattaaccaaggaatcacacaaacagatgaaactcggtatggaagtttggggccgtatttctgaggtcttcttggaaatgtttgccagtcacaaaacactcagcccaaaatggattgactaacatgcaggttaaaattagtacattatataaggtgaaattaattattacttactcattaatttacatattcattgggggagggaaaatcaaggtaaaaattatcagaaattaaccccactttttgatgaatcttcctaaaaaggcagtatatccaagagaaagagcccaaatctagagagtcctgggttctaattccagttctaactctcattatcctctctggacctcactgtcctcattcataaaatgggggaatagcataaaatgggagaacatccaaggctgttgtgaggatctgataaggtacctggtgcggagagccacacaggtggtgcacactgaagaaacgctaggacccccccaccagcccagccctacccgtgcctgccccaagctgtggagagcccttcctctcacctacagtgccttccctttctcttgcacttggtaataaaattaaaatgagaaacaagggttctatttctctgcactggaatggacagtgtaactcctgcctggtgataacaggctctccactctaggttactgtcaaggttcacttccctcgaatgcgaatggacatttgcccctcattagcatggcccagggccgctgtgtttggccgggaatgggctggtaggctcgccttacttcgagtctgttccttcccccagtcatgcctctgctgctgctgttaccagtccaaaagtctgatgacctcggtccccatgaacggaacaagcatccagtggaagaaccacgatcaaaacaaccacaacacagaccggagcagccataaggacagcatgaactgaccacccttagaagcactcctcggtactcccataatcctctcggagaaaaaaatcacaaggcaactgtgactccgggaatctcttctctgatccttcttccttaattcactcccacacccaagaagaaatgctttccaaaaccgcaagggtagactggtttatccacccacaacatctacgaatcgtacttctttaattgatctaatttacatattctgcgtgttgtattcagcactaaaaaatggtgggagctgggggagaatgaagactgttaaatgaaaccagaaggatatttactacttttgcatgaaaatagagctttcaagtacatggctagcttttatggcagttctggtgaatgttcaatgggaactggtcaccatgaaactttagagattaacgacaagattttctactttttttaagtgatttttttgtccttcagccaaacacaatatgggctcaagtcacttttatttgaaatgtcatttggtgccagtattttttaactgcataatagcctaacatgattatttgaacttatttacacatagtttgaaaaaaaaaagacaaaaatagtattcaggtgagcaattagattagtattttccacgtcactgtttatttttttaaaacacaaattctaaagctacaacaaatactacaggcccttaaagcacagtctgatgacacatttggcagtttaatagatgttactcaaagaattttttaagaactgtattttattttttaaatggtgttttattacaagggaccttgaacatgttttgtatgttaaattcaaaagtaatgcttcaatcagatagttctttttcacaagttcaatctgtttttcatgtaaattttgtatgaaaaatcaatgtcaagtaccaaaatgttaatgtatgtgtcatttaactctgcctgagactttcagtgcactgtatatagaagtctaaaacacacctaagagaaaaaagatcgaatttttcagatgattcagaaattttcattcaggtatttgtaatagtgacatatatatgtatatacatatcacctcctattctcttaatttttcttaaaatgttaactggcagtaagtcttttttgatcattcccttttccatataggaaacataattttgaagtggccagatgagtttatcatgtcagtgaaaaataattacccacaaatgccaccagaacttaacgattcttcacttcttggggttttcagtatgaacctaactccccaccccaacatctccctcccacattgtcaccatttcaaagggcccacagtgacttttgctgggcattttcccagatgtttacagactgtgagtacagcagaaaatcttttactagtgtgtgtgtgtatatatataaacaattgtaaatttcttttagcccatttttctagactgtctctgtggaatatatttgtgtgtgtgatatatgcatgtgtgtgatggtatgtatggatttaatctaatctaataattgtgccccgcagttgtgccaaagtgcatagtctgagtaaaatctaggtgattgttcatcatgacaacctgcctcagtccattttaacctgtagcaaccttctgcattcataaatcttgtaatcatgttaccattacaaatgggatataagaggcagcgtgaaagcagatgagctgtggactagcaatatagggttttgtttggttggttggtttgataaagcagtatttggggtcatattgtttcctgtgctggagcaaaagtcattacactttgaagtattatattgttcttatcctcaattcaatgtggtgatgaaattgccaggttgtctgatatttctttcagacttcgccagacagattgctgataataaattaggtaagataatttgttgggccatattttaggacaggtaaaataacatcaggttccagttgcttgaattgcaaggctaagaagtactgcccttttgtgtgttagcagtcaaatctattattccactggcgcatcatatgcagtgatatatgcctataatataagccataggttcacaccattttgtttagacaattgtctttttttcaagatgctttgtttctttcatatgaaaaaaatgcattttataaattcagaaagtcatagatttctgaaggcgtcaacgtgcattttatttatggactggtaagtaactgtggtttactagcaggaatatttccaatttctacctttactacatcttttcaacaagtaactttgtagaaatgagccagaagccaaggccctgagttggcagtggcccataagtgtaaaataaaagtttacagaaaccttgcaagtgtctcttcatttttatgtagttttccatagaaaatgtttgttacataatgcctgttgcaaacctctccttagtaatatcctggaaagcagtttactatcaaacaggtacttcctacctctattctcaaccaacctattttgttgtactgagcatttaactctgtcattcattccttcatttaccttttcagtaagtttaattgggcatctactatgcaccaggcattcttccagatattggggacatagtaaacaaaacaggcaaagtccctgattccatggagcttgcattctaggcaataaacagttacagtcaataagcaatatattaggtagatatctggaggaaaagattcatatatatccaactgtttacttgacatccacagttggatggctagtacaccataatatatgcagaatgaagctcctgatatcttccagcttaccctgcctaatattcctctgctcagttatagacagtcccattttttaggagttgttcaggataaaaactttgaagtcattgctcattccttttcctcacaccttttagccaacatctccataagtcctgagagccctatcttcagaatatatccagaacctgaccacttctctgtctctgcctctacctccctagtctgagcaccatcttctcttgccaggataaccacaataggctcctgacatgcctactcatgtccagccttataaacagctgtattccagttggagccagtctctcctctcccataagtgattaggttaggcgaggctgaccagcatcctctgggagtttctcagtaagaactaagtcagatagagctattttcctactaaagcaggactgggaagttgtgagcctgggcgtgcctggacgctgtggttgagcattacgaagaaagtcaatctagagtgtcatgaagatgaagaagagcatcaaagtccccagttctagctctccttgatgctttctcatggcttcagtaaacaaaccaacacatttaccttttcacctacactagttaaatctggttttctgttgcttgcaatacgcacattctaagaccatctcatctaagttatcttgagttatattttgttgtcgttaacttaatagactatgttttttagagctgttctaggtttacagaaaaattgatctaaaattacagaaaattcctacatgccctcctttctccccccttctccacacaatttccccctattttttacaccttgtattagtgtggcacatttgttacagtaaacgaaccaatatggatgcaatattattaactaaagactatagtttacattaaggttcactctgtgcttgacattctatggctttggacaaatgtataatatcacatatccaccattacagtatcattcagaagagcctcactgccctaaaaatccctgtgctgcatcatttcatccatccctccatccccttcttgatttatctgttcactcaacacaaataccatgaacaaccatcatattacattgtgctaatagctgggaacaggaaatcagatgaataaataaataaatgcagtgacgagctttgtggtgactcaacagacgtcagcataggggctggtaaaggcacaaaggaaagagtagtcaaaattcttttaacttcagttggtgagcatcagcagacaagtatgagggcctttgcttccacaactctcattttactttgcatgaacattatgtcacctctaggaaaatggcataagaataagcaatatagtattgtctctacattgtgagtttttataaagtcagtaaatacatattattttccattcaaaagtaatttaaaattatcaaaataatgaaacacaattcctagatataattaggaaatacctgagacaaatgtcaatctttgactaatctattacctctattgttattcttaggagtatcactagtccatgagatagcatg

SEQ ID NO: 25101 - DNA, 4655 bp, Homo Sapiens
cccgatgttgagtctccgaatccaagcccggaaggggggacgacggggtctcttgcctgctgtgtactgcttttactgccagaaatgttctcctcacctgggagccagttggctgccaacactgagttgcataccctgtcctgagggcgcggcacggagtgcatgcgggccgctgccatgacgaccgccatcttggagcgcctgagcaccctgtcggtcagcgggcagcagctgcgccgcctgcccaagatcctggaggatgggcttcccaagatgccttgcactgtcccagaaacggatgtgccccagctcttccgggagccttacatccgcaccggctaccgccccacggggcacgagtggcgctactacttcttcagcctctttcagaaacacaacgaggtggtcaacgtctggacccatttactggcagccctggccgtcctcttgcgattctgggcctttgccgaggctgaggccttgccatgggcgtctacccactccctgcctctgctcctcttcatcctgtcgtcaatcacttacctcacctgcagccttctggcccacctgctgcagtccaagtcagagctctcccactacaccttctactttgtggactatgttggcgtgagcgtttaccaatatggcagtgctttggctcatttcttctacagctctgaccaggcctggtatgaccggttctggcttttcttcttgccagcagctgccttctgtggctggttatcttgtgctggctgttgctatgccaaatatcgttaccggaggccttatccagtcatgaggaagatctgtcaagtggtgccagcaggtctggcttttatcctagacatcagccctgtggcacaccgtgtggcgctctgtcacctggctggctgccaggagcaagcagcctggtaccacaccctccagatcctcttcttcctggttagcgcttatttcttctcctgccccgtgcctgagaagtacttcccgggttcctgtgacatcgtgggccatgggcatcagatcttccatgcatttctgtccatctgtacgctctcccagctggaggccatcctcctggactaccaggggcggcaggagatcttcctgcagcgccatggacccctatctgtccacatggcctgcctctccttcttcttcctggctgcctgcagtgctgccaccgcagcccttctgaggcacaaagtcaaggccagactgaccaagaaagattcctgaggctggcaagtggggcaacgtgtggaggaagcccctcataatttggagaaaacttgatacaatagaagctgactcttaaggcattggcttttaaattaatacatatatccaaggatatgttatagctgcagtgtttgaaagccaaaggatttaagagttttgttgttgttaataaaaggaatactccttttccttttggatcatagcttaacaaggcacaggaagggaagggatcttgactaagattcatgagacattgaattaaggagaatcatcttcatgcctgaaaatttagcaaaattccgactatggcctccaggggcaattcctaaaagctgaatggataataaaattggactggaaagtaagtaggtggctggtcctcaccctgttggaatggctatcctactatgctgttctttggtaatggaataaattgacccaaggaccgaatttcatttggatttcaaattgtccagagtggaaaagccttcaagatgacatgatgaattactcagttcatctgatttctggtccctcctttctcgacaactataatactaacccttttctcaggataactgtctacacctggcagttttctctgaagtgctgttcactcacatccctaccttgcatggtaatataaaggactaggaagcagtcatacttccaggaaatgcttggattcatgtggacattcaggaagcttattctcatataatactaatctaaacagtactagaaattacagtgccaagagccaccaggaggcccagccaataagcatagatactatatggtatcatgggacccatctattttttaccagtggactacaggattacttgagagttatcagggctgcctaacagaccaggagatctgggggttgcaccagggaatcgccatatttgaccagcatgttttaaaagctcttggtaggattagttggttctaaggatccctctagggacctcattatttcaagaggaacccaaagtccagcctcctacatagatgctgccccacgaaggacccacaaaactaacctagttcagggttctcaggcaggcagttctgcttcagcttagagcagaacccataaaatactcaagtactgggataggcaagcatgtgtgtttactgtggattggtccctgaaggctcctttgggtgagaacatgtgaaccaggcaccctggtttgtttggagcattgctgcccagaagcttctatgggataggtggtgcttgggattgatgtgttgtggccatgcagccctccctgaggattgacttctgcactaatccagtgaaggaggctgtgtcaaaagaagggctcagaagccctcttttcagaggcaatgattcctgtcagtatgaggtcccttagttactaaaaagggacatgatttaactccagtttgatgaacctcctccgagtttactttattgtcttcaaatcttttgttttcttcctttttgtgagatttgtgggttttgtgccttataaatggaaatgtatgaacacaatatatgctcatgtagaattttctgttctgggttattgggataagaaaaaatatatattgctcttcaactagtgaatgaaagaaacttcagaaagctagaattgcttatcaatcaaaagactttctcaatctattttggccacaaacaaacatattcaactgaagctttccaataatctttatatcaagaaagcatgcgtcttgtcagctacattgttttcttagatggatttctcctgttaatcctcaaatatctgaacttctgtgttacccaagtgtcttatacaagcttctggtgtctaggacaaatttatggcaaataaaattagcaaaactgaactgggttgaactgaacaagaggatgggggaattgtgcaaatacgttgttagtagaaggtcaatttaaaatagggactagaaattatttgaagttttctttattacggattcaaagacttattttgaaagttggaaggagaagggagggaagagagcagaagggaagaaggtgtaagtcaagctcttgaatataactggtggtattgtgggcagagatctttagttcaaatccacgtattttttaaaagagagaactggaggtagagcaatgatcagatgggtgcacagaccagtgccaatctgaacattgttaatggcctgtgacatgatgagcacaggaacaggcatgaagatattgccatacaattttaatttatacaagtattggcccctcaagtggttggaaattttttttttaatctctttttctgagacagggtcttactctgtcgcccaggctggagtgcagtgatgcaatcacggctcactgcagcctcgacctccccagctcaagcaatcctcccacctcagcctcctaagtacctggtactacaggcgcgtgccaccacacctggctaatttttgcattttttgtagagacagggttttgccacgttgcttaggctggtcttgaactcctgaactcaagtgatccgcccacctcagcctcccaaagtgttgggattacagacattagccatcacgcctgccctagaaacagttttttaataggagatatttgagaggcattgaggtagaagactctatgacatgccctcagaatatcagaatcttcttagaaataaactaggaaatgcagatgtttttaactactcagacttttgaggaattaatccttttaaaacatttttgttaaagttagtgtatcagtaagaaacagacctagtttaaaaggaataatcaacaattttataaaggagatggcttattcaaccatagcccctccaacatatctactggaaattctgctggttaactttatctctctctctcttaatttagactttcaacctatgaaaatgtaaatacctttgaaaaaactaaactatcagtcatttacatcttctcatgaatgaaatgcagtgtagggagaggagatggcaggacacagcaaacaggacacatttgcctgcttctctcttgcctaattcttcctgacctgtatttactgatgcttaataatacttgtaagactctaggggttcatttcccatttcagcggaaagtacttcactcaacaacaatattctcaagagtcttctactggaagctagaaagaaataggaatttaagtccatagaatgaaggtagttattcctgcctgtgttgcccacctgttcacaaaaagtacctttatgcttgaaaacattaggttctttggttactgcactgtagtttcaaatggatcctccagatggcattcatgtcttactcagaaagggcactgccattgtccccaaggcttctgtctactaattctattggtcttgtgttttgcttgcttggcaaaaaaaaaaaaa

SEQ ID NO: 25102 - DNA, 2716 bp, Homo Sapiens
atggcggaggagccggggaggcgggaggcgggaggcgggaggtgttggggccgttgaagcggcctccctcccgcccccagccgcccggtctggccccagccctgtcccgacccccggcctggcccactccgaccctacccggccgaagggttccgctggacacgcaggcggcctccggagcagcccaagcccatgagggccgcgcgcccggccgccggtgctgacgagacggagctcctggcccccgaggaggagcagaggatcaatgcggttcaagaatcgattccagcggttcatgaaccatcgagctccagccaatggccgctacaagccaacttgctatgaacatgctgctaactgttacacacacgcattcctcattgttccggccatcgtgggcagtgccctcctccatcggctgtctgatgactgctgggaaaagataacagcatggatttatggaatgggactctgtgccctcttcatcgtttctacagtatttcacattgtatcatggaaaaagagccacttaaggacagtggagcattgttttcacatgtgtgatagaatggttatctatttcttcattgctgcttcttatgctccatggttaaatcttcgtgaacttggacccctggcatctcatatgcgttggtttatctggctcatggcagctggaggaaccatttatgtatttctctaccatgaaaaatataaggtggttgaactctttttctatctcacaatgggattctctccagccttggtggtgacatcaatgaacaacaccgatggacttcaggaacttgcctgtgggggcttaatttattgcttgggagttgtgttcttcaagagtgatggcatcattccatttgcccacgccatctggcacctgtttgtggccacggcagctgcagtgcattactacgccatttggaaatacctttaccgaagtcctacggactttatgcggcatttatgaccaatctgtactaattctccaaaccagtattatttcaattatggcacttgggagtggggtgagagctaaacattgcacagggaaagaaaaaaaataactgcactgactttatatcttttgaatataattactgtgaaagtataaaggctgtgttctggaattttctgcctcacagcaaataaataaggtagtgaattaattattcattccattccactatcatgaaggactctgaatagacttggccaactgatgtttacaaaccagacttttatattttaattttacagattttactacatgatttttctaaattactatgtcaggttgtaaaagtcagtgcaataacaaaccttcctttttaagaagaaaattgtttctattactttcccattcactaggtaaagaatcatggacagaacttacactactttttaccatgtttcatcttggcataacatggttcttttttaaatagaaactttagttttttgtaaatttttaaaaaaatatttcattgatatgcatctctgcaggtcctcattcatgttgtaaatttttgcagcaagcagtcaacattccacaaacgaacaaacattatacctcttctgatagttttattaagcatggagaaattgccaatttttaaaaactgcagttttccaaacttttctgccaacctcttactctgaattcagtgctgctttgggacatatacttgacctagcttggtttaccagtgatggaaaagtattttgatatcattaactttttcaaaagatccaactttttctctatgcctttgccacattctcttcagggtctctttccacagtggataaatgttttttctgtattatgacagtattgttgtgatggccatctgctggaaactcctgaagagcattatgtattacagtgagcagttgtattgcctgtttggtgcccaatggttaagtcattgtcacttagctttatattgtcagtttgatatttattttaaattgtggaactagatgcataaattcacatttctgcctttcatttgcatcttctcatatattgtgttttttttttttttcctagaaaaaatatttaaagcattgtttgacaggtagaaactcatgtatctgtagtccatgagttatatcctggctcagtggagtgatatttatgtattatttttacttttctctcagtgtcttatattaagattaacatgttgttaatagttgctttgttgattaatctctcttgttggtgttttaataaatgaaataggcttgcctttagatcgggtgctgatattgcctgtttcctagtaatgggctgatcaaatgatcagtggaattcttggtttgatgataaccttattaattgaaattttttactgatgtggctttaaaagaggtttattttgtatatgtttagaactctctgattttgatgaattatatgggagtgagaaacagaagaagtggtatttgctggcgagttaaataggcaaggtacccagtgataacaccaaccaaaccactcctatctgcatgattctgaacatctggatgcctgttgttttactgtgtatattttatttttaatatattaactttgtggattcatttaaggtctactcaaaagtaacactgtccaaaccactaatatgtatgtaaaaattgtgctgtatactacaataaagttgttacttggatttgttccaaaaaaaaaaaaaaa

SEQ ID NO: 25103 - DNA, 1173 bp, Homo Sapiens
atggcaacaggtgacttaaaaagaagcttacggaacctagaacaggtgctccgcttgctaaattatcctgaagaggtggactgtgtaggtttgataaagggagacccagcagcatctttgcccatcatcagctattcttttacctcatactcaccttatgtaacagaacttataatggaatccaatgtagagctcatagcaaaaaatgacttgcgctttatagatgctgtctataagcttcttcgtgatcaatttaattataaaccaattttgacaaaaaagcagtttatccaatgtgggtttgcagaatggaaaatccaaattgtttgtgatattttgaattgtgtgatgaaaaagcacaaggaattaagcagtcttcagaagattccatcacaacaaagaaagaaaatcagttctggtaagtcagaacctcctttgggcaatgagaaaatatctgcagaggctgttggcgttgatatcagtggcaggtttatgacctcaggaaagaagaaagctgtggtgattcgtcacttgtataatgaagataatgttgacatttctgaggatacattaagtccaataacagatgttaatgaagcagttgatgtgtctgacttaaatgctactgaaataaagatgcctgaagtaaaggttcctgaaatcaaggctgagcaacaggatgtaaatgttaatcctgagattactgcactacaaactatgcttgctgaatgccaagaaaatcttaagaaactgacttcgatagagaaaaggttagactgtttggaacaaaaaatgaaaggaaaagtgatggtagatgaaaacacctggactaatcttcttagtcgtgtcactcttcttgaaacagaaatgcttttgtctaaaaagaatgatgaatttatagagtttaatgaagttagtgaagactacgcttcttgtagtgacatggaccttctgaatcctcacagaaaaagcgaagtagagaggccagcaagtattcctctgtcctctggctatagtacagcatcatcagattcaactcccagagcctctactgttaattactgtggtttgaatgagatttcagaggaaacaacaatccagaaaatggaaaggatgaaaaaaatgtttgaagaaactgcagagttactgaaatgtccaaatcactacttgtag

SEQ ID NO: 25104 - DNA, 15966 bp, Homo Sapiens
ttcattcaaatgcaaacactcctccacctaatcccgcccggtgtccgccgggctgctccgacacgcccggggtttacctgcgcgcactccagcgggagggcgggttgtggaggtgtgctgagcggcgcgcgggggtgagggcgtggaagcggagggtggggcccggagagccgttaccagggcgaaaagtaaagcgaaaacacccgccctgcacttcccgcgcgacgccgctggaaatcggttcaggtccagagcaggatctcggaggatcccgcgtggaaccccagggctcccgggtccgccggggcgcaaagacttccgaggccgccctccgcgtgttcccaggcccgtggagaggtgggtggtctgagtgaggtcgggcttggcggcgaggaaccccggtggggggaactggggacttcaagtgagacccaggctccagacacctctagtttctaccccaaattaccaaactgtgaccttcggccgcctctctcccagaggcaggtggaaaggagcaggtgtttctgcccttcaccgtgcccccacaccctgcggccgcgcaggtctccctcccaggcaggtgcgaaagtcccaggccacacttgtgtctacaaatagtcatccacgggcagtcaagaaggttccttggttctgccgctctctgagcagaaattgttggggtcggggaataagaaccaggaaatcgtttttaaggttcaaacccagttctgctgaggtctcagctcgaatctcggaccacggggccccgcctttcccgccaccctggcttgagggcagaggggatttctgctgcgggttccgcctgtggtcagtgcgtccccattccgggccgtccggtcccagtccaatcggctctgggagcagaagaacacgtgaaagctgaagatgggttttccctaaatattgcctgagagcggggcgacccccaggcctgggcaggttcgcggaccccaaagcaccttctctttccccctcctcctggccgctggcttccgccccctcctaccctcccaccgggttgcctctgattcctcctggactccgatcttttcacgctcttgttggtttcactgacatgttcttgtcaatttcaaacgctttgtgattgtaaaaaaaaaaaaatcgaaccgatacggtcctaccactcgccctagtttcggagcccggagctgtcctgcgtgtgcgtccatgtggagtgtccggggctgcgggctcgggcgcacggtgccagccgagggctgccctccgcttttgtgttaaccggcgggcttctcgcggtccccgccgcagaggtcacacccggcgggtaacggcgtggatacaccgaagggtgactttggacaccttccccacaccacagactaacgcttctgcccctactccgcccctgctagagaagtaggaggccagtgggggagggggtattttcctgaagctccagaaaatgaccacgcattttagagaaaggtcgtgcccgcttcccagcctcacctagtctgggctggggccgggacccgcctccccaccttccccgccccccccgctcttcaacctagcggagggacagatgccagcgcggtggagtcatgccgctggcttgggcaccattggtcatgcctggaacacgcagcagcgagtacgcacatctggcggctatcccgggcggctccggtcctgatatggagagagagggcgggctggtgtgtgtctcagtgagcgaggctgggggaacgcgcctgggctggctcctccccgaacttgcatcaccagtgccccctctctccacccgccttcggccccgccttggcccctcctccaccccccttcctccgctccgttcggccggttctcccgggaagctattaatagcattacgtcagcctgggactggcaacacggagtaaacgaccgcgccgccagcctgagggctataaaaggggtgatgcaacgctctccaagccacagtcgcacgcagccaggcgcgcactgcacagctctcttctctcgccgccgcccgagcgcacccttcagcccgcgcgccggccgtgagtcctcggtgctcgcccgccggccagacaaacagcccgcccgaccccgtcccgaccctggccgccccgagcggagcctggaggtgagcgctggaagccgagggagtgagcgcgacgagggctgctcgccttcattcccttcgcgcccctctaagtaaccagtccgccgacccctgacccaccccggatccgcgcccccagcctccggcttggaaataactctggcttaaacttcttctaagccaccgctgctcctcggcgcttcgaaaagtttcccgcaaagcgaaagaactaactttctcttttgacttggggcgcgaaaggttcctggtgacggaggtcgggcgtccactctgccgccagcctcgagcgccgcttctctccgccgacggcgctggcttgcccggctgggagagggcgtaaggtgggtgggcgggtgcgttggggtgtccgaggctgcctcgctcgccgtcccgctccatccctcgcttcgagacacggcactgtgggagccgatccttcccgggtgggggggggggggcgcagagaggcacgaaggccggaggcttgcgggagggctgccccacgcgccgagaggaatgaatggggaaggggcgagagggcgggaggcgtcccgggcgcggccgctgggggtcgccctgggtaccccgcagcactggcggcaggaccgtgaaggcaaccccgagaaaaagttagctgggataagcttggaagtggcgagcgctggtgtcgcgctgtcccggggcggaagacggggagggctcccggcaacggctggtgtccggaccccgagcccgggactcccacacacctgggactctcactctggcttttccttcggcgggtccgcgggagacccaccgtggcggggaagcgagggtgtggagccacttgtgcagatatttgagagaatggctttgtggtctagtgccaggactctgagcgcttacactgcaatcgatgtcgttgggcctcagtatgcggagccgggaaataagggcacatgggcagtaccggccccctctgcgtgttggagggcacaatgcagtggttggaccagataactactaaggtcctttctgtctggagattttcagattttggagtggtgtagtggggagaaaaggagccagtgaggggacttgaatggggtgggtctctatctaatgtcattcaccagtgtccagacagtgggggaaaggggacttttctgcagggcatcttttccctcaccagctttctttccactggattcgttctccttctctgctccccccactcccattttcatttctcatctacttcctttcctcctaaacattttcttttccctaatttcattgcataggtcacatatgctttcttacaaataaaatagttactaaatccttgatgaacccagaaagaaaaggagagccagaaaatctggatgttctctcagtgtacccctttcgttgtaggtgacagtcatatcttctgttcgaagtttctgtctctgtaacttaaagtgaaggcaaaaaattggtattactgtccccattgttttgcagttagcattggttgtagaataatgctacaacatacaggctcctgctttgaggatatcctgggcaaagatgggatggggtgaggattgcagttactgtcggaatggtttcagagacagcaaagaaggcagcaccccacgcccgcagtggggataagatacagcacccagcatctgtggcagtgatgggagccttctttttctctctctcttcctccttgccctttagccattatagaattcctttttctccatggccgttttcttcgatagcccctccctatctcagtcctgtcaaagtctcctctgtgattggtaccaggtgccaggactcttgaccccttatctacctggctaatggctctgttctctggttgccttgttggttgatcccttgaggcggtcgatacctattggtgatggagcaaaatgagcagtcggtgggtgttcagcagcttggcatgggctgggccactcaccagctttatgacctcaggcaagtcatttttacctccctggaccaatgtactcattatgaaatgagaatctgacctagatgattctaatattgagagggtgtgatttccattagatagagtccatgattccttcctttttaaaattggctgggcatgggacagggccagtggcttcgagtgtttacccagccaggggaggaggaaggacatagccaagatgcctcagaagctttccaagggagaaatggtttatatgtgagaattggttctctttcaaatatgtaatgcagaaatgctggcatcagcaaatagtggggtgaaacctacctggtctgtgaagaacttggggtcaatgagagtacaaaagaggctctgactgacctgaatgtcttgaaggttccagttaattcctcactaacagggctttattgaattgataacaacagaatgagtttttcctgaaatggagaagatggagtcacagtagtaatgactacccggtgtgtatgtaaatctcatatgtccttctcaacagccctttggggaaggcagttttgatctcaaattacagaggaagagaatgagaggcccagaaagcctaagtgatttgttggtggatgctcagcttatgagtggcactgataggcttagaaacattgtctctggcccttgatgcccagctttgcacctcttcaagaggtctgggaggaagaccaagatatgaagagttagtgaaaggccagtactggcttcctagtaacataagatggttagcaagcaatgcttagtggaaagaggatgaaaattaaaagtgaaaattcaatgtagctgtagctactaggaaataaaaatctgggagctgaatttccagttaaaggaatacatgagtaaactttcactttcttgaaaatgatgaaactgccaatgatacaacatgatttctgattggaaataatcaagcagaaacaaaatgcaagttcttggtagcaagtctgaacaattttatgatcagcatagaaagtcaactctgatctgaggtccccaaacaatttttttcaatgaccgggatgtttgaggatctcaactttctgaaaaattgtgtgaagatttaacttcatttccttgtggggacacagccgtagtctaggctgaatcatacctcgagagactgagtaaaggaataactagaaagtatcccgagaagttaagctttagcctagtgccgagaaaacccaaatctcgacagatacatctgttttattttctgaaaggcttttaacatttttacaaccatttatgtccccaaggaagcccacccaatgcttttcataaaagcattccataccactgacattcttcagcttctttcattgggactgctgactttacataagaagaagggtagggggcgggagtcataaacagcagaccccaagccctgagagctcattaataaacctagttggatggcaaaatggaactacactctactgcagtggaattcaaagtccccgtgtagaagggagccatccaggcctccaaacaaagaccagcccagtggcagctctgaatgtcatccccgaatcactgagtttttaataaacttggaaagggaagggaaacatgaatgcatgggagaatcttaagcctctggctttagaaggctagtttctcagagtttattgcctgacagcgacaagtatcctcccagcatcctaagattataggattaaattgagagaagaacttcagttctgactcatgacacagggctttgggaaaagaattacatacatagcctgggtttctttgactagtcaagggcagatttcattggcctggaagtcttgcctccattggtgtatgttagatctccagggggagtttgaagtcagggtattctattcagaagcctttgagatcaaagtgggtgaccagctgccctccttcctggactccacagagcctctgtcagagagccagccctgggctggagagatctctgggaggcctagtaatcatggagctcctggccaaagaatgttttccagggcatattcatgtattagttcctcaattcctcataggatattatgggaaaatagggcgattattacaagccctctttaacagaggagaaaaagccacggggaggtacaatgataacacataatggagtaagtgggcttcaaatcttcatcttctgacctcagtctgggaattttgtggataagagacccacttgctcacactcccagaaggcagttagcaagcagcctgggtatgcaccgtgacataaagattagcagttcattaaacagagttcagtttatcccgaggaatctttacttagcctcccctctatcacttcatttccaggcctcccacctaccttaaggcctgccccgagaaaatttgctctggttttttgtttgtttgtgcaatataacataatgcttgtttgtttttgtaatgtagaataatatttgtttgttttttgcaatgtacaaattaagggcatgaatcctggagccaaactaacttaattccaaatcctgatgctgccccatattaattctgtgaattcgggcaaatgacttagtttgtctaaacctcaattatctcatctataaaaggcagctagatcttaactcactgggttctcgtgaggattaaatgagatagtgcccctaaggtttctggtatgaaggaggcactccttaaatgttcgagacttgccagagggcttcttctctgtctggactgtgctaatgaccacagatccccggttgagaggaatgcccagaccacactcatcctacactcatccctatactcattgtcccttgggaaccaactgcagggaggaggggaaatggccaccactggagggagtacacagcaggccaagacttatgggggactcttccaaattggggccatggaactgtcactatttctactctttattttccttttgtcatccttttgggttcaccgagctatagaataacagagggagatgaatttagcaaatacatcactgaagcttctccctcggaagttgggcccaagcaatgggaatgagaaaggtaaccttggaccgtgggggccatttgatttgatgaccccatccccacttcatttatcagttggccaatgaggcatggcgagtcaggcattgggccaggctctgggtaaagcaatggtggagactcaatgcttgcattggaggagctgtcagtcatttaccagacacagactgggtcctagagagctgaaattactagctcaagtcactgctgtttagtgccagagccagccccagggttccctgcccccacacccagcctaagtctatccctataccacaggcctgaacaactcccccacaatacagtgcctcacttttctttaagaccttttgctttgccaaccttaaccttaagaatccacctccccatcccctgccaaagactggggtgaagaaacgcacctggctacagttacctttctcattcccattgcttgggcccaacttcgggggagaagcttcagagatgtatttgctaaattcaaggattccccactttttgcttttacttccactcactgatagtttcagcttgacgtcaagcctctttgaaaaagaggcttttttttttaagtgaaagaaactttattttgagtaatatacaaaaaaaaaaaaagagagagagagagaaagaaaaagaagctgaaaatgagattactcatgatttttaaaatggcctcactgatttttaaaaaatgttcttcctctttcaggactgtttgtggccacatttgcacataggcacaccagccaaaactcatagatcttgtgaattcagagtagcctgaaacatcatcccttataaatttcaaataggcattttgttcatgtcactgagctatgtgtattttaagaacctgctttacttaagatgaggatggcatgaaatgaaaacaaaacagaaacccaagggcttatgggacttttctctgagggtggggctctggtgttggaggtctggtgggggagggggacttgatcccatgccccagagcccctgaaacagtttgggtttcaatgtgtctttcagcaaaatgatgcttcaacacccaggccaggtctctgcctcggaagtgagtgcttctgccatcgtcccctgcctgtcccctcctgggtcactggtgtttgaggattttgctaacctgacgccctttgtcaaggaagagctgaggtttgccatccagaacaagcacctctgccaccggatgtcctctgcgctggaatcagtcactgtcagcgacagacccctcggggtgtccatcacaaaagccgaggtgggttctatcacaggtattcattctttcggcacaggtattcattctttcggcacatgtttcgctcgcagccactgtgtgttgggcatgttctaggcagggggctgttgttgagagtgaaacaaacaaaaccactgccctcagggagcttaccttctcctgggaggagacagaagtacataacatacgtaagtacacgttaagagatgagtgcaaaggagaaaaaagcagggagcggggcagagagaacgggtagggatggggttgctgggtttaaaaacttttcaggccaggcatggtggcccacgcttataatcccagcactttgagaggccaagatgggattatcgcttgagtccaggagtttgagaccagcctgggcaacacaatgaaacccaatctctatgacagtattagctgggcaaggtggtacatggcctatagtctcatctacttgcgaggctgaggtgggaggaccgcttgagcccaggaggttgaggctgcaatgagccgtgatcacctcactgcactccagcctgggtgatggagcaagactcattttgcttttagagacagtgttgctccatcacccaggctggggtgcagtggggtgatcacggctcattgtagcctcagtctcctgggctcaagcgatcctcctgcttcagcctcccaaaacactgggatcacagggatgagccattgcacccagccggggttgctgttttaaattaggaagtcaggtaaggattcactgatagtgacttttgagcagaggtcaaaaggaaaggaagaaggaaagaggagagggaagaagccacgtgggtatctggtaaaagaaattaagggcactgaggtggaagtattggtgcctggtgggctgtgcagtggggcagagtataggggtgggagataaataggggctggtcatattgggtcttacagactattattgtatagatgcagccctgggctcaaagtgaggtgggaaaccacagaaggcttttgagcagagaagcaacaagattcaacacacacacacacacacagatacacacacacacttttttttttgagacagagtcttgttctgtcacccagactggagtgcagtggcatgatcttggctcactgcaacctctgcctcccaggttcaagggattctcatgcctcagtcttccaaatagctgggattacaggtgcccgccacacgtctggctaatttttgaatttttttagtagagacggggtttctccatgttggccaggctggtctcgaactcctgacctcaggtaatccgcccgcctcggcctcccaaagtgctgggattacaggtgtgagccaccacgcccagccttgatttatatttttaaatgatcaccctggctgtcatgttgagaatgggcagtaggggtaagacagaagctgagtgcacagaaaggaggccgtggcaggaatccacgtgagtcagggggcctgcagcaggagggagcagtgcaggtgctgagaagtggttggctttggatctgacttgaaggtaaagctgatttgctgatagattggatgtggggtgtaagagaaagggaagactcaagggtgactgagttttctggccagcatagctgtaagaatggagcgtccatttgctgctgagatttgggattataggggttagggtggtggcaagagcaggaggtctgtcctattctgcagacccctgtggagatgtcaagcaggcagttggatatgtgagtctggagttcagaggacagtctgggctagagataatagagttggaaattatcggcatatagatggcacttaaagccatgagtcaggatgaggccaccttctgtgtccagttgttctgaagaagcttggagcgtggtggtccctgtttttatcactactaggacccaagcacccagacagtagagcaaggaccaggcagcctgccccacccttccctgtagcaatgttcacagccttgggaccaggtgttgctccaggttcacttctgtctgacacacttgcactgttccacgcttggcaaccttgggtaagactcctggaataataaacatggtgagaagtctgggaggtggcttctggcgatgccatagtggcttaaggatgtcagagctgaggttccaccattttattggccttttcctcatggtggcaagtggaagtgtttcaggcttactcaactggcatgattgcagcctttgggcaaggagtagtgggactgacctaaaagactgtcctagttcaccacttgcaggtggcaccccagcatgggccgattaatgccgctttggttgggaatgggcttaggtgccttttctacaggagcatcatgggcttctcccaaatttgggaagctggtgctctgatgctccaggtgaagtcagaggtgaatggggttgcccttgggtcttgaattgaagaagaggccgggagtgggtggctaggtaatgatcctgagatcattcctggttctcaaagaaaggagatgtttaccagacagaatctgtttcggctttaaatgattatagttaataccaatagttatcaatttgcatattatcctcatctcaaaatccaaatgcatttttaaaattggctaacttttaatttactaatatattgccggtataattttaactttgatttttgttgttcactcacgtgtgtgtgtgtgcgtgtgtgtgtgtgtgtgtgtaggggttttcacacaaaagtctagagctttagtatttcggggtcttttagcgctagcattgcccttgtctgccagcttttgctggcagtaaaaggcagtgtatttgaggtaggtggcatttcttactgccctttaaatgtgtttcttttggattttacaggtagcccctgaagaagatgaaaggaaaaagaggcgacgagaaagaaataagattgcagctgcaaagtgccgaaacaagaagaaggagaagacggagtgcctgcagaaagtgagtgccttctagccttacccttcctctcgctcacgcctgtcttcaccagcttcatgtggctatcagaagaagagttagaaaaccccctacttggttatagtttcccaagaagggccttgtagctggtagcagaaatgccagttgcagaatgaggaggtggcaaagcagttaacacaatggatgtgacggtggatgtataaaaacaggtgtgtgaattcgtctgatgcctgactcccagcagcctcggccggttcatacatgtccatcagcttccaggctgcaggacatgccagcccagttaaagaggcttcacttgactgttttcctgagaaaaggaagctgccagctctcatttggctcactatgaaaagcctttaattaatctcttcaaacaagttatttccttaatccacaagcagtggttacacttgctttgcattcttgtctggttcctaactctagagcccttctccctggcttagccagtaagctgagcccctggctgcgttcagccggcccgcctgagagacactaggggaaatagcttttgtgggcaagcagggtggccggtggtgctcagcagtctttccagtggctgtgtccctcctccaaatgtggacaggccatgacagagtcttagcccaagtcccacagatccccaaaagttctgttgattgcttcaggggatcagtgaaaattagggaattttgtgtgttgctatatacattttttctggggagatgagcttctcattgagatctgtgactcagaatcgactaagccaccataagtctggatttctccccagctcccaaggcccttttgggtccagaagacctgcatatgggctgttgactcatgcaaatgaggtatctgaactgcagcttcagtattagcagagccacaggccgcctctgtggcatcaccagggtttctctgaagaagagggtctgcattttcctaaacccagtgctgctctcccatctcccatcttcctctcgcagcttgatgagccccggtgtgtcccaggtacacccctgcatccaggcagcagcccaggccaccccctcctcactggcccttggctcctttcttgatgcctctgttgcttgtcccccaggagtcggagaagctggaaagtgtgaatgctgaactgaaggctcagattgaggagctcaagaacgagaagcagcatttgatatacatgctcaaccttcatcggcccacgtgtattgtccgggctcagaatgggaggactccagaagatgagagaaacctctttatccaacagataaaagaaggaacattgcagagctaagcagtcgtggtatgggggcgactggggagtcctcattgaatcctcattttatacccaaaaccctgaagccattggagagctgtcttcctgtgtacctctagaatcccagcagcagagaaccatcaaggcgggagggcctgcagtgattcagcaggcccttcccattctgccccagagtgggtcttggaccagggcaagtgcatctttgcctcaactccaggatttaggccttaacacactggccattcttatgttccagatggcccccagctggtgtcctgcccgcctttcatctggattctacaaaaaaccaggatgcccaccgttaggattcaggcagcagtgtctgtacctcgggtgggagggatggggccatctccttcaccgtggctaccattgtcactcgtaggggatgtggagtgagaacagcatttagtgaagttgtgcaacggccagggttgtgctttctagcaaatatgctgttatgtccagaaattgtgtgtgcaagaaaactaggcaatgtactcttccgatgtttgtgtcacacaacactgatgtgacttttatatgctttttctcagatctggtttctaagagttttggggggcggggctgtcaccacgtgcagtatctcaagatattcaggtggccagaagagcttgtcagcaagaggaggacagaattctcccagcgttaacacaaaatccatgggcagcatgatggcaggtcctctgttgcaaactcagttccaaagtcacaggaagaaagcagaaagttcaacttccaaagggttaggactctccactcaatgtcttaggtcaggagttgtgtctaggctggaagagccaaagaatattccattttcctttccttgtggttgaaaaccacagtcagtggagagatgtttggaaaccacagtcagtggagcctgggtggtacccaggctttagcattattggatgtcaatagcattgtttttgtcatgtagctgttttaagaaatctggcccagggtgtttgcagctgtgagaagtcactcacactggccacaaggacgctggctactgtctattaaaattctgatgtttctgtgaaattctcagagtgtttaattgtactcaatggtatcattacaattttctgtaagagaaaatattacttatttatcctagtattcctaacctgtcagaataataaatattggaaccaagacatggtaaacatgtgttgtgctggtttctgttcatttaaatctgtcggttgctgagacctagcgattccctgcctttccctccccattatggggggtgcctagctttaaacttctccagatgtcatcctttgctctttggggcatcactagatgggatagttggctttcagtcctgttcctcagtcttgggcacctgatgctcaatttttcattgacaaaccctgaaacatggcaccaaatatatcctttagatcaacagtttggtgtttagaattttgatgtacaactgaattgctagataccttaattattttctctgaatgtacaaacacctaaaacatacacctgttgttcagcttgaacctttgacccctaacattctgccacagaactcgtctcagagagttactcacttgagttacatctgtttcatgtctaaacgtgtgtctcattgttgcaaatacatatcagaaaagaatgggaaggggtaccggaggaagaaagaaccattttagacagcatgggtgtgataattcaaagaaagacattccactgaatttcctggaatttccagggcgtatgattcctttggcctgcaagagagccaggcccccttgctttttgtgcttctctataacattcacaggctagacataaaaactggccactcgccgctggtgccattcttcagagaagaatgtcttcgttaaatgtcagattcgtacacatgaattctgtgcctacttctttgacctcatgtatgtttcctttaaatgatcacttaagacacaggtgtcttcattttactctctgaattgcacatcaggggtctttcctaatccatcaagagccatctgatgttaataccattcagcacttctttcaggggataatttatgttccttttcttggtggaggggaaaacatcccttgcatttaccttctagttatgggtagaggcaccagccaccagccattatgaaacgcaagacaatttgtaagctgccaggaacaacaatggattagagaggaaggaagttgggggcggatggtggctatggcaagaaaacttgatgtgtatggtaagtgtaaatgaaggtctatcacaaatgcattaaaaattgttttatgtagccaagtttatgttttgatactttaattttaaaaaggatgatgactatgcatttaccatcaaggcatttagtttcttttgtttcacatttagaggaaagggaaggtggggggatctgagagaataaacttagatggggccaccaccaatatcaagcacccggtttggcagtgtctgcactgagctgtctcctgttggtagtggtgatgtcacactgccagggtgtggaaagccaccctccctcctctctcttgccttccacctgcccctttggctttccctgagagctggcctgacacctgtttcagagtcaagagcttttaaagggttctggcccaggacaggagttctggaatggaatctttccactttctgttaactaaaatactattttccatctgtatcctaatttctccccatgggctttgaataaaccctcaacactccaacccatatcaagctttctcctctcttccctgtcccgtaacctctggttgggttcatgtactgtttctttgtggcgtgaacagcgtttccaattagaatctgcctgaaaggaggtcccatttgcccactgagcatcctgtgttctcatggtggctctaactccagaagattttaacacagtctcatcaaacactgctttcagggaggaatttacactgaggttaaaaggactgttgaggactaatgctaacagaagctaacatttattgcgtaggacaatacactaaacacttcacatgtattatcccatttaatcctcacaacaacaactgctacccccattttacagatgagggagtggagagctcagtaac

SEQ ID NO: 25105 - DNA, 1582 bp, Homo Sapiens
gacaataggatcatggccttacccttgaagcattaccgagaaggagaacagagatgggcttgaagagccacgtgctgccggctccaaattcccaaggacaaggatccctctgcatttttgtctatgtaacctcttatatggactacattcagctgcaaggaaaggaaaaccttgattgcagtggtttaaacaaacagaagattgtttttccacatagcatggattctggagatgggtggctaatggtattggttcaacaactccacgaaggtaggggtcacgtcttggatccttttgccttaatctcagtgctcgttacttcatggtcccaagatggctgctgtatccccaagaatcatgtctgcgttcaaggaaggaggggtggaggaagaggaagggccaaactagctggacccgtcaccttctatcagaaagtaaaacctcgtcagaagtctgtttcctgctctctccctctgcatatcttcacttagatgcccttggcccgagccagctaaggtcagctgttacctcagctgggcctggatggtctaggatagccttactcacttgcctggcaggtgacaggctgttggctggaattgcttggttctcctccatgtggcctctccagcaggctagctcaggcttattcacatgatggcttcaggattccaaaaagagtgagagtagaagctgaaagacttcttgagttcttggcctggaactgggactaggacagtgtcacttctgctaagttcttttggtcagagcaaatcacaaggctttacccagattcaagggatgagaaacagactacatgtcttgatgaggggaaccacaaagagcttgtggccatttttcacctatcacaaataattttggatgggtatttatttggataaaggtatttccctcttccccctttctctctgtctcatggggcctcactctgccaagttggaaggcactaagacattgtcctggccctcagggtctaggggaagaggtgttggggcaggaagtgagtctctccatgggctggacccactgtagtaggagtgcctccttgtctgcactgctggtatggggttaggccaggtaggacattccagaggggcttctgaaaaccaagagtccctggggaaagggaacagagtaaggcaggccttgttctcactgccctctaagggaacttggtcactcggcacttttaagcctcagtttctccagttcaataataaggacaagagcttttcccatgcattctctttccccgggaaagttgactgaggtgaccagtaatagaattgaaaagggagagtgtcttcagtgcaatgtggcatcctggattgggtcttggaacaaaaacaggacattagtgggaaaattggaaatctgaaaaaagtctgaattttagttaatataccaatttcagtctcttggttttgacagatgtaccatggtgatgtaagatgttgaccttggggtaggctgggtgaagggtatacaggaactctttgtactatctctgcaacttctctgtaaatctagtatcattccaaaataaaagtttatttaattt

SEQ ID NO: 25106 - DNA, 951 bp, Homo Sapiens
atggcggtgcaggtggtgcaggcggtgcaggcggttcatctcgagtctgacgctttcctcgtttgtctcaaccacgctctgagcacagagaaggaggaagtaatggggctgtgcataggggagttgaacgatgatacaaggagtgactccaaatttgcatatactggaactgaaatgcgcacagttgctgaaaaggttgatgccgtcagaattgttcacattcattctgtcatcatcttacgacgttctgataagaggaaggaccgagtagaaatttctccagagcagctgtctgcagcttcaacagaggcagagaggttggctgaactgacaggccgccccatgagagttgtgggctggtatcattcccatcctcatataactgtttggccttcacatgttgatgttcgcacacaagccatgtaccagatgatggatcaaggctttgtaggacttattttttcctgtttcatagaagataagaacacaaagactggccgggtactctacacttgcttccaatccatacaggcccaaaagagttcagagtcccttcatggtccacgagacttctggagctccagccagcacatctccattgagggccagaaggaagaggaaaggtatgagagaatcgaaatcccaatccatattgtacctcatgtcactatcgggaaagtgtgccttgaatcagcagtagagctgcccaagatcctgtgccaggaggagcaggatgcgtataggaggatccacagccttacacatctggactcagtaaccaagatccataatggctcagtgtttaccaagaatctgtgcagtcagatgtcggcagtcagcgggcctctcctacagtggttggaggacagactggagcaaaaccaacagcatttgcaggaattacaacaagaaaaggaagagcttatgcaagaactttcttctctagaataa

SEQ ID NO: 25107 - DNA, 3494 bp, Homo Sapiens
ctcctgtactgacaactccatgcagttcggaaccagaacgactacggctgaaccagggttcatggggacatggcaaaacgctgatactaacctcttattcagaatgtcccaacaggccatccgttgcacactggtaaactgcacatgtgaatgttttcagccagggaagattaacctgaggacttgtgatcagtgtaaacatggctgggtggcacatgccttggataagctcagcacgcagcacctgtaccaccccacccaagtggagattgtgcagtccaacgtcgtgtttgacatcagcagcctgatgctctatgggacacaagcagtgcctgtgcggctaaagatcctgctggaccgtctcttcagcgtcctgaagcaagaggaggtactgcacatactgcacggccttggctggactctgcgggactatgtccgaggatacatccttcaggatgctgctggcaaggtgctggaccgctgggccatcatgtctcgagaagaggaaatcatcacccttcagcagtttctgcggtttggagaaaccaaatccattgtggagctgatggcaattcaggagaaagaagggcaggccgtggctgtaccatcttcaaagacagactcagatataaggactttcattgagagcaataatcgcaccaggagtcccagcctccttgctcacttagagaacagcaatccttccagcattcatcacttcgaaaacatcccaaacagccttgcatttctgcttccattccagtacataaaccctgtctcagcaccactgctagggttgcctccaaatgggctactgttagagcaaccagggttgaggctgcgggaacccagcctttcaactcagaatgaatataatgagagcagcgaatccgaagtttctcccacaccttataagaatgatcaaacacccaatagaaatgccctgaccagcattactaatgtggagcccaaaaccgagccagcctgtgtctctcccattcagaattctgccccagtcagtgatctaaccaaaactgaacacccaaaaagctcattccggattcatcggatgagaaggatggggtcagcctctaggaaaggaagagtgttctgtaatgcatgtgggaagacattctatgacaaaggtactctcaaaattcattacaatgctgttcacctgaagatcaaacatcgatgcaccattgaaggttgcaacatggtctttagctccctccgaagtcgtaatcgccacagtgcaaaccccaatcctcgccttcacatgcctatgctaaggaataaccgagataaagatttaattcgggccacctcaggagctgccacccctgtcatagcaagtacaaaatcaaatctggcactcacaagccctggccgacccccaatgggttttaccactccccctctagaccctgtcttgcaaaatcctctccctagccagctagtattttctgggctaaagactgtacaaccagttcctccattttatagaagtttactcactccaggggaaatggtgagtcctccaacctccctcccaaccagtcccatcattccaaccagtggtaccatagagcagcaccccccgccaccctctgagccagtagtgccagcagtgatgatggccacccatgagcccagtgctgacctggcacccaagaaaaagcccaggaagtcaagcatgcctgtgaagattgagaaggaaattattgataccgccgatgagtttgatgatgaagatgatgaccccaatgatggtggagctgtggtcaatgacatgagccatgacaatcattgtcactcccaagaggagatgagcccaggcatgtctgtgaaggacttttctaagcataacaggacccggtgcatttcaaggactgaaataaggagggccgacagcatgacttctgaagaccaagaacctgagcgggactatgagaacgagtctgagtcttcggagcccaaactgggcgaggaatccatggaaggggatgagcacattcacagcgaagtgagtgaaaaagtcctgatgaatagtgagaggcctgatgagaaccacagtgagccctctcaccaggacgtcatcaaggtgaaggaagaatttacagaccccacttacgacatgttttacatgagccagtatggactgtacaatggtgggggtgccagcatggccgccttgcatgagagctttacatcgtctctgaattatggcagccctcaaaagttctccccagaaggtgacctatgttctagcccagaccccaaaatctgttatgtgtgcaagaagagtttcaaaagctcctacagtgtgaaacttcactacaggaacgttcacttgaaagagatgcacgtctgcacagtggctggttgcaatgctgcattcccctctcgccgaagccgagacagacacagtgccaacataaacctacatcgtaaactgttgaccaaagaactcgatgacatgggcctggactcgtcgcagccctcccttagcaaggacctccgcgatgaatttttggtgaagatatatggtgcccagcaccccatggggctcgatgtcagggaagacgcctcctctcccgcagggactgaagactcccacctgaacgggtatgggagaggcatggcagaggactacatggtccttgacttgagcaccacctccagcctccagtccagcagcagtatccattcctccagagaatccgacgcaggcagcgatgaggggattcttctcgatgacattgacggggcgagtgacagtggggagtcggcacacaaggccgaggcccctgccctccctggcagcctaggggctgaagtttcaggatctcttatgttcagcagcttgtctgggagcaatggtgggatcatgtgcaacatttgccacaaaatgtacagcaacaaggggaccctgagagtgcactacaaaactgtgcatttgagagaaatgcacaagtgcaaagtcccaggttgcaatatgatgttttcctctgtacgaagccgaaatcggcacagtcagaaccctaatctccacaaaaacattcccttcacttcagtagattagtctcagaatggacactacaaatgccagctctcaccagatggcctacgtgtttgaactgccatagtcagtgtgcgcttatgtacttggggtgtgtgtgtgtgtgtgtgtgtgtgtgcatttatgtatgctctgtggctacatatacacacacgtatttccttgagataaacaagataaacactaggtgcttttgaatttttttcacttccctttatagttttgggaaaggagtgggatctttgatttcagggtgaaaacagagtacccctttaaacacacacacacacacatgcacatacacacacacacacacacacacacacagtgtgcaactagccccagttttgacagaataattcttggtcttccccaaagagacaatttgttgtacccatgactgttgcctgca

SEQ ID NO: 25108 - DNA, 23722 bp, Homo Sapiens
cttcaccgaaccacgtcctggtcattgacttgccgtgtgactgctgtgcttcccctgtttccatttccctccatttctccctccttcctccctctgtcacccatgcccggaggagcacgataagggaccaggccgacctgggttccaaccctgcctgctccctgtcctgttgacgctctaattccacttgcagccccactttcctcatttgcatagtgttctcccagtaacaacagcagtcataccaagttctagggttctttcgaggatagtgtgtattcaccgcagtgcatctctgatgcctggcacatcggctgtgctcaagtaatggcagctattgcattacagtgactatggagttaggggaccgcatatggcaaaatgctgatcactgttttgaatttggtttcattcctctaatctcaaatccagtgttttaaggacatgctaaatgctttgtcctggagagctatcttaagggacaaaatcgttttcccagcgtcatctgtgacacatcctgacagtagagagctgcttccaagaagcaatttgaagtgccattatcaggcagggacgggggctctaggggatttcggggtcagcagatatgaaatgaatgatttcatagggctgtcacagagctgtggtgggaatttcccatgagaccccgcccctggctgagtcaccgcactcctgtgtttgacctgaagtcctctcgagctgcagaagcctgaagaccaaggagtggaaagttctccggcagccctgagatctcaaggtctgtccatctgggggagtgggtgggggcactgagaaggggtgagattggaacttttgctccctttgcccatttctagactttttctcctaatatgtaataacttctcttcaatagccctttaaataaacatcaataacttagcctgaagagtttttcactccttagttttgttaccatacaaacttcacatctcaaaacatgtctctgtttaagaaaatgtgttagtgagttgaacagggaggtctttccacatgttagtagttaggtgttcagctaaagggggaagagtgattatgtgatagcttcttcttgaactgaattgtctgatgcccctgacagattctctttgtaaggagtttatttcaggggcaataagtaattggcattattgctggttggtactgcaaagtacctatgaaagtccccaaaagttcttgctattgttatttctgcattttggcagaacatgatggaaaatgcaccctcaaactttggcaaaccggcacaaagctgtgtgtttaatcacgcctgccttgtcctagtggtttctatgaatctgctacttttccgtaatattgcatcattaattgttcctgaaaaaccctgagttatcctcttatagaattgtataagtaatgattgcaatatagataattttgaaaggagaaaccacctttccttggaaatgtttatcttttgcagagtgacatttgtgagaccagctaatttgattaaaattctcttggaatcagctttgctagtatcatacctgtgccagatttcatcatgggaaacagctgttacaacatagtagccactctgttgctggtcctcaactttgagaggacaagatcattgcaggatccttgtagtaactgcccagctggtgagtacccagttatcatgtgcatttgatctgctctgttggaagtatggttcagttagtctagtagtcagggctaacgagctcccttttaaggaaaggaaaatgaaaattcattcatttacaaatgtttattggatgctacaacctagctgtgtgaacacagcaaagtcattcaacctcttgtgccttgactttctcatctggggataataagagaacctgttttataggatggctgggaggatcaaatgaagggcttagaacagtgcatggcacaaggcaagacttcaataaatgttagttttgtgtgtagggctttgtgctccgactgggggcatagcagcgagtaagcgcgtagtaaagggcttaacagagtggggacggtcagtcgcatttaaattttagtgtaggacattgatgtcctcctggatccagtcatattcatctcctacatcaatcaagataatcattttgttttattcaatagataaagtattttctttctgctgatttatttgttacaatatctggtttttttgttttttttgtgtgtgtatgtttttttttttttttttgagacacagtctcactctgtcgcccaggctggagtgcagtggcacgatctcagctcactgcaaccttggcctcccaggttcaagcaattctcctgcctcagcctcccgagtagctgggattacaggtgtgcaccactgcgcctggctaatttttgtatttttagtagagacaggatttcaccatgttggccaagctggtcttgaactgctgacctcaggtgatctgcccgcttcggcctcccaaagtgctgtgattacaggcgtgagccactgcacctggcctgtattttgttatttctaattctgtgattacacaaagaataatcttgcaaatgtattgttttaggaagtcaatcaaactaatgtccaccactgtggcatctagaaaactcatcattcttttataatcttattttcttgtaaacttcggaatgccttgggtgacgattgcccattgtcaaacgtgtaccactattgtctgcctttcttaggtacattctgtgataataacaggaatcagatttgcagtccctgtcctccaaatagtttctccagcgcaggtggacaaaggacctgtgacatatgcaggcagtgtaaaggtatgagttcaaagatattttcttcttctagaagatagttgggaagataagcttttctttcccatttactaactgctctcttttgaaaatctcaagtgtcaaagactgattcttctgccaaccagcaggtctaggacaataatatccagtgacagcaattatttgtggactgagctttctaaatattagaggaaacattcatttgacaagagagaagtttttacttacctaaatgtaaaaatgtctttatggagatttaaaagtaaactttaaaattactgggaacactataagtagagtgagcatgatttttactgcagagcataaattcgcttcctggatttggaggtcaagtgtaataaaatgttgggggctggggggactttgtaggtgttttcaggaccaggaaggagtgttcctccaccagcaatgcagagtgtgactgcactccagggtttcactgcctgggggcaggatgcagcatgtgtgaacaggattgtaaacaaggtcaagaactgacaaaaaaaggtacgtttgcgtttctttgatctagtgtagttttgtgacatagacaaacttagctttgatcttgatcctttgaaaataaacaaacagatttgtagaaccttaaagtaacaagggagtatatgatatatcatattttaattaataaaatatttcaattaataaaatatttccgttatttcttcataaatggaaataatttgaaatcagaacatttgttaattgccagaaccattaatcttcacatgttccagacatatacaatactttatgtacaattaaaataaaaactagccatcttagggtgttgtttcaagaattattgaacaatttgtgcagattgcattatggtaatgacttatattaagttcatcacaggaaaagttacaaaatgatgaaaatgcttcccttttattattgctttcatttttaatacaaggttgtaaagactgttgctttgggacatttaacgatcagaaacgtggcatctgtcgaccctggacaaagtacgtataatttcctttagtttatggaataaagaatctgggttaaattttttggaagataaggaatgctatcattgaagcttttttgcacccatcaagtgtagacagaatgtaacatactaataggcagcgtgggaacactgtgaggtcgtagcaactcaataggcaaagtgggcattttctccagaaatagtgcctggaacatctagatcagaattgccagtggaggctgggcacgtgcagtggttcacgcctgtaatcccagcactttgggaggctgagacaggaggactccttgagcccaggagttcaaaaccagcctgggtgagaccctgtctctacaaaaaatcaaaaaattagccaggcataatggcacatgcctgtggtcccagctatagggaaggctgatgaggcaggaggatcacctgagtctgggaggttgaggctgcaatgagctatgatcgcaccatcgcactccagagcagagagcctgtctcaaaagaaaggaaaagaattgccagtggaactttgccgctgtctgcctcttttctgtttccttctcattcctttgctgcctcttatcttctctcattgatcagcctgtctccatgtgttcaatgccagcccctagaatgatacagaagaaactaacaattgctcgttaccctccaaaatgtggcacagacttgggcacacaaggccatcacaggtggtaaaaagccaatagtatacgagagaatgtgactgttgttttgtggaaccagaacttacactgtggtctgtggatgggtgctggtccacaaatggcttgtcctgtgtccccatcgacagtggtgtagggttagagagtaaacatttagaaacttttaaggcaaattggcagagtaatgtggtctgttgactaagaataaaaatttgggcgttgtattttatatgtatttgttctttttccgtttcattttcttactagaaaatcatttttattattttacttttacatttttattgtatttcaaaagtgtattggtttgtaacagactggaaagtgacttttttgagagaaaataaagtgttttgaaacaggaatcatggtatctctctgcttttgtcatttacaatttatcagcatcagagtggctgacgaatggaatcatgattcacaagaaaagtattgactattttctcggacttagctgaattctgtctttggaaagtggcttttttaaaaaggtctgtttgtttgttttgtttgtttgtttgtttgtttgtttgttttgagatggagtttcgctcttcttgcccaggctggagtgcaatggcacggtctcgcctcactgcaaactctgcctcctgggttcaagagattctcctgcctcggcctcctagtagctgggattacaggtgcacacaaccacgcctggctagtgcttttgtatttttagtagagatgggctttcaccatgttagccaggctggtctcgcactcctgacctcaagtgatccgcttgccttggcctcccaaagtgctgggattacaggtgtgagccactgtgcccagctggaaagtggctttttaaaaaaggtctttcaatacaaatttttcagagttgttaagtgagtctgcatggaaaaatgggtttgaactgggctctggaggacgggcggatttggggtaggtaaagggacaagggaaaggtgtcacaacaacagcaacaatgatggcgatgatggtgataatgatagctaccatttactcagcgtgtcagatgtgcaagagtgtgtcactgactctcactcgtttgttctttgaaacagttctggcagcacatacaatcctaattttgcagatgagaaaactgaggcttagggaggtttcttttttcttttctttctgagacagcgtcaaactcctgggttcaagtgatcagcctcaaactcctgggttcaagtgatcctcccacctcagtctcccgagtagctggggccacaggcatgcaccatcagttaatttttgtttgtcttttaatttttgtagagatggggtcttgctatgttgctcaggctggtctccaacgcctggtctcaagtgatcctctggcctcagcctaccaaagtgttgagattataggcgtgagccaccatgctggggttacagagatttcttgacttgcccaaagtcattctggaaagcagcagacccagggctcaaaccctggtttgcctgatgctagtgctggacctcctaaccctatgctagccttcatctgtgccggagatggtcaagtccgattaagaaactgggggtgagagactaagcaggcaagacagactgaactaagctgtcactgaacagaaggaagccatggaaagctgcagggagccagatggtcaagtggaagtttttcaaaatatctttgcatcgctttcgaacccagacccatatatctttttcactaggctacttcattgggtgaaaaatgacaaagttttaaaccagaatcttctggacctaagttaattatttaaattattttcattgaactgtctaagctgttctttggatggaaagtctgtgcttgtgaatgggacgaaggagagggacgtggtctgtggaccatctccagccgacctctctccgggagcatcctctgtgaccccgcctgcccctgcgagagagccaggtaactgggctatgcctttacgccaaagtgcgtatcttatggtgattccagattgtatctaaattgccccaatatcatgatatctcatatcaggcacctcccacgtgcattcttcctgaatcctgccctcagggacccagcagttttcttcccaggcatttgttattcagtctgagatacacatttgtaagcggtgccagaggacacttcacccaaacagagtctatatctttatcaatgccaaggaaaggggattatagggtcccatattttttcttttcttttcttttctttttttttgtttttaagagagtgtcttgctctgtgccaggctggagtgcagtggtgcagtctcagctcactgcaatctccacctcctgggttcaagtgattctcctgcctcagcctcccaagtagctgggattataggcatgcaccaccacgcccggctaatttttgtatttttagtagagatgaggtttcaccatgctggccagtctggtcttgaactcctgaccgcatgatccgcccacctcggcctcccaaagtgctgggattacaggtgtgagccaccacgcccgtccagggtcccatattttcttttcttttttctttctctctctcgctttttttttcccccgagagtgccttgttctgtgccaggctggagtgcagtggcttgatattggctcactgcaacctccacctcctgtgctcaaccaatcctcccacctcagcctccccagtagctgggactataggcactcaccactacacctggctaattttttatttttttggcagagtcggggtcttgctatgttgctcaggctgctctcaaactcttgggctcaagcaatcctcctgccttgggctcccaaagtgttgggattacaggcataagccgccacgcctggtccccaggtcccatattttctatgtgctagaaaggataaactgctcaattattaagtttcttttatttttttgggggggtggacagagtctctctctgtcacccaggctggagtgcaatggcgcaatctcggctcactgcaacctctacctcccaggttcaagcgattctcctgactcagcctcctgagtagctgggattacaggcgcccaccacggcacccagctaatttttgtatttttagtagagatggagtttctccatgttggccaggctggtttcaaactcttgacctcaggtgatctgcccaccttggcctcccaaagtgctaggattacaggtgtgagccaccgctccctgccattaagtttctctttttcttttctttcttttcttttttttgagatggagtctcactctgttgcccaggttggagtgcagtggcaccatcttagctcactgcaacctccgcctcccgggttcaagccattctcctgcctcatcctgccaagtagctgggattacaagttcctgccaccactatgttggccaggctggtcttgaactcctgactctaagtgatcctcctgcctcggccttccaaagtgttgggattacaggcgtgagccaccatgtctggcctctttaaaagttttctaagtttactccattagcaggttggagatgcccaaggctgtgattcttctcatgcttagaaatttaccaatgtaaatatatacatgggtgtatgagtgtcaacacatttctgcatgcgtttctccttttgctgtgttttgcaggacactctccgcagatcatctccttctttcttgcgctgacgtcgactgcgttgctcttcctgctgttcttcctcacgctccgtttctctgttgttaaacggggcagaaagaaactcctgtatatattcaaacaacgtaagattaacataatcatattacagctctggcaaggcaaggctttttataatagaaaggaaaatatgattttaaaaaaaattctagaaatgaggttcatatagccccgtggctatcacgcaggggcaatttcgtccctgggaatatttgcagtgtctggagacagttgcagtgttcaccgctcggtggtgatggtggtgattaggggctattgcatctagtgagtagaggtcagcaatgctgctcaactcctaccgtgcacgggacagcctcccagcaaagaatgatgctgccccaaatgtcaatagtgctgaggtggagaaagcttgcatatagaagagcacacctcggttctagaaaaatgacagatttaaatatgctgcagccttggattattgcatgtatgtgtatgtgtgtgtgtgtgtgtatgtgtgtgtgtgcgtgtctgtgtgtgtgtgcgtgtgtgtgtgcgcgtgcgtgcgtgtgtgtatgtgtgtgtgtgcgtgtggaggacactggcaaagaagaatcagaaaaccatgttccctctatgtccctctggttgataaactggcttaaaatgagtttagacccatatttgaggaaggcaaggagaacaaagagggagcttgaagggggtttaacaaatgaattattacagcaccagtatggattacatgaaaaatttcaataatgaatttcattcattcacttgttcaacaattatttctgtaaggtactcagcaagtgcctggcactgagtcagcatccactagacaaaagccattgatatttatttgaaaaagtatatagatggaaggcaatctgttttttgtcttcatggacattaggatgagacataacaggcttaataagacttaataagagggatataataaaaggagctttttgagagcaaaattttaacccaaagcaccatgtaagaccagaatgtgcctatttggagattgttaaaaatatatatgcaggaacagcattagtaaagtctttttttttcttttttgagacagagtttcactcttgttgcccaggctggagtgcaatggcgtgatcccggcttaccgcaacctcctccttccgggttcaagcgattctcctgcctcaggctcccgaggcattacaggcatgcgccaccacacccagctaattttgcatttttagtagagacggggtttctccatgttggccaggctggtcttgaactcccaacctcaggtgatccgcccgcctcagcctcccaaagtgttgggattacaggcgtgagccactgcgctcagccagtaaagtcttatctaataaattatgctaatgtatttaaaggctctttttaaagcaatatagaacttttatacattgtgacctatacagaaaaatgcataaatgtaaagtttaacaaattgttgtaaacaaacattcaaataactctaccagggtaaagaagtggaacataactcattcccgaagcccttggcatgccctttctagatcacagccctctttgcccactactgctaaccacatctagacttgtatggtattaacttccttttgctgtagttttgctacctaataacacagttttattgggctgcttgtgaacttcatacaaatagaatcacactgttttctgtatcttgcttcttctttcaacgttgtatcatgaagattcatccatgttgagttcatctttagttgatttccactgttgcacactcttgttgaatgatgacatcattgttcacctattctagtactgatggacagcgggatcatttccagcttggggttattacatgtaatgacgtttgaatatttttgtccgtgtatctcagcacacgtaaacacgtgtttctggcttggttttgttttttaacctagaaataacgttgctgagctacaaggaacatgtgtatcttggtcgtgaatatgccaaactgttttcctaaatgattggaccccatttacactcccctggcggtaatgagtttcctgttactccacatcccctgataactcttggtatcatcagattatttttatcgatatggtgggtggatagttgtatctcattgtggttttaacttacacttcctggttgctagtgaggttagacgccttttcatgttattttggctatttggatttcctctttagtgaagggcctgatcaagtcttttgagtattttctcataggattgtctgtccttttcttactaacgtataggaagtttttagtctgctgttcatgagctgcaaatatcttttcctattctgtggtttgctctttcattctttttttgaggtctacacctccagtttaaacctctgcgttctcacttaaacctgatttcagttttgtcttttgtttttttgagacagagtttcactgtgtcacccaggctgaagtgcaatggtgcgatcacagctcactgtagcctcgaactccagagctcgagcaatcctcctgcctcagcctactaaatagctgggactataggtgcataccaccacactcagctaatttttaattgatttttagtgtttttgtagagactgggattcacggtgttgtccaggccagtcttaaactcctgggctcaagcgatcctcccacctcggtttcccaaagtgctggacttaatcctgatttaaaggagtatctctgcaacaaagttccatccacaccccagactgcaacaaagttcgttataaaatgcttttcaaaagtatttatgagtaattagtgagtttcaatggaactgtaatccattttttaaaagtttttaggacactccctggtagtctagtggttaggattccgcgctcgccatcacgacccgggttcgattcctggtcagggaagccttccttctggctgggcgctgtggctcacgcctgtaatcctagcattctggggggctgaggcgggcagatcacctgaggttaggagttcaacaccagcctggccatggtgaaaccccgtctctactaaaaatacaaaaaattagccaggcgtggtggtgcatgcctgtaatcccagctactcaggaggctgagacaggagaatcgcttgaacccgggaggtggaggttgcagtgaactgagatcgtgccattgcactccagcctgggcaacaaaagcgaaactccgtctcaaaaaaaaaaaaaaaaaaaggttttaggtcgttcaaaagaactttcaattttgacgtaattatagattcacaggaatttgccaagacaggaacatctctcatgcggtttctgggttccattctccagtacaatggcaaagcaggaaattgacattggcacagtgtgcgtgtgtagttgtttgtccctttatcacacatgtggagttgtataacaaccagcacaataaaatcagaactatccatcaccacagagatctccttccactattcctttctagttaggtcctctacctctccccaccatcccctggcaaccacttatctgtctttcatctctatacttttgttatttaaggaatatggtataaatagaatcatatggtatgtgtcaagctaaatcatagatagagagagcctctctaaaagattatattttttcaggagtagcattgcagtgggaatacggtgggtgtattcagggatgtaaaggtgatgcgagtttttaaaagaaaaaatgaggggcggggcacagtggctcatgcctataatcccagcgctttgggaggctgaggcggatggatcacctgaggtcaggagttcgagaccagcctggccaacatggtgaaaccccatctctactaaaaatacaaaaagttagccctgcatggtggcacgtgcctgtaatcccagatacttgggaggctgaggcacaagaattacttgaacctgggaggcggaggttgcagtgagctgatatcgcatcctgcacttcactccagcctgggcgacagagcaagactctgtctcaaaaaaaaaaaaaaaaaaaaaggaaaaagaaaaaaaagaaaaactgaggagggttatgtaagttattttgaaacaattatcctttgctacaaagatcaataccggcagaagtatttttttgttaagatacagtagccttggtgcaaggttgtggtttctgccatcttttgtgatagttgtttttatcaggcatgcatgcataagaaacccccttcacggccttccctggctccatttgtcagggtttttgtttgtttgtttgttttttggttttttgttgttattgttgttgtttgtttttgagacaggatctccctgtgtcattcaggctggagtgcagtggcgtgatctccactcgctgcaacctccgcctcctgggttccagcgattttcgtgcctcagcctcctgagtagctgggattacaggcagctgccaccatgcccggctatagtagagacggggttttgccacgttggccaggctggtcttgaactcctggcctcatgtgatctgcctgcctcagtctcccaaagtgctgggattacaggcatgagccaccatgcccggcccatttgtcagggttttgacacaagttactccattttgattctgacaactttcacaaacgtgaactttttttaagattttgctttttcactcagcacaatgcccttgatatccatccaagttgctgtgtgtttcaatggttaattctttttccttgctgaatagtattccacgatatgcttgtgccacagtttgttttaccatgcacccattaaaagatattttgtttgcttcctgttttgactattacatataaagctgcgaggaataattatgtacaggttttgtgtggacatgtatttttgtatctctatgataaatgctcaggagtgcaattgctgggctatatgtttggtgcttgtttagtttttaagaagttgtcgaactattttccagaggaagtgtatcattttacattctcatcggagtttctctgcatccttgcttgcattttgcattgccacaatttttatttcagctgttctaataggtatgtagtgacatctcattggggctttaatttgcacttcccttatgggtggacatcttttcatgtgcttattttccatctttatatcttcttcagtgaagtgttgttcaggtctttcacctattttctagttggattatttgtttgttttactgttgagattcaagagttcttcgtatttcccagataggagtcctttggcatatatatggtttataaatattttctcccagtcagtagcttgccttttcatcctcttctcaggctcttccacagagaaaagctatttaattttgctgaagtccagtttatggattttttcatttatggagtcatgtctaagaattcttcactgagtcctgggtctcaaagatttagggtttttttttttcctctatctcttataacttttacagttttctatttcatatttaaatcttgattttttttttctgagacagggtctctgctttgtcacccaggctggagtgcagtggtgtgatcatggcttactgcagcctccacctcctgggctcaagtgatcctccctccttggcctcccaagtagctgggactacaggagtgtgccagcacttgctgtggacctattggactgaacaaaggggggcaaaagcgggaataaaagacgagacaaaagagtatatttggaagaaggggtcagggggcaccttgcctctagtggacaagggccctgagctttacacagccctccgtatttattaggcaaaagagatagtgagaaagcggggatgattgtcgggtaattgtcagttagccgtttggtgtttggttcacagcaggcttgtgagactgcatcctttgaacaataggtgctagatttctcaatagataacttcaaggagccagggagtagcgtccctcagcaaactttttggtggcagggcagtgtgagtttgctcacatcttgcattcgtgatgaacactttgctgtttgatcatatagcctccagtggaatgttgagttggtcacgtctcacgggctttggctctctgcatgcctgggtaatttttttttttattttgagacagagtctcaccatgttgctcaggctggtcttgaactcctggccttaaacaatcctcctgccttggcctcccaaagtgctgggattacaggtgtgagccactgtgcccatgcttgattcgttttaaatttttcgtataaggtgtgagaggttttagccaagttttttgttgttgtttttgttgttggactatggacgtccaattgctctagcaccactagtggaaaacattagtcatccttcattgtacctttgtcaaagtcagttggctgcaattacgtggggctatctggtttccctcttctgttccattgatccatgtgtttcttcttctgccaataccacacagccttgattactgtagttatacataaatactgaaattgggtagagggtggtagtctctcccactttattatttcatttcaaaattgttttatctattctagttcctttgcatttccacatacattttaggataatatctatatctacaaaaagccggctgggattctgataacaattgtgttaaatctgcatatcagtttcgggcaaattgacatctttactatgtgaagtacagtcacatatcacttaatgacaggggtagttctgagaaatgtgttgttaagtgatttcgttgttgtgtgaacatcatagagggcacttatgcaaacctagatggtacagcctactatacacctaggctggatggtatagcctatccctcctatactacaaacctgtcaggcatgtgactgtaccgaataccataggcaactgtaacataatggtatttgtgtagctaaacatatctaaacatagaagaggtaccgtgaaaataatatgatctttgccaggcgcagtggctcatgtctgtaatcccaacactttgggagaccaaggtgggcagatcacctgaggtcaggagttcgagactagcctggccaacatggtgaaaccctgtttctactaaaaatacaaaaattagccgggtgtggtggcgcatgcctgtaattccagccacttgggaggctgaggtgggagaatcccttgaacctgacaggcagaggttgcagtgagccgagatcgcatcactgcactcctggctgggcaacagagtgagacgccattagaaaccaggccacccagcaggaggagagtggtgggcaagcacgtgaagcttcctctgtatttatagcccctccccatgacttgcattaccgccttatctccatctcccatcagatcagcagcggcattagattctcataggagcatgaatcctattgtgaactgcgcatacgagggatcgaggttgcacgctccttatgagaatccagtacctgatgatctgtcactgttccccatcacccccagatgggactgtctagttgtaggaaaacaagctcagggctcccactgattctacattacagggagttgtataattatttcattatatattacaaagtaataataatagaaataaagtgcacaataaatgtaatgtgcttgaatcatcctgaaaccatccccccacccacccagtccgtggaaaaattgtcttccacaaaactggtccctcttgccaaaaaggttggggacctctgctgtatatcactgtagtcttataaacactgtacacttaagctaacctaaatttatttaaaatgttctctttcttcaataataaattaaccttagcttactgtgactttttacttcataaactttaatttttttttttttgaggcagggtcttgctgcccaggctggaatgcagtggcgagatcttggctcactgcagcctgcacctcccaggttcaagtgattctcctgcctcagccccccaagtagctgggactacaggcagctgccaccacgcctggctaatttttgtattagagatggggtttcaccatgttggctaggctggtctcgaactcctgagctccggtaatctgcccacctcggcctcccaaagtgctgggattacaggcatgagccaccgcacccagcctataaacttaaaaaaaattttttttaactttttgactcttttgtaataactcttagcttaaaacacaagcacattgtacagctgtacaaaaatattttctctttatttccttattctataagcttttatctatttaaaagtttttaaattgctttttactttttaaactttttttgtgaaaaactaagacacgaacacacttattagcctagacccacacagagttggtgtctgccacctccacatcttgtcccactggaagatctttggggcaaaaacatgcatgtagctgtcatctcctatgagaacaatgtcttcttctggaatacctcccaaaggacctgcctgaggctgttttacaattaactggtttttgtttgtttgtttgtttgtttgttttttgtttgagaggagtcttgctctgttgcccaggctggagtgcaatggggcggtctcggctccctgcaacctctgcctcccgggttcaagggattctcctgtctcagcctcccgagtagctgggattacaggtgcatgccgccatgcctggctaattttttgtactttagtagagacagggtttcaccaaattgcccaggctagtctcaaactcctgagctcaggcaatccacctgccttggcctcccaaagtgctgggattacaggtgtgagccacaacacccggccttaactggttatatatatatatatatatatatatatatatatatatatatggaatatactatgaaataactataaaaagtatggtatagtaagtccataaactactaacatagtcatttattgtcattgtcaaggattatgtgctgtacataattgcatatgctacactttacacaactggcagctcagtaggttttttacatcagtatcaccacaaacgtgagcaatgagctgtgctgcaatgttatgatggttggacatcacgaggcaataggaacttttcagctccactataatcttatgggaccacgatcatatatgcagtctgtttttgaccaaaacgttgttgtacgctgtatgactgtattctaatgcaggaacatagtatgtctcttcatttatacattttaaaatttatttcaccagcattttgtagttttcactatacaagttctgtatgtgttttgttagatttaggcctaagtaaaaaaaaaattttttagaagtcagggtcttgcttgctctattacccaggcgggagtgcagtggcatgatcacgcctcaatgcagcctcaacttcctgggctcaagtgatcctcccacctcagcctccagagtagctgagactacagtcatgtgccaccacccctggctaatttttaaatgttttgtagagacagggtcttgctctgttacccaagctggtctagaactcctggactcaagcgatcctcctgccttggcccccatagtattgggattacaggcgtgagcccccacacccagtttctggatctaatttagatcttgtattttctcagggttcctctgacatcactctagggaaggaaggaggatgggcagctcgttacggccaggcaggggtggaggaagtttgggttctatgctatacctcctggagggtgagggtctcctttttactgctagacacgtgggagttctagctcccactaggcctcctctgacactaccccaggagggagggggagatgagccttaatcagccgtgagggtggaagtccaggctctctactcagtccttcctggtgggcttgcaggcggagccacggtgttttttgtggtgttttgttagaattgagtggttattgtctagaagtttttggaccaggtgtggtggctcacgcctgtaatcccagcactttgggaggcccagatgggcggatcataaggtcaggagtttgagaccagcctggccaatatggtgaaaccccatctctactaaaaacacaaaaattagccgggcctggtggcgggcacctgtagtcccagctactcaggagactgaggcaagagaaccgcttgaacccaagaggcggaggttgcagtgagctgagatcacgccattgcactccagcctgggcaacagagtgagactccatctcaaaaaaaaaaaagaaaaaaaaaagaagtttgtagtcttgctatgctgcccctttcctggtctcataactagagagtacaagctcctcttagttttttatgtgtttttttgagatggagtcttgctctgttgcccaggctggagtgcagtggtgtaatctcagctctctgcaacctctgcctcctgggtttaagccattgtcctgcctcagactcccgaatagctaagattacaggtgagcgccaccatgcccagctaatttttgtgtttttagtagagacagggtttcgccatgttggccaggctggtctcgaaatcctgacctcagatgatctgcttgctttggcttcccaaagtgctgggattacagatgtgagtcaccacgcctggcctcttcttggtttttgctttgttttgtccacgctattggcatttttagagtgctgcttctctagttcccagtcagagggaaatgaggcagaaagaaacccattgccatgttgtttcttgggtctggagatcctgacccaattggccttcctctctctgcctttctgagaggttttcagcagtactcagcaggacaaatacggaaaacatgacatctcaatctttccagaagagatctccattttgaaattcaacctgggaacaatttcaaaagacatcccgttggtatttctgaacatcttgccagtttttcataagttctaggagatggtgtggttattttttatagcaacaagcatatgaaatcggggtaggactttttgccttgccagtctgtaaataaatatctgcttaggattgaaatttgcggagcagtaacacaaatacttcactaacatgtaaaagaaagcctggcagctcacgcacagatcggttcttggttcctaacagatggaagcagtggggataccttcacaatcctggagtcataacactgcattccaaggaaaccatcggatctcgaatctcagtaaccctcaagacgaaaataagtgctgctgaattgaaactagagctatgattgggatatggctaatattttatggtttagtgattcatgcttaagattcatgcttttttagctaatgtagaaaataaagaaaatagttcttaaagaccaatacaaatatttggtaagaggaaacaaatttcaaataatctctagaggaagttcatccttgctgttacctctcttgtggatgagtttgttaaaattattattactattattattataattttttttagatggagtctcactctgtcacccaggctggagtgcagtggcgcaatctcagctcactgcaacctccacctcccaggttcaggcgattctctgcctcagcctcccgagtagctgggattacaggcgcccaccaccacgcccagctaatttttttggtatttttagtagagacggggtttcaccatcttggccaggctggtcttgaactcctgaccttgtgatccaccggcctcagcctcccaaagtgctgggattacaggcatgagccactgcacccggcctgtttttgttttgttttgttttgttttgttttgttttgttttgttttgttttttgagacagagtttcgctgttgtcacccaggctggagtgcaatggcgccatctcaagtcactgcaatctctgtctcctgggttcaagcaattgtcctgcctcagcctcctgagtagctgggattacaggcacctgccaccacgcccggctaatttttgtatttttagtagggatggggttttgctatgttggccacgctggtcttgaactcctgacctcaagtgatctgcccacctcggccttccaaagtgctggggttacaggcatgagccaccacgcctggctgagtttgttaaaattaaaggggagaatgtttgctgcttagagatgttctgcagctataatttatggaaaataagtgttaaatgattcaaatagacaacaaaatatacgtatcttaaaattttttttttagcatttatgagaccagtacaaactactcaagaggaagatggctgtagctgccgatttccagaagaagaagaaggaggatgtgaactgtgaaatggaagtcaatagggctgttgggactttcttgaaaagaagcaaggaaatatgagtcatccgctatcacagctttcaaaagcaagaacaccatcctacataatacccaggattcccccaacacacgttcttttctaaatgccaatgagttggcctttaaaaatgcaccactttttttttttttttgacagggtctcactctgtcacccaggctggagtgcagtggcaccaccatggctctctgcagccttgacctctgggagctcaagtgatcctcctgcctcagtctcctgagtagctggaactacaaggaagggccaccacacctgactaacttttttgttttttgtttggtaaagatggcatttcaccatgttgtacaggctggtctcaaactcctaggttcactttggcctcccaaagtgctgggattacagacatgaactgccaggcccggccaaaataatgcaccacttttaacagaacagacagatgaggacagagctggtgataaaaaaaaaaaaaaaaaagcattttctagataccacttaacaggtttgagctagtttttttgaaatccaaagaaaattatagtttaaattcaattacatagtccagtggtccaactataattataatcaaaatcaatgcaggtttgttttttggtgctaatatgacatatgacaataagccacgaggtgcagtaagtacccgactaaagtttccgtgggttctgtcatgtaacacgacatgctccaccgtcaggggggagtatgagcagagtgcctgagtttagggtcaaggacaaaaaacctcaggcctggaggaagttttggaaagagttcaagtgtctgtatatcctatggtcttctccatcctcacaccttctgcctttgtcctgctcccttttaagccaggttacattctaaaaattcttaacttttaacataatattttataccaaagccaataaatgaactgcatatgataggtatgaagtacagtgagaaaattaacacctgtgagctcattgtcctaccacagcactagagtgggggccgccaaactcccatggccaaacctggtgcaccatttgcctttgtttgtctgttggtttgcttgagacagtcttgctctgttgcccaggctggaatggagtggctattcacaggcacaatcatagcacactttagccttaaactcctgggctcaagtgatccacccgcctcagtctcccaagtagctgggattacaggtgcaaacctggcatgcctgccattgtttggcttatgatctaaggatagctttttaaattttattcattttatttttttttgagacagtgtctcactctgtctcccaggctggagtacagtggtacaatcttggatcaccgcctcccagtttcaagtgatctccctgcctcagcctcctaagtagctgggactacaggtatgtgccaccacgcctggctaatttttatatttttagtagagacggggtttcaccatgttgtccaggctggtctcaaactcctgacctcaggtgatctgcccacctctgcctcccaaagtgctgggattacaggcatgagccaccatgcctggccatttcttacacttttgtatgacatgcctattgcaagcttgcgtgcctctgtcccatgttattttactctgggatttaggtggagggagcagcttctatttggaacattggccatcgcatggcaaatgggtatctgtcacttctgctcctatttagttggttctactataacctttagagcaaatcctgcagccaagccaggcatcaatagggcagaaaagtatattctgtaaataggggtgaggagaagatatttctgaacaatagtctactgcagtaccaaattgcttttcaaagtggctgttctaatgtactcccgtcagtcatataagtgtcatgtaagtatcccattgatccacatccttgctaccctctggtactatcaggtgcccttaattttgccaagccagtgggtatagaatgagatctcactgtggtcttagtttgcatttgcttggttactgatgagcaccttgtcaaatatttatataccatttgtgtttatttttttaaataaaatgcttgctcatgcttttttgcccatttgcaaaaaaacttggggccgggtgcagtggctcatgcctgtagtcccagctctttgggaggccaaggtgggcagatcgcttgagcccaggagttcgagaccagccttggcaacatggcgaaaccctgtctttacaaaaaatacaaaaattagccgggtgtggtggtgtgcacctgaagtcccagctactcagtaggttcgctttgagcctgggaggcagaggttgcagtgagctgggaccgcatcactacacttcagcctgggcaacagagaaaaaccttttctcagaaacaaacaaacccaaatgtggttgtttgtcctgattcctaaaaggtctttatgtattctagataataatctttggtcagttatatgtgttaaaaaatatcttctttgtggccaggcacggtagctcacacctgtaatcccagcactttgcggggctgaggtgggtggatcatctgaggtcaagagttcaagatcagcctggccaacacagtgaaaccccatctctactaaacatgtacaaaacttagctgggtatggtggcgggtgcctgtaaccccagctgctccagaggctgtggcagaagaatcgcttgaacccaggaggcagaggttgcagcgagccaagattgtgccattgcactccagactgggtgacaagagtgaaattctgcctatctatctatctatctatctatatctatatatatatatatatatatcctttgtaatttatttttccctttttaaaattttttataaaattcttttttatttttatttttagcagaggtgaggtttctgaggtttcattatgttgcccaggctg

SEQ ID NO: 25109 - DNA, 1419 bp, Homo Sapiens
ccacgcgtccgagaccaaggagtggaaagttctccggcagccctgagatctcaagagtgacatttgtgagaccagctaatttgattaaaattctcttggaatcagctttgctagtatcatacctgtcgcagatttcatcatgggaaacagctgttacaacatagtagccactctgttgctggtcctcaactttgagaggacaagatcattgcaggatccttgtagtaactgcccagctggtacattctgtgataataacaggaatcagatttgcagtccctgtcctccaaatagtttctccagcgcaggtggacaaaggacctgtgacatatgcaggcagtgtaaaggtgttttcaggaccaggaaggagtgttcctccaccagcaatgcagagtgtgactgcactccagggtttcactgcctgggggcaggatgcagcatgtgtgaacaggattgtaaacaaggtcaagaactgacaaaaaaaggttgtaaagactgttgctttgggacatttaacgatcagaaacgtggcatctgtcgaccctggacaaactgttctttggatggaaagtctgtgcttgtgaatgggacgaaggagagggacgtggtctgtggaccatctccagccgacctctctccgggagcatcctctgtgaccccgcctgcccctgcgagagagccaggacactctccgcagatcatctccttctttcttgcgctgacgtcgactgcgttgctcttcctgctgttcttcctcacgctccgtttctctgttgttaaacggggcagaaagaaactcctgtatatattcaaacaaccatttatgagaccagtacaaactactcaagaggaagatggctgtagctgccgatttccagaagaagaagaaggaggatgtgaactgtgaaatggaagtcaatagggctgttgggactttcttgaaaagaagcaaggaaatatgagtcatccgctatcacagctttcaaaagcaagaacaccatcctacataatacccaggattcccccaacacacgttcttttctaaatgccaatgagttggcctttaaaaatgcaccactttttttttttttttggacagggtctcactctgtcacccaggctggagtgcagtggcaccaccatggctctctgcagccttgacctctgggagctcaagtgatcctcctgcctcagtctcctgagtagctggaactacaaggaagggccaccacacctgactaacttttttgttttttgttggtaaagatggcatttcgccatgttgtacaggctggtctcaaactcctaggttcactttggcctcccaaagtgctgggattacagacatgaactgccaggcccggccaaaataatgcaccacttttaacagaacagacagatgaggacagagctggtgat

SEQ ID NO: 25110 - DNA, 98039 bp, Homo Sapiens
tccagcttcctggattaatgctatggaaagaatgaagttggttgataatgtttagcctagcaagaaggtgaagaagaaagccatacaagaagtggcttaggcagcaaattataaaggtgaccattcattcaaatcagtaaaacaaacaagtataccttattctttaggtaaaattgatggatctctgttttccagcagttcacaaacagaggggtacattgtaaacaacaaactaacaaaataaattctgggatggcaacctgctaaggtatcccagaaaataagaggtaggacatgaatttaaaagattggaaggtatgtcttcagtactggcctggccctgagtagactagtgctccctcccataggggtgcgtgtgcacacataatacaggagggaagccttcccttctagagcaagtgattcagcttgggaggctgtgactgagctacactaagtaaaaacgggagacttgattgtccttccttcaacagacctgtccaaaatgactggaaagtaaataccgtaaatcactgttgtcagggcgcacattccacctccttcctcccttacccacagcggtcctcatttccacactccctcaacggttcggggagagctcgtggtctaagtaacgagaggacttctgactgtaatcctagcacgtcactttgttgaaggcagacacgtggttcagagagaacttataaatctcccctccccggcaagatcgtgatgttatctgctggcagcagaaggttcgctccgagcggagctccagaagctcctgacaagagaaagacagattgagatagagatagaaagagaaagagagaaagagacagcagagcgagagcgcaagtgaaagaggcaggggagggggatggagaatattagcctgacggtctagggagtcatccaggaacaaactgaggggctgcccggctgcagacaggaggagacagagaggatctattttagggtggcaagtgcctacctaccctaagcgagcaattccacgttggggagaagccagcagaggttgggaaagggtgggagtccaagggagcccctgcgcaaccccctcaggaataaaactccccagccagggtgtcgcaagggctgccgttgtgatccgcagggggtgaacgcaaccgcgacggctgatcgtctgtggctgggttggcgtttggagcaagagaaggaggagcaggagaaggagggagctggaggctggaagcgtttgcaagcggcggcggcagcaacgtggagtaaccaagcgggtcagcgcgcgcccgccagggtgtaggccacggagcgcagctcccagagcaggatccgcgccgcctcagcagcctctgcggcccctgcggcacccgaccgagtaccgagcgccctgcgaagcgcaccctcctccccgcggtgcgctgggctcgcccccagcgcgcgcacacgcacacacacacacacacacacacacgcacgcacacacgtgtgcgcttctctgctccggagctgctgctgctcctgctctcagcgccgcagtggaaggcaggaccgaaccgctccttctttaaatatataaatttcagcccaggtcagcctcggcggcccccctcaccgcgctcccggcgcccctcccgtcagttcgccagctgccagccccgggaccttttcatctcttcccttttggccggaggagccgagttcagatccgccactccgcacccgagactgacacactgaactccacttcctcctcttaaatttatttctacttaatagccactcgtctctttttttccccatctcattgctccaagaatttttttcttcttactcgccaaagtcagggttccctctgcccgtcccgtattaatatttccacttttggaactactggccttttctttttaaaggaattcaagcaggatacgtttttctgttgggcattgactagattgtttgcaaaagtttcgcatcaaaaacaaacaacaacaacaaaaaaccaaacaactctccttgatctatactttgagaattgttgatttcttttttttattctgacttttaaaaacaacttttttttccacttttttaaaaaatgcactactgtgtgctgagcgcttttctgatcctgcatctggtcacggtcgcgctcagcctgtctacctgcagcacactcgatatggaccagttcatgcgcaagaggatcgaggcgatccgcgggcagatcctgagcaagctgaagctcaccagtcccccagaagactatcctgagcccgaggaagtccccccggaggtgatttccatctacaacagcaccagggacttgctccaggagaaggcgagccggagggcggccgcctgcgagcgcgagaggagcgacgaagagtactacgccaaggaggtttacaaaatagacatgccgcccttcttcccctccgaaagtaagtacttattttgacttccatcccctgaggtttagctctgcccggagctctcaaaaccgcagcagctcccgggatcgcccttccctctcgcggttcccgttcgctcttttcccgttctcctgtccttcaccccaccacctccttttcagttgtatgcttgaggccatcaggctttaaaatgtttactttctactttattttctccatctttcccttccccctaacaattcggtgctttaaaaggcgttattctctttttctcttccctgaagttctttagtcggccaccagctaggagtcagccccactctgtcaaactagaggtgctcccaggggcagagttaaactgaggaatcttggtaggtttgttttctttgctccgattggcgtggagcgcgccgaactggtgcacgaagggttaaaaaaagtgtctcaaaactagcctctccggaaggcgccccctttccgtgctgacctatcagctggttccccaagccttctctattgtctctaactaccctaaaaatgtcagcatcgccgagacaaaacccggtttggagacccctcgagaaacctacctggccctcagtccttgatgtatcatttgctatcactaggtgtttcattacccaaaggcaaaatcctataaccacgttcccttttcacttaacctggagtgtagaaaggacaactccgtttctgactgtgttttaaaaggttttgttcacgttatttttcagaatacactcaaacctgccttcttcacatctccagtgtagcagatcatttttcttacgggtctgttatcctgctcctgccttttcgtaggcttcctgcagttacttcaatgcattcctaaaactcagagtagacgacagccgtattttttttttttttttttactggcttctctgagaacagtgtcctcaaaaccagctggcatacagtagcaataggagtgaaatgatttattgcagaggaagggaacagacagtgtagaatgatttcagagttcttaaaaaaagaaaaaaaagaaagaaagaaagaaaaggggcagcagcatccacttgatacctgagagggttaaataccaggaagaagaaaaagaaaagtgggggcggggtggggggaacctcttcaacatttgtgtattccaaatcccaagtcataaacttttcattggttgctcatttctctcctcccctttccatgccctatatacttgctggctgcctttgcaaagtctctgtgtcttgcctaaatagataatatagccatcttggtaattttctcttaaaggttctagttgcagggtggtgcttttcttttttaatatttatttttagtttgacaagtcctagctatgtgacctgccatgtcttgtacttgatggtctcagaagtcagcccatgtatctaaccccagtcttcctagtgacccttattttgctgcagtttctcctgttcttgttcaatagcagaacagatgcagagaattctggcaagcaggatgattttattattgtaattatggcactatccgcaacagcggtgataaatacactccacccctggttatcccctttgggaagtaaagctttctatctggggtggagccaaggagatattaggaaagaaagttcattgtaattagtccaaaaccattgagacaaacaaggagttcagtcagtttgctttctctagcatgtgcatcggttctaccggtatttgggcagagcggaaagtatgttatgtagaacctgaataactcatctttcaatgtttatatgcaaaaggtctaataaactgccagcacttctataacacagaaaggagctctgatcccatttactgaataggtgtggagagagcaagtaacccaagagggcattagttctttgttctctgaagcacacttcagtctgaagagctgagatgatccaacccagggtcatggtcatcaacaaactggaaaaattcctagattattaggaggatttcagagtatggcatttaacatcaatgtgtggattctcctttccatttcaccccagccaccaaataaatgaaaacctccgatacgtccaagataaataaaatatactgccagttttcatacaaagaatacaggctttaaaaagtctgtattctgtatggaagtttaggagcagaaagccatattaatagcaggttcgatactactgtgcaaggactggataattttatagaaaataggttaactgattatccagcactttttagttatactggaatatagcaaacccttccaaaaaaaaggaaaaaaagaaaaaaaccatatttttaaaaagcaaattgaaagtacagcattggcttatataccagctttccctctttaggacttttctgcctaacttttaactcagctgtcactgaagtggctgtggggagggagtgtgcctgtcattccttgcagtgaatctggcgagggtcataagccccagagatgaagccatgggaaagatcactggttcattttttaccatcaacttattagcgttcagggagtgacttcagctcaagtattacaaatatgctctaattatactcaatgagctatatatcattacagattgctgatagccctttgtgggacattttataaagttcagactacatatttttagcaatgtggagatttaaaagtaaaaatataagagatattgtatatgccctgaggcatattttgtcttaaatattatccttggccaagtatactatataaatacagtaaatatgaatagaactggccaggtgccaatctcctaggatgaattttagtcaagaatgtatttatgggatataaataatactgtgtcaacatttaaagaaggggtctgattagttttgaatttattcatattgatcttttcacgtgctgttagtttaagactcgaagtggagttatgctaaggtttaccgatagtttgcccactgggaattagtggacctctagtagtttaacaatccatttgaagttcgaggcacatctattcgaaagatgctgcacaaggttttagaaacttagaaagggtgattcagttatacacaggaagaattcaaataattgacatgtaagaatctgtagagagtccgacaatcaaaaagaggaagagacacaacgtttcattttctttcttttctctccctttttcattgtaaccaatcagcacatgttgtggttctaaccctggtgattttgtactccccccaacacccgcacccctactcccactggaacgtttggcaatgtccagagacactttgggttgtcatgactggaggtggaggggtgctaccggtatttagtgggtcagccagggatgtttctaaccatcctataatgcatagggcaaccccccattcccaacatcaaagaattatcctgaccacaatgtcagtaatgcctctgttgaggagccctggtatttgttgggggttactgaattctgttaacagtaccatttagaaaataataacaaaaataaaatatctttatgatcaaagcatattcaaatgagaatactgaataggaggatagtcagacagttatcttaattaaatggagtgtggattagaccattgtatacagtatgtactttattttttgtggtcttaaagcccctaaattagagacatcaaaacttcccatttatttagcttaagtgatggtgttgacctatccattactagcttcagtcagcagcagtgtgatgttagaacagagaaaaaagaagtgaggaattatcatggattccccttgcaagggaaataagcagtttgtgttaacaaagagtggaatctccaagctaggcaatggaagaaagtaaataatcatcttgatttattctaccattttgaagtagatacactaaaaatatacagcctgaaaaatcacaatgagattccctttgtagttgtttcacatgagtgttaaacatttaacatgaagcaatctccttttctatttcctctgtaattttccaagttaaattgtggaatgtagaatgaataccaatgacactatggttttggggaatgtgacttagcattcaattcatgaatatgtctttctatatacaagttgctggtctgttggccacttgcccaatgaaggaaaatgttagcgattgctggaacgtagtggtatttttgctttatgtagtaagcatttttactattttattttttaggattctctatgtgtgtgtttgcatgtgggtgtatgagatagaaacagaaagaaaaagagagcgtatcaaagacagacttgaacttcttgacttccagaatgattgagttattaatatacaacagaccaaactttaattctcccttttttattgcatcgttgcttgtactaactctagtgtctaattgtggttacatttaagttaggtcacatgctcctccttcaggatttcctcttttttttacttttcaaagactagaaaaacctctcaaagaagtatactatttataacgaaagcagttgggtcgtctttgttgccaagtgaggccagccagctttatgcctctcctgaggagaccccacccgatgaaagaggggctttgcagaggttgaggggcaggtggggacctctccacctcacagaaggaaggggttgggggagcccactgcgtctccacagcaacccctgtggtctactcgaggagttgcactttttgaatgatttctccctggtgaaaagatggtgatgtaacctagtcgcagcatctttcatataaagatatgaaagaatgacagatcgtttttcctagaggaaactgagatgtgaaaaaagggctaatgactcactgttgaacccacatcaaatctgggttagaaccaaggagttcactgacttgtaggccttcgcccagagattacaacacactttaggctgcatatttagaaggttcgagaaattagagtggaggctcctggccctgggagaggtgtgcagggtcaccactggagtgggactctggcccactgccactccagcccgcctccccctgccccttgcccacagcacccccaccccaccccgccccattataggttcaggagtaaggtgagcagccgagcaagagactgcatggaagagctctggaaatagccccttccgctatcttgatgtagcatttccggtactgatgggctcccggagagaggatttggatttgccagatgtgcttgctctatttaggcagcgcttctgctcaagggtggattccattttgcagattctgcacagcttgatgaaatgtggctctgcccgagataaacaaatgcccattgtcattttgaaggcatatgtgtgctttcattttaaaaaatatcctttaaacaatgatagtttttaacctgggaattcaacgttctccaggtattttattttagatttaataatatgttaggggattctttgatgggtttgtttagactgaaaagtttgcttctgtcatttgtttggaataaatttgcatcatgctacaaccacaagctgcttttgatggttggctgttttgtttcttttctaagcgctgatatccagaagtgggtgtttaagtgccccacactctcaccactaccttacttcctgaattggcttggtggtcttgactctgaatgaaactgccccttggcctcttccctaccatctctaaattgccttcttttccttcattgtgatggaatgtctgcatggatggatggtcgagtgctcacatatcatgtcccatttgatactctactgagtttgtgggagacagcaccccctttacttaaccaggcctcagtttcttcccttgtaaagatgaagaaagtaacactggccttctagggttgtaaggattgatgatgacatatgtgaagaagcacctagtgcagctgctctggcatggagtaggtcttctttgcctggcagcaattctctgagtctcaaatgcctttgacttcagggtataccattattttatgtgccactaagaaaaaaatatcacttcagtgatcatgccattgattttaagagagggtctggattttagggagatgaaaatgtgattatgagcgataccccaggaaccacttccattaacctcggatgtcttggaacctccagctcattcttttcctttgcgatagttccactcagtggatctctttcctttgctcactcagtttgttccttaggtggcctctgacacttcagggcagggatgggatggggctggaaacagagaacatagggttggtaattcaccatgtctggcactatccagttctcctatgagaaggcctgagagtttaggcaattagattcaggcctttcagggtctggtccctcctccttgctcagcccctcctctcactaaatccctgcatgaaaactatactccagtcacattgtcctctttgcctttacccaaatgggccatttattttcatgcctctggggtctttgtttatgctgtttcttctacatagagatctatcttttcacacctttaaaaatccttctgcctggtgtggtggcccacgcctataatcttagcactttaggaagctgaggcgggaggatcacttgagggcaggagttgaagaccagcctgggcaacatagcaagatcttgtctctacagagaatttagttgggcctggtggtatgtgcctgtagtcctagctacttgggcggctgaagcaggaggattgcttgagcctaggagtttgaggctgcagtgagctatgactgccccgctgtcctccagcctgggcaacagagcgtgaccctgtctctaaacataacaaaataaaacaaaatatttctgggcttagtcagatgccacctccttagaaaaccttccttgattgtcctagtcttatttaattagctcttcctttgcactcttactatactgatggttatctctatctctccctcttttcttttgatcttagtaagatctaactctgttctgggctgtcttcttcattggtttgtagactgccccaggaacagaaatcaagtctaacttatctatattcttatagaacttagcatattgtgtttgatcaaggaatgtttgacaaatggatgagcattccctttacagaatgagattgaactacaggaagaagaagaatctgtgagttcaaagaggtgtcagggccaggagatgcggagagatgaaatgttctgaccttcattatcagggaaaatgtgtctgatgggtcatgtcactatgctaaagagcacagggattctcataaccataatattttctgtttccaattctcagataataatgaaggtggtgataatgatgattaaagctaacctttattgaggactttttacaggccaagcatagctaacctttattgaagacttataaaccaagcatagttttaaatattttacatatatgtactctttaatactcacaagcaatcctatgaggttaatactcatactgtccctttgacagctgaggaaatggaaatagctatttctattagtgatgtgttatggaaattagactttcagccaccacaggtaataggagccctaatacagagcccaggaaatagagagcatgacctttcttgccttcttgataaatgatgtaatacatccatggaagaatggtggctctcctctgttaacaagaattacattcacaagcactgagaaaatatacctctgaagcacacaacctgggtttttttttcttgcctcttaacacattcaacttttatttctgcacttaattgatacaaaaagtgtgatttattaagactttggttgtttctgtttgtttgtttgtgagacagagccttgctctgttgtccaggctggagtgcagtggcaccatctcagcttactgcaacctctggctcccgggtccaagcaattctcctgcctcagcctcccaactagctgggattacaagcatgtgccaccacgcccagctaatttttgtgtttttagtcaagatggggtttcaccatgttggtcaggctggtctcgaactgatctcaagtgatccatccgcctcggtctcccaaagtgctgggattataggcccgagccaccgtgcccagccttggttttgtttttgaactgcaatcattttcctcacaaaaattttgataaattttattgatagggcattcctatttcagagaattaatttatttgggaaggcaagatgatatacaatgagcatgatgactttggagctggacagacccattaaataaagaaaggagaataaataaaagggaattgtaccaaaggaatctcaaaggctgaaatggaagcggtaacatcaaagacaagaaatcctactccaggcctgtggcagttgttaaagagtggtcctgttttggttagcaacttggctctctcagtgcaagtcattaaaactgcctcattgatatttaagttgcttcctaccgaattcagatcttggctctgccactgtcggctttgcagctggatttgaaaccccttcacttagcccagcctcagtttcttcatttgtaaagaagaacatcgactttctaggggttgtaaaggatgatgtgtgtgaaaaagcacctggtgcagctgcttctggccttctttccacagcagctattattcatcgaatctcattgactttaaaatgcaccactattttatgtgccactaacaaagaaatatcactgcccatttaactattagttataacattaactaaatgtcactgccaattaactcagccattgattataagagagaatctggattttagaaataatagaatatgaaaaatatatagaatcagtgaaatcacataaaggtttgtgaaataaagaatagcggtctatgtgcacatggtatagagtgctatagcagaagtacatggaaaatgaaattaagtggaggcatgacatctgccctcagaaacgttttctagttaatgaatgttaggagcccatctgtggaatcaagaacaggagatccacatagtatatactcctcccagccagagtcttggaaatcaaaatttttttgtttttattttatttttgacatctcaagatttaccatttgtttcaaagggtatataaatttttaggggaattttttttttttcgagacagtctcactctgttgcccaggctggagtaagtggcacagacatggctcactgaagcctccatctcctgggctctagttatcctcctgcctcagcctctacaatagttgggaccacaggcatgcaccaccatgcctggctaattttttcaatttttttgtagagctggggtcttgtcatgttgttcaagctggtcttgaactcttggcctgaagcaatcctcctgcctctgccttctaaagtgctgggatcacagatgtgagccaccgcacccagccgggaaaaattatttaaactatttgaactgatctctgaaggttcatatgtgtcacatagtacttgcctctttatttttctggatcccaaagtccaaaatcaaagaacagaggggatgttgcctataaaagactgacatgcaggcggggcttctatgtaatgtgcttctggggctggtttcgcttctcctcacaggtgtcctgtctctcatcacttccactggttgaaaagaaaccaggacatttggagtcaaggctgaggcaggtcaggcagctgtggttatactcatgtagacctcatctcacctccgcaaccaagcactggccacagccgcctcttagccttcaggcaattcattttaaaggcggctttagcaatagtatgacattacggtgtagaaatctaaaagaggaggccgggtgcagtggctggcgcctgtaatcccagcactttgggaggctgaggcgggtggatcacctggggtcaggagtttgaaactagcctggccaatatggtgaaaccctgtctctacttaaaatacaaaaattagccgggcatggtggtaggcgcctgtaatcccagctacttgggaggctgaggcaggagaattgctcgaacccgggaggcagaggttgcagtgagccgagattgcgccactgcactccagcctgggagacaagagcaagacttcatctgaaaaatgaaaaaaaaaaaaaaagaaatctcaaagaggaagctggatgagatgaaggggaggggctggtcgagagtaactgcagagggtttgaggagtagaaatgatatcagagaggggaagccacactaaggccttgggtagttgttcacagtgcaacatattctctcagtgagttagcatcctggctttcctggggcaacccagtaacaccacttcagtgatgtggaaaaacattgctgtccaagaggaattgaattcactggctttagtgtctgttaggagggaaagcctcatcgtgctgagaaagcggtcctccctgggccgggaccatcccttcattctctcaaatgaacgcttggatttgttactgcctgataagtcagaaatgtttggcttagatgttccctcaaccacaatgacttgaggaacttaaggcaaatggaaaatgcttcctggatattgtaaagtccaaaccttctggaaatagtttgaatgcatttccatccctccacaggcagctgtttttctctcacactagcatgttccactagcgtgtccccgtccctcaggccttccaagctatctatatgtcggtaattatgaaacaggttatttctgaagaagagacgctgcgtttctgaagaaaaagtcatggagtagctatttaagaataacactggtcttttggagttgttgtttcaggaagtactgtagtatctttttggtcttctgaaagaaaaagaaaaacgttgtgactgtgactttggctctgtttattttacttttcttatctaacccacacgacactgacaaataccacatctgtcttgacaagctagtttgcaaataactattcattcataattttaggctattgtaagaatccttatttgttacttcatcttgtaagcaagaatgcaaaatttggttttgagaaagacactgaaatgaccgcaagtccactggtctttgcaaatctctccatctgaaaaagatgactgtgtactttttagtggattttcagagctctaaaatatttattgttgccaaaacatagatgggaattttctgagaaatataatttaattttaaagttttggattcatttcagtgttggtaatgtcagtgcttcttagaccaagtttatcagggatttttctgtttacaccagatgtagcagtaactttgtcatttcttctattttgatttttttaaaatatgatcatttattcccctatctattggcttaatctcattttcacttattttcacttttgctttgacatcttatggcaatatgactgcagttgtttctacttcctttatagtgaactcttttttttttttttttttgagacagagtctcgctccgtcacctaggctggagtgcagtggtgcgatttcagctcactgcaagctctgcctccggggttcatgccattcttctgcctcagcctcccgagtagctgggactacaggcaccccccaccatgcccagctaattttttttagtagagacggggtttcaccgtgttagccaggatggtctcagtctcctgacctcatgatctgcctgccttggcctcccaaagtgctgggattacagtcgtgagccaccgcacccagcagtgaactcttgtaataaaactgctggcttagaaactccagaaaagtgtgaatgacttattctgattctactttagacagataaagaaacaatcacagatggaggacttttctgtgcaaaggatgggtggtttggtcaaggaacggtccccccagaggtcagtcagggctttctgtggggaaaatgtttctacattcaagttcatccttggcattttgggctctgcaggttaacgagagggagacagaggaaggagtgcaccaaacctctgactcctacctggaagtagccaagcagaagcaaagctgaataatagccatgacctcaggctctgaagcaggaggttccaccttcagatggatctgttaaacttcaccaccctgggtttcttgtacctgtcttcactgttttctgtctgagatatcttgaggcatttttaaaacattaagttgttttggatagtaatttagtcactcatttgtatctcttcatagtattaagccttaggttattatgtgtgttaactaaaatcactgatcggatctctaaactaagtcctgaactgccatgattccacctactaaacttacacttttcttctacgtagaatgaggtgaccggtgctagtttgtcctggagagagaggtatttcagaagaattccactgtcagaaaatatcaccatcaataatgaaactatgtgtgtaaagtcatgtctaattttattaactgtttgtcacaagtactcagattatagaaagagggtcttgatctaagctgaccctgaattgttatacatttggatcagttttccctttcttgctgagaattctctaagaagagtagaaactcattgtagttcagtgttgggaggaatgattgtacccacttacagagttgctatatcacaagagagatgcattgtttgtttgtgtggagaggctggagggattagggcaggagcttatttgatagggagtttagttgtacatttgtaagacatctaattttacttaagatatcattgcagtaagaatggctttatctctatcctatagaccctcacagtagacaaaaccactacctactcagaacaaatagcccttatgagggaataatttttccttgattcacctgattggattgttttgaggtcaaatgaggttctgtaaaaggccttgctaacctgtaaggcataataacctgtaccagggttctcaaattttaccatgcaaaataattactgatgtacctttataaatgtagattcccaagcctttgtcagccactccaattcagattataattcagttcgttttaagatgggctccagaaacctgcatcttgataaggcggccaggtgatccttgtgcagatagttcagaaacatactctggaaacactgtgtatttttgttttgttgctttatttcttagctgtgtcattgcaggcaaaaataaaccccaacattgttacagttaattaacttcctagtcatttaattactttgtaaattacccatgcgaagttttaattctaggactgtttctattttatgacttgtgttacccatagtcccccatcataaattagtgagtgcctgcgttcttctaaaaatatcaggtttctcacatgcacgtagtgaggggaacaacacacactggggtctgtcagtggggatggggtagggagagcatcaggattcattgctaatgcatgcagggcttgatacctaggtgatggggttgataggtgcagcaaaccaccatggcacacgtttacctgtgtcacaaacctgcacatcctgcacatgtatcccggaacttaaaataaaataaaataaaatttaaaataaaaaaagttatgtttgtaagactataaatgcctcagattttgagaattctttacatttctttgttacaaagccttttcgcatatatccaaagcctcactgttctaaacagagtgtatccatacctcagtgctgcttcaatgatgtagatgattgaaaactgattttttttcctttttctgagacagagtctcactgtgtcacccaggctggagtgcagtggtgtgatctcagtttactgcaacctccgcctcctgggttcaagcgattcttctaccttagtctcctgagtaactgggactacaggcacgtggcaccacacccagttcatttttgtatttttagtagagacggagtttcaccatattggccaggctggtctcaaactcctgacctcgtggtctgcctgcctcggcctcccaaagtgttgggattataggcgtgagccaccgcgcccggcctgaaaactgattattttaaaactaaggtttgctttctgtagactgaacaatcattagcatccttacatctctatctcattcatggtcttaacttctaaggcattggatcagcaccagagctccctgtcctcctgccttacttaaaaacaaaaaagaaagaaaggaaagaaaagaagggattttaatgctgttttatagcagagtgaaagtaaaccaaaggtgcatacttgagaactgcaggctggaaattgcaagtgacaataattacctcatcttattcccacacagacttcctatgacctgggtgaccttgggatctgaattctgtttaatagaattgtccctcttctgcaccacggcgtacactggcctgaagaaggtgctgtttcccaggaaaagcacttaaatccccccaagaaatgcatagggccatagtttgaagaaaaagtattgctaaccaagtgacttactctgcatattctacctttctctggttgtattctttgagatttttatttaagataactttcagcatctctttttaaaggtcagatacgaatgagaaaactttgtctgacttgttaatcttgtgacaaaccgtttatatccagtgtagcttcctgtctttgctgactggttatttgagggaattttcttcctgtaagactgtggagaagcctctaaaaataaacagcatggtttcttattggtgggaacatatgtgagcagatgtcagctggaagcagcatatggtggcaacatgatagcagtatgtgcttatagaatccccgctgttgggtcttcgtcttccatgccacactggccagtcagagccccatatctcagttaaagagtgttccgcctagaaggtgtaatccacacatttgtgaaaaatctgccactgggatcttgatagtgggctgaatattggacatggtaagttccagagtatggaaaaagtctttgttatccatttaaaaatcaagtgataagaggcacacatatggcaaaaataaaaaataaatcaagagaagagtccacaaagcctttgtcttgtgttgaaagaagttttcaagtcaggtctgaatagtggcagtgttacttctagaagacgtgctctataaacatggaaggtgcatggactcccagtgtatgaaaggagccaggaaagaatgatattcatgccaggccctaataggcagtcagggcttcttttgtcacacaagttagacaactgctcatattccttgaccaccttttgtctgtcagtctgttttaaatatatcatctcatttcaattttataaaaaccctcagaggcagggttacgtctgcctcatcttacagacttctccatggattcacaggaaatcagtgacagaacaggggtttgaattaacatcttcttctgcaaaaattctatatttttattgaccttaccaccaatggaaaaagttttgaacactcagcaatatttcctcttcaatttgagatattttgtgggggagggggtgtgctttcttttctaagaatatggtgggcaaaatacaaattgggttgctgttactttaaagaaagtgaagttcaaattttccagatgtaataactattgtggaagatgcgtttagtccatttcagagagctctagctttttaaactgtaggtaagtagccccaaaccaatattcacttgtatttttgactcattcaagaaggagttttcacatgcgggttagaaatgatgacaggtggttttaagaacactgaaatctaggccagccaaatgaaaaccaaagttttattcttaatcggtagactgtcttttgtcaaaggaggtcaaagcctttcttattcatctttaatataaatcaaggtatttattttaccgtttcagtatgtaaattgtactctgttattttaacattagaacgtgctaaagggaaaactgaattcaggagtctgactgctggttaagggatgccagaagatctgggactaaaatctggaatcctccttagatcctcagtgtctaatcccctggccccaggtagcagggaccttatttctggggaaatgataagaacattcaatgagtccctcttctactttgaatctttgtatagttctgtgccaggcatctcttcagtaaaatagctaatgactgtgctttttaaaactcctagctgtctgcccagttgttacaacaccctctggctcagtgggcagcttgtgctccagacagtcccaggtgctctgtgggtaccttggtgagtacacttgtctgctttattcctcgtttgacatagttatatcaaatccatctttagtgtttgtctcctgtggggaacttgccagaggcaagatgagattctgaaatgcagccttgtacctgagcgatcacaaaggtgcctagaattttttttagtaagagtttacatgagaaaaactgatgaatagctttgaagtaatgcaatgactatattgcagcatgtaaaagaatgacttgtggggatgagatatgtgttttaggggtcacagagtgatttgacatacacctttcctgatccccatggaggccactctctggagggttggacagcatggcctgaatgtcaagggaatgttcctttttatatctttatttgtatctatgttcttgttcttgacacatagtagttgctcaattaatgtttcttgtcctgaaccaaagtgaaaggagattttctctcctttaaggttctagagcaagcttgtccaaccctcggcctgcatgcagtccaggatggccttgaatgcggcccaatgtaaatttgtaaattttcttaaaaaattatgagatttttttttgcaatatttttaaagcttatcagctatcgttagtgttagtctattttatgtgtggcccaagacaattcttgtttttccagtgaggcccagggaagctgaaagattggacgcccctgctctagagggagacctgtcggggagttatgctgctgattatttgtgacctttgtattgacatgtctcgtttgcttaaggaaatggatcgtcatgggtcaggccctcagccaactggacctgtgagcttgccacttgctcaaaccacttagccctgaccctcggagcaggtgcaagctcctcagagccagcaccaggtgttaggctgaggggtacaaaagccagaagtcctcaaccctttcttattgggaacactgattaattcagccatttattgaatgcttactatatgctggacgatgagtccacaacaaagaatagagcttgggtgatcctgacgctcaaggaattcagtggctaaagttatccctgaaccatgctcaggaaaaaaggaaacagacttgcaatcctggcattggttcactgcatatttttgaggccctgagaaggtttggattatgttgattctaagtgtgggtggaggtcccggctagagacaaaagaaatgtttttattatcctaggaaaagcctaggtcactggataccctattctgcaatgtatcatgcctacacattgttggttagaaatcagtatagtttatttacagtggcctaagctggggtttcctcaaaaagaactcattctgttgagaatatacgttgattttagtacagagagcctcaaagtggctacaagctgcaatgtgaataaaaagagtgaaaagtttaatcatgcctttaaagctcccgtttgtgagtcattacgttttgtttttatactctaaattctaattttatttcactagctcaaccaaggagttaaacatctgattttttccccctagctaactggctatttggaaaggaaaacgggagggaatgagagaaagaaaacatttgttgaataccccctatgtccctggtacttaagacacatcatcctaattttccccacattggttggtcagggagggccagaatgacgatccccattttttaggaaatcgtggtttggagaggtaaacaccttgtccttggtcacagagctggctggtgacagagccaaaatctgaattcaggtctggcccagatgccaccataccacagagaccccaaacttttccccccttttttggcttttcctttggaatcctgtcctgttaattttgtaactttcttgcctactacttgggattaatttccttttcatcttttcctcccatagtaaacaaagtgagaggcctaccctggttcttcgggcggtttttcttctcagacactcctcacttggggttattttcggtcacttaattgctgcgagcttctgtcttcctttggtgaaaaagcattggaaacccaccctgctcctcagcgagtcagggaaaatcaggagtgtctgagggtgtggaaggggagatggggcgcaagctccacatagattcccataacagtgggaggctcttccaccttgcctagctcgcaggctctggaaaaaccctgcagacccctttcagaccttccctgcaaggctgctgagcagtggggctctgcatttttttttttttttgtctctgttcttagaaatagtaattgagtaaaaatgtaagtgagtgtatgccagggggcaggcatccagggtcagggtgaatttctccatgctgagtgtgattctgaacactcgttaagtgaagttggcctgtgccaagcagctccagggccatccctgtcaccttgcgtgaaccgcctctccattccaaggagatgttgggagcggctgaagtgagcgtgaggcctgtggcgcctcttgcttttctcactctaacctgggtgttgttgataacgacgtgttctgacactgacaattggactggcagctctgatgctgcatcagctttaaattaaataccctggaggagaaaatagtccatgctcctcacagccatgtgactgcgaaatcatttttctcttttcaagcttattatccccaataatattggttaagatgtggttagcctgcctaaaggttttcctattaagacataagaatccagtgtgtaagcagtagagataagtctctctatgaaggaatggattaatagtcatgaaggcaaatataattttttaaaaagagtatttactgaataagaggcttttaagtaacttggttaagatttaaaggtggtatttctctctctctctctttttttagagacagagacaaggtctctctgttgtccaggctggagtgtggtagcatgatcatagctcactgtaacctctaactcctgggctgaagcaatcctcccaccccagcctcctgagtagctaggaccacaagtgtgcaccaccacactggctaattaaaaaaaaaatttttttttagagatggggtcttgctatattgcccaggctgggctcaaacttctgacctcacacagtcctcctgcctcagccttctgaagtgcagcgattataagacatgagccactgcgcctgacccgaggtggtgtttctcaaagtgtgatatgcatttctgtctcctgggacatccatcagatttcttggccccatttcagagctgccaagtcagaatcactggggtgggtggagctgaggactctgcacattttaaacaggcactgcaggtgcttctgacgtcactaaagtttgcagctgctcaagtcaaaggatgctctgattatgcacatctgtttactcagtcataccacatggatggattcagatccagtggactctctgtttgatcagctggtccttcaagtgtgaccctgaacctacagcccctgtggagtttttgccacgtgctttccattttcccaaatgcaggcaaatattgaggtagtttttaataatattacttgttattaagagtaccacacataccctctgctcactgttcatcacagaggagaacaatgagtgtgcaaggaagtaaattaatcgtgtgtgggtgttggatgttatgtatttctgcactcagatgccttcaaccgggcaacggtggagtggggaagggactttcaaagctagtgtttaatgcataagtgacacataccatgtataaggtaatatgtaattccctgaggtagcatttggccaaagcgctgctgacctcttggtggcctgaatcgtgttctgagacattccatggggtaaggacctagcaaacaatggaatgtaaactttactatctcagccaaactcagctttgggtaactgcaggtttctctttccaaacagtgttttgttcaaccagaggcattagagcaggcaagaatctgaccaacctattaagaagcaaagttaatgataaatcacttggtattttctttgtgcaaccctgtgccccctggtattctgatgtttttgaaccacctaatactttgaagacaactgtacagtatggatattctataactaccgtagattttttggctattgaactatttacagaaatacccagttctcgtatgtggtctacatcactaaataatctgattgaagtgtgagaagaatgacttgatagtgttcattttacctccgcataagtcttcagttaaaagagctgtacattaactgcaaatacagatataattttaagataaatgtcaaatgcatgtagagacctttggaagagaaaggtgaagagaggacgttcattttttttcttcttcttctttttgagatggagtctcgctcctcgctctgtcaccaggctagaaggcagtggtccatctcagcttactgcaacctccgcctcccaggttcaagcaattctcctgcctcagcctcctgagtagctgggactacagccgcacgccgccactcccagctaatttttgtatttttagtagcgacagggtctcaccatcttggcaagtatggtctcgatctcttgacctcgtgatccgcctgcctcagcctcccaaagtgctggaatcacaggcatgagccaccgtgcccggctgaagagaggacattcttatgatatattagttcattcagctgtatttattttattttattttgagacggagtttcactcttgttgcccaggctggagtacagcagcgtgatctcggctcactgcgacctccaccacccgggttcaagcaattctcctgcctgaatctcccgagtagctgggattacaggcacacaccaccacacctggctaatttttagtagagacggggtttcaccatgttggccccactggtctcgaactcctaaactcaggtgatccacccaccttggcatcccaaaatgctgggattacaggcatgagccaccgtgcccggcctattcagctgtgtttattgagtatttacttgtatcaggcagcagtctagctgctagtgaattgaatagcaaaaatccttgcccatggggagcttacattctggtggcataggatagataatcaataataaagatgaaataagaatttagaattggataaatgttttgcaggggaagtagagattggtcacagggatgaggatgtgaggtgtaattttatataagctgggcatggatgaatttgttaagaagggagtgcatgtaagcagacacttgaaggatgttagagagtaatctgggactacctggggaagggcattctattctgttccattctggcagagggaatagctggttctgttgtgacatgttcaaggattgtcaaaagtatcctagggatgagattagagagataatgagggataagtgatgtggggccttgtaggccatcatcaagtctgtggcttttcctctgactaaaacggagagaagagtggttttagccagagggccgtgtagctgttaagaatggtatgttgggccgggcacggtggctcatgtctgtaatcccaccactttgggaggccgaggcgggtggatcacaaggtcaagagatcgagaccatcctggccaacatggtgaaaccctgtctctactaaaaatacaaaaattagctgggcatggtggcatgcatctgtagtcccagctactcaggaggctgagacaggagaatcacttcaaccccggaggtggaggttgcagtaagccgagatcgtgcctcttcactccagcctgggcaacaaagcaagattccgtctcagaaaaaaaaaaaaaaaaaaaaaaaaaaaaaaaaaaaaatggtatgttgaatggccaaggtggaagtaggaaattcagtgaggaggtcttcgtgatgcatcaggatggcacttggcaactgcatttctatagcaagaatctcaaacagacctgccttatgctgagtttttcctttagcaaacagtttgataggcaggctacagtgggttttgtatttagaaaatgtttttctgtttgatggtttttagttaatagtccttagttattggcaactcacccccttcctttctgaggagcagccagttctgcagccttctgtgtgtgaaaataaccccttgggtctcccatcttgtgctcacgcatgtggaatggcagctactggagttcgtactcgcggtgaagcctagtcatggccgtctttgacatgatggccagggacatgtggcactatacccatagctgaccatactttggcctaggagaatgtcaaactgccttttccggtgtgaaatagaaagtcaagcttggaaggatccttctttggatctgtccagctgtgctctgcatgcaatagaagggcttttgcctaaactttgaaatgaggtcataagccagagaatttgtaaaactatgtctcttatcagtcaaaaagaatttctgtgggactgaagtttgctttctaattcttaagctttgaacaggaagactttacacggggatgttggtgttatttcttcatccatctgtacaagaaacatgagttgagcctactgtgtgccaggtgataggtgtaagaaaactgcatagatcctgtcctcagggagcctgcacttagtgaggaagtcaggcagactaaaccaaccaaacagaaacaaaaagccaaccctgtggttgatgacaaggaaagcatctgagaggccagaaaaagaattgtacaacttggcctagtggtgaaggaagccttactgggggagatgatatttacctcttgaaagatggcctttgagattgtagtttggtagtcatcaagcagcaatagaaaactgcttatgttttctggaaggagatttgccccttcatgtaatttctttctctgtgagtttgcatgactactgtcttaatgagtcatgaaacaccaagaaatgcttagtgtggtctttgaaaaaattgatgtatttttacaagggaacaactttgaaatactgagactagagaataggacaatatggttacatcaagtatttgttattcaaagttgatatattcagaagacataatgggcctattgtatataaacatccatgtgatgatatagtatactgggactctggaatttggcattattttataagctcagggtcactgtctagagcttttctctcaatctcagtgagtgataaacagcacaggtttctcgcacgttcatatagatggccttgtgggatggctgtggctctgttccatgagctctttattccaggaccagggcttagggagcagcccctaacccaggcatgctgacctcatggcagaaccaggagatgtggcagttgtctttacccacattccattagccaaagcaggtcacatggccacacatgatttcagtagagtaggaattgggtacaagggagagaggctgtggggatgggcccaggggagagggacagccagcattttgaacaaatgatacagtctaccacagtgtaggtggaggagttggggaacagggaaaggtttcgcccactttaaaaaaactttctggctgggcgcagtggctcgtgcctgtaatcccagctctttggaaggcccggtgggaggatcacttgagcccaggagtttgagacaagcctgggcaacatggtgaaaccccatctttacaaaaaatacaaaaaatagccgggcctaatgtggcacgtgcctgtggtcccagctattcaggaggctgaggtgggagggtcacttgatcccgggagttggaaggtgcagtgagccgagatcgcactactgcactccagcctgggcgatagaggggagaccctgtctcaatcaatcaataaataaataaaaatttaaaaacagaaaagaaaaactttctgttttgtggatatgacatgattggatccacactattgctgtgtctgtgggaatatggggcactttattgaaatatgaatatttactgcatatttggttggttttataagacatgcatcatgttatttccctccattttcattaatgccattctcctccaatcaagatgagtttatctattttaaaaggccctgttggcagtaccaggtttctaaagcaagtcctgatacgttatatggagtttatgtatgtccggcagactctgaaactcaggcttacctccaaagcatgcagtgatatctttgagccttaggtcctagattgtcactctggtcctgatatgtctggcagtgtctgatagatgttgtccacaataagaattcaggcgagtttccatgaggttctgtagatgtttagctgtttgccagaaggagcatggctttcctgtttcttatctgtcttgtgcgagttccatgccatcttaaacagtgtgtaccatgtagttccctagaaccccatctataacttgaaccttagtctcttgagaatgacccaccagggtgattgtttagagccacgttcctacctgttgtttccggtgagcaaactggaaagtaaccctgcctggcatggggtgtctgctgtgtaaccctcaacacagtgacagtgatctgctctgaccgtccctgagcgtgctaggtagctcagggcttgcaagttcataaataattatctccacagcctattcttagtagcaacagatgctgagcttttccagcctgctctcggggtcagtggtgggaaagagaagaaaaaaaatgaaagcattgttttgcacatggctggacatctgtatttctgaattgccctgttgtgtgtatgatgcaactgctggagctgttttgctgaatgtgaactttgtcaaccgactggagtctaaattggttttggatccctctgaaatctaaatggtcagaccatatttttctaatattcagctggattgtatctttgctctgaagtggagctgacttcgtatgtgttcacagtggcagcaggggttgcttctctgttttcctggtctgtgttgtttgttttcccaagactgctgcttaccttgtccattgtctatactcaggagaccaggaaggtaactccctatggaactgtggccactgggacttcaaggatcgttaactctagtgttattgttaggaagagagcagactgtttttcagaaatgaaacaggtgaagcaccaagaatagctaacctactaggtgcactggtaccatggcaaagacttggacttggacttgggatatccaagcacttaggttctttgttgggagctttgacagtcaaggctgatgtttctgtttggtagctgtagtgcagaggttctcaacttcactatgtatcagaatcacctggggagcacttaacatattacttatattactcaggccagagtccaactccagaaattctgactccgttggtctggagtgggactttgcatctttagttttagaaagtttcccggctgggcacggtggctcacgcctgtaatcccagcactttgggagactgaggtgggcggatcacctgaggtcaggagttcaagaccagcctgatcaccatggacaaaccccatctctactaaaaatacaaaaaattagctaggagtggtggcacatgcctgtaatcccagctactcgggaggctgaggtaggagaatcgcttgaatctgggaggcggaggttgtggtgagctgagatcgcgccactgcactccaccctgggcaaaaagagcaaagctccgtctcaaaaaaaagtttcccaggagattctaatgtgcaactggagttgagaacctgtattttggaggcttacaaagcttttaataaaactgtgtggctgtgtctagatatccatgttaggttttgagtgaatttctgcatgaagaaaagacatctatttgggtggtgatgttgatggttggggcagtggatcctgtcttttataacaatatgattagtaataataatatgactaatatgattagtaatatgattagtaataatatgactaatatgattagtaatatgattagttataatatgattatattactaatcatattgttaataatactaactatcagttatggaatagttatattaggctctgggctaatctccatattagcactatatataaacactattattattctaaattttataaataaggaaactgaggtgtagtaacatcacgtgtaatttcctcacgatcacacagctgtctgactccaaagctcatcctatattcatcactcctccaagatgattaatttccatttaaataaggaaaatgtggattaaagaatgagaagtctaaaaaggagaatcctctgagtgagaaccatatgcatctgtatgtgtcagggcatcattctcttctgataaaaggaaaaaaaagacaagtctggatgtgtttctttttttctcttaaatgcagtatttttttcctaagaacctgtgaaagttcaaggcaggcagtagaacccaagggcttgcatactggtattggaattaagcagtggcctctgagcttagctcatgcatgctcttcatgttcctcattagaagaatgaaaatagcttcttatgtgaatctatatggaggatgagtgtgtgcttacagttattttcttgtctaggctgggtaataattagagtgggcaatataaactccagtgttttcattttgttccctgaataggacaactgttttgttgttgcttttgttgttggcagatttgtaaatcagagtacatacttcttacttaaaggactgtgttaattctctaatgcctgttaaaagattagaatagtaccagcacctatcaataagcaggatcctggaaattccatagccagttcctgataggccccatacttatgaaggaatgttacattgaggcatccaataaatatttattaaatgagagagtgaatgaatttttgcacatatgtaccataacagaaatagcaccccacgtattgctaaggacttcttgggaaaggagagtgattttagtcaattgctatgctcccagtttctccacggggcccccgtggtctgctgaccaactcctaattgcctaccagaagcagttctctgtacactaaacatagcaatattagtaggcttttaaaaaatcttatcatcacaagcttccgtttatatctctcagccttgatgaaaggaagctgacttttgctttactctaagtagcattcttcatattacaagttagaaaaagttctgttgtccccagggcacataaggaacaggagagaagttgcttgccagcccatgtgaaagatgagaagcccaacttggattcattcatgtcccctgctacagggacacctggatgagaccctgctccctctgtgagttcaaactgctgtcactggagttataaagggacatttaggcttgtgttcttgggtctgtagccagacagcacaagtatttttagggctctttttgtctcaatctgatttctgcttgaaactttaacacatgcaggcttcactgaaatacttttaaactactctctgggcagtgtaggaggggttggattagtactacagcctttaaacagttcaaaaaaagatttttttttattgctaaatatccaacaggctgaacggaggaaattcaagtctaaccctggagggacccctgtttagtcatctgtctagacagacgagttcatataatgggcctctatgtttcttttgctttgtataacagacggtggtcccttcctttaaactttgtgaagatgtcaacctttggttttttttatcccaacctgctgttgataagccaagaaagtgactcacacatgagccaacaataactcttgagtgtgacaattagtcttacaattgagtagcaagaaaatataggatttgcatacaggggacctgggtaaaatcctgactgtgtaacatcgagaaagtcagttaccctttctgaacttttttttttttcctaaaatgagagttaattaaaaaaaaaaaacccaacattatttcttaatggttcttcaaaagaagaaattatctaacacagaaaaatgtttttcacatggtagaggctgagtaaattgtcattcattcaatcaatcattttaaggtgatcattgaagactttagcatttttgctttcttattctgaaaaccatagaaaaactagaaattctagcccatattttaaatctcatgtcagcatacattgagaacagcgagtgcttttttttcagtctagaaaagaagaaaagtggtaccaatttctgtgagaggaagataatattggagatagtattttaaaatacgggatattgagggaggagggagagcatcaggaggaatagctaatggatgctggccttaatacctaggtgatgggatgatctgtgcaacaaaccaccatggcacgtttacctatgtaacaaaccttcacatcctgcatatgtacccctgaacttaagaagttgaagaaaaaatatgggatatctataatttatattcataagttgaatgtatagaatcaaagggaggattggtggttgccaggggctgtagcgaaggggaaatgaggagttactaataaatgggcctaaagtttcagttgagcaagatgaataagatctagagagctgctgcacaacgtcgtacccacagtcaacaataatagattgcacacttaaaaatgtggtaagtgcgtacatctcccgttaagtgttcttacacaatagaatttaaaatattgttagaagtgaataaggcagaatgacattctttatcttgttaggagggctggaagctcagaccttgcatgaaaggacaatgtgtgttagtaatgatttctacaaccaggcggaacatcagccacctcaattccttgtcatttcactttaagctctgcctggatggttcctgaaaaccatgacctacaaaattttgttttattctatttaattcagttataattcaccaagcatatactgccttaagaatttggtgcctgaattatgcagatgaataaaaaatgagataggtagggatgagtccctcttggaagaggcatcaccaacagctcagagagtactaggaccatacaacctaggtttaagtggaggccttactgtttccagttccatagcaccgggcaagttccctctttaagcctcagtttcttatcccccacctaagtgggatgaatccagatgtgtacctgacagctgatgtgctcccagtagctagtaacattgcttttgctgttatgcttattctttttattgttattactatattatccctgccctcaagtagcttatagcctatttgtggagacccatttgtacacactaccctgcacaaagcagaaaaattaaaaaactgctgaatgacatttacaagcaaagttcaatccaaacacataggaagatggttggttaatgaaaccagctttgtttgttttgagacacggtcttgctctgttgcccaggctggagtgcagtggtgtaatgatagctcactgcagccttgacctcctgggctcaagtgactctcccacctcagcctaggaggttagctgggactacagatgatgccaccacacctggctaatttaaaaaaaaaaatttttatagagatgaggtctcactttgttgcccgggctggtctcagactcctgggctcaagggatcctcctaaagtgctgggattacaggcgtgagccactgtgcccagctgaaaccaacttttaggagaagcagtccctaccatgcctagaacaacgtgtatttcttaagtgcttagccacagccttaaagtgaaagggaaatagaaaaatcagcctcctctttagctggtacaggacagaagcaaaacatagatatctatgttgatagcataacttttcacattttgtagtatagttcatgacattctcagacactgaaattccattggaacccagtgctttacgtggctttgaatatggtatgtgtgagtcatgtctctttcaatacaactgcaatcaataaaaaccccagtaaaatgtggttaaccacaagggcatccctccccaccagctccacccccaaatcagcactatgattcattcaatgtagtcctcctccccctaatgtattttacattgggagatacttatgcttcctcagcacaaaaatcagaaatcctactcttctgctggtcgcctgcccctatgttgtgccgtcttgccccacccccgacccctgggaagtccagtcgtggcctataccctgggtagctgtggctggggagaaactctgcccagtttcatgcagaagcaggacagatgcttccaaaggatgcagtctgaggtcccagaagaccttactgagaaaaaagtcttttcttctttcttactaatataaccccagcatccatcttcctgtgtcttccttaaattgaatcctgagatgaggcttcccatttgccaccacctccttcgttttaattcattacatatattatagtgtgtttgtttgtttgtttgtttgtttgtttgtttttgatacagagccttgctctgtttcccaggctggagtgcagtggtgccatcttggctcactgcaaccgccgcctcccgggttcaagcaattctcctgccttagtctcctgagtagctgggattacaggcccctgtcactatgcctggctaattttggatttatttatttatttatttatttatttatttatttatttaagatggagtcttgctctgtcgcaccaggcactctatgagtgcaatggtgcgatcttagctcactgcaacctccgcctcccgggttcatgtgattctcctgcctcagcctctcgagtagttgggattacaggcgcccgccactgcgcccaggtaatttttgcatttttagtagagacggggtttcgccatgttggccaggctggtttcgaagtcctgacctcaggtgatccgcccgcctcggcctcccaaagtgctgggattacaggcgtgagctactgcacccggccattttttgggtatttttagtagagacgaggtttcaccatgttggccaggctagtctcgaacttctgacctcaagtgctcctcccccctcggcctcccaaagtgctgggattatagatgtgagccaccgtgcccagcctgttcattttgctgttgagacagagtctcactctgccacccagtctggggtgcagggaccatagctcactgcagcctggaactcctggccccaaaggatccttccgcctcaacctcctagagcgctgggatcacaggggtgctacaccacacccggcctgttttttttttcttatacagaagggacctgaggaaacaatatgcattgtgagtgcacaccagagggatagagaaaggcagacaaggaaaggagaggaaaggcgggtaatggaagaagaggtgtggcaagggcagcagccttcacattgcttcctcgctgggtctgtggctattaccctcctgagcagcaccttctcaggccagctcggtctagaaagctgtctgccagcagattctagttgtcatcccagcagtccttaaaacatgacctgccacccacaagggaaatctggtctcattagtacctttaattataaaagcagaccgagaacacatggtacattttctttctttctttcttttttttttttcttttttagagacggagtctcactctgtcacccaggctggagtgcagtggtgcgatctcggctcactgcaagctccgcctcccgggttcacgccattctcctgcctcagcctcctgagtagctgggactacaggcgcccgccaccacacctggctaatttttttgtatttttagtagagacagggtttcaccgtggttcgccaggatggcctcgatctcctgacctcatgatccacccgccttggcctcccaaagtgctgggattacaggcgtgagccaccgtgcccggccagtaccttttctttattttttaattttatttctttttctttctttctttctttcttttttttttttttacttctgcgagcctggaacatcttttctttaatttgatgctgtctttcttcctctctaatgctcaaatctagctttcatattttttctcaaggttgtcatttgacaggaggttttatttaaaagttctgaggttaaatacctggaagataagatgaagccagttgaaaacagtgtcctttttctgttctcatgcctgagagaagttcagtcagtcctgatttttcaatcggggtagaccaaagtttaagtcagctggctgtgatacaatcttattttaccattttctttcacatgcttttagttaatggaggaagctgggtcttaaaatatccaattgcatttaacttcttttacttacttaaggaaccagttaccctttgataagtacctatgtctagttccttttatccacagttggtatttagtcaataataacaataacaacaataataataccgatgcggtgcttcatatactccaggcactcttctaaacacttttagagacatcgatattcatttgatcctggcaataataggtattattactctctttgtttcacatgtgaggaaaccaaggcagagagagattaaataacttgcccaagctgtgagatagtagagctgagacatttacctatcaaagtcgctgccatcgtcagcactcactcgcattcattggaagctcaagtcggtgaccaatcatgtgtccctaaagcagcagtacagtgtaatgattaagggcacaaactctggaatgaaaatggcctaggtttgtgtgtttggggacggacattccactctagaagtagattccacctggcctaaaatgtgtaaatcactgtgctatcacaccaagttagaaactcacatggtgcacacacatgctaagctccttacagtctgaaactggcaacagtaatcagcatgcaaagttctctttagatggcctgttttttttttcctagctaacccctttgattagcaaatagtacaaatgtttatagagttggaagatttttaatatctttatttgaattgcacaaagcagccaaatgtagtttggccctaggctgcagagtatatgtgtccgggtgccaagaagcaactgcactccgcctgggatgccaagcattccagacctgttaccttgtaagtgtaatatttaccagatttttgcttcatctggagatgaagagcagagatgaatagagtgggggtgggtcaggctgctgggaagggagctcagtgttgagaggaatccctgaatgagtaggtagctgggaagggaacagagatttgccagaaaaagcccttttgctggcaacttggaatctaggaaaaaataacagaggctaacatgctggggtgcttaccatgtgccaggcatagtgccaaatgttctgctttcatgagcctatctcatcctttcaattctatgagatagatgctattattatccctactttgtagatgggaaaagtgcagctgagagagttaattacccaagatcaattctcttctgttccaaggtctctttgttactttagtaaaactagtacagagcaaggaatgacagtgcatcaagccgaaccccaacaagtcaaggcacttacagtatcttctgttggttcttactttctctaaccttcgcaactgccctgaaagttaggtgttgttaacattttacagacgaggaaactgaggccttagagcttaagatatttgccaaaggcacatttttgtttttgtttttgtttttttttttttttgagacagagtctcgctctgttgcccaggctggattgaagtggcacagtcttggctcactgcaagctccgcctcccgggttcacgccattctcctgcctcagcctcctgagtaggtgggactacaggcaaccgccaccaagcccagctaatttttgtatttttagtagagacggggtttcaccttgttagccaggatggtctggatctcctgacctcgtgatccacccgcctcggcctcccaaagtgctgggagtacaggtgtgagccacagcgcccgactgaaaggccagatttttaagtggtaaatccaggagtagaatctgggtctgctgaatcccacatcttaaatctctttgtgttcaaacatgacgtcttcattaggcaccagtgacaagatcacaaataaaacaaaactctatctctggacaagctcaattttctgcgatgttcctaaaagggaaggggattgaggcagagctccaggtagcttgtactgaatcctgtgtgtgaataaacagaggtagtagatgagatagtgctactaggtgtgtgtgtaggggtgtgtgtgtgtgtgtgcacacgcgcgtgcctatgcacacaatggggcagttgtaggctggagcagggaagatttatttttaaattgaagaaattagtagttgccagagaagcacatgtgcaatgtcttatgttttactttcatcatctctccatctgatgaataaattttaaggggattcctgcaggtcagcagaaagagagggtgaaatctagccctagttctttgctgcccttaccagatggaggccaccattaaagccctcaactcaactgaaaaaaaaaattttatgaagtatttttgtgaaaattaagctatagcattggaaaccactctttacatccccctccccacctcctgcagtgctcaaagctgtcttccaaggaagctggaaatataagtagaaaaaatatcttgcccagaggcccctggcaagagctcttaatcagctactggtacctttgcttttggggactgtagctttggttgagtctcacccaaaaatcaatgtttttagctgaaggcggaaaattataaaagcaaaggtgtgaagtgaagctctttggttagtgctgtcagtggaagaacagtcaccccagtggagtaataggtgccccaagacacatacacacgcttgagcaggaccactgattcatccaggcgctcgctgatgtgagactgataaagtgacttatttttaagcagttgatcatacttctgaattaaagtattcatagattattcagaaataataaatttgttttgtggaaagtgagatttttttttctctacttacttcacagtaccaccatgtcccactggacatttggacacataggaactgaattcaagggatgattttctatcacttgaaatcttaaagtagaagagagatggagtgatttgcttgtgatgaatcggccagtctctgggtaaaaaagtcaggactaggaaaacaaggactaaagtcacaaacttctgctcccaacacaatcactaagatcaccttcaaatgccacttctacttcccgtaggagttctagtctttcatgagtattcaattttaagcactggtggtctatatggaggtatgaggtggtgtttctcttttggctactcatctcaaattttgaaaataaatgttcatgggggtaagaagattgttttatgacactagcctactgtaaattctttttggagtcttcttgaaaatatttgagtttttaaattaaacactaggtgataaggaaaggtttcaagggaggataaagttaaaaagaaaggcaattcccaacgaagaggaaagaaacctatgtgatggagtcttaagcttttgtattctgcccttggatattacagcaaggccctaggactggatttatgatgcaaccaggggtttaattagaagactatgagctcgaatggagccacatttagacagaatctgaaacctctgttttgtcaatgcataattctacaggaatttgcaagtgacctttatttttttaggagggtccaaaattcaaagctggaaagcatgtgtcctttttaatgtatagtctattgcaaatatgaatctgcctttagaaaaacacaagaccattttaaaatgcaataatagggctgctaatttgcccttcagaagtcatttttcattttctttgttgggaaagcaggtgcatgagaagtgtgtgtatgtggggggtgtgggggagagggagagtgtcctcaggtgttcattgtcacacagccctcaagtggcttcacaggcagaaagtcctagcaagaaatggcagtccttgcagaagccctttgtcccttcagccatactgtttgtgagtttttttactgaaggattttcacacagctacgtggcgaaggacttgcgagatttgattatatatcccatgagtcaggtttcgatgggttacagattgcaataaaatcaaccacaggctttggaaaaactttccatgaaaggcattttagactaagaaatattggctttggatttccccatctagaaaggtagagagtaaacatgtactgacaaaaaagcaccacattcgggatcccgaaaataattgtgaaacaacacaagaatgcttttcctcctccctttccttcctttccacgtcacagagtttgtcatttatgacgattttgtggttgttttaacagttctgtgaaaatgagatacagagaaagtatttttaagatttatttaaataatataaggtcacagatattcccccctctcctcttctagaacatcttgattcattaaaaagaaaaaaaaaaaggaattaaatagcataagtattttgaatgcattggttatgggttttatttttaataactgtcttgtcactcattattttattgggttaaaagttataatcattttcaggtagataattaaagtagctatgtatgtaggaatggagttagaataatttggaatatcgtggtggaaaaagcgttagcaggtatgtgggatatttgaaagccttagaaaaacaagcatgttaaatgcttcctatactattatgtgttataagacagattatgtataataagaggctatcttaccttttaaaataaagtactaaaagtggttcattacaagtcacttccgctctggctgtaccacttattagctgtgtgaccttagataaattatttaatcctcataagccttagtctcctcatctgcaaaatggaaatgaaaacagtatctacctcgcagagttcttgtgaggcttaaacgagataatccaggtcagacccagctgctgttattcttggccctgtacatattgagagaggctggctttccaggcagtggatttaacatacgtttgcttcatctcatttttccttaaactcaggggctatggacagtccattcacacccctagagtctcaccagaaaaggacagaaggcagaattcaaatctgctgagaatggatggttaacatgaaacgtgggggatgactcatggcaggaggaggttcagtgaagcccgattgtctctgacagttgaggacaaagtggctgcagatgcttcagaggctgcccccagagcacattgcagcctgtgcagttattattcctaaggccgatgccacaatgatgtcacataaccacccggcagatggctcgtattattatatgcattgaaaccagagtgaacccttcccatgtttgggatgggtgtggtgagtgggaggaacacctgttaggaggtaggatctgggtttgattctattttttccccctctcttactggtactttctggttggtagctctgagcctcagtttccttatctgcaaaagggagatgtacctcaaaagttgtttagaagggtagagtagaattagataagataatgtaagcaaatgcttggtgtttctgaatgacctctggaatatgtggacagcatattgttattcaatgataattaagaataagttgaagtacagtgatgccaccttgtacttatcattttgcatttaacaaaaggacgtggacatgcattatcgtatttgagcttgacgaaagcctgtgatcaccggttcacagagcacagaggttttgggccttccccaaagtaacacgacttcagaggaaaatgagaattcctgctaagaagtggccatccttggtgtataagcccctttatccctttagccatgatatttgggagattttttgctgaagggttttaacatgaccccatgtcaagactaagaccaagatcttctcacatagctgcagaggatcacacacagagggtgtctttggctggtgaggggctcatgagatggagcatagcaggggcctcctagtgtgtccttcaaaaccaaaattaggcttttcataagctcagtctctgaactcagtgctgtctggctcctttcccatctttccccttggaggaaaactgaagaattaagctgttagaactagacttctctaataagcctcagtgtcacaggttgtcacagttgttgcattttattttgtttttatttttattttttcttaattgggcagcctctcccccagccttttcccccaaaccagaataagttcagagagactcccatggttgcattttaaaggtcatctagttctgtcattactccttgaatcctgtcataagatcctggctactcgcagggatgttgcttgaaccttttgtaggtaactctgtttgaaggctcttcactgtactgagcttgggctgttctgagatttatcacccccaccccatcctttaagtactacagaacaaatctttatcaggagaggtggggacacgggacagtggaaagagtgtggacttgggatcagatagacttgatttgcaaatttccagctacctttctgtttcagctgtatactgttgcacaagtgacttgcctgctggaaacctcagtctcttcattcacacaatgagaatggtggggattggaaattatctagccaacctagtaggcactatcaataagatagcatttatatgagattgccagatgtcattaaaaatgagattatgtcgaagaaagccctttgtaagttgttttcaaatgtaggcactgctcctagaaaatcactggaagtctctttgtgtagctgatttatcaagtaatctaatgggccaacaaaactaatgactccaagaatggctttctaagatgtgtcctactgaatcaggctcaagcctgcccacaggttcctgatgctaatagttacaaactgaggagtagaggcagaccccagggccattctggtttgtttgattctggatggcagagaaagggagggcttccatccacaagctttttgatactgctcctgtcttgagatttgtgaccttttctatgttcctgcctagaaaagtcttattgacatcagattctgaaagtaggtgcaccctttcctctttggctgtcaatgttctgttaataatataagcttacgtttactgagtacttactatgttcatatttattaccttatttaatccttatggcaattcttagaggcaaatgctagtattatcatattttaaagatacagaaataaagtgagtccctgctcttttgctgttcccgtctatcaaggtgaacacctaaagaggccactataatacacagtatgataagtgccaggatgcaaagaatggagaaattcattgtgctctggaagagccagagacacttctaaaaagaggtgacactaggctggaccttcaaggatgaatagaatttgccaaatgtaaaggtttctaggtgaaagactgacatggcatgggtgtggtggtgcttggcatatttggagattggaagtgatgtggtgcacttaggggctggggcagagtccagtatggcaggggtgggaggggagtggaggggagacagcagggtgcccattaagctggaaagggagtttggggtcagaaggtacaaaaattgacatgccgtggagttgtctctttgggatatctgaaatgtatcaagactgtgcacttgttagaggttaagagagagaaaaggatggttaagaattgaagtaggcttgcttggtaccatgctgtctatgttcctggaaaaggcatgcccagctacagagggtagtgctttctcaccttgaacccagtaacctcaagggcaggtagtgtctctcctagccttggatggaagagtctcatccaagcccaattattcttttagacacgagggaaccgaggcctgggaagttgatgataccctatatgagatctacagagaaatcagttgtaccactaccttctcttaatgctcactcctgaaaagcccctcccatattgcacatcttaaatcccttcacagctcaagtggttactgtacaaggcctgttcccacctgacctttttgtttcttctgcccaaggcagacttgtgagaaaaggtggtctgattgaaggctgggaaattaggattgatgactctatgttgcctggctatgagacttacaaaatccttttaggattctgggatccttctctgagatatttgaaagggttcaccatgccatgaagttcatgtctttttctatgtccccccacccccactggcattattctacatggaaatgactgtgatctggaaggcccatagacagcaagaacacatctgtgtcctctgcaagaatagaagctatagttaaaggacctgtgcacccacagaggaatggacgtggaattaggcatagtatataattagagtagagctatggagaaggcacattttggctcctagagctccccagcttccttctgacaataaaaaaggggtaatgtgcagttagttgttttcaataaaaggaagcaaagggatcaactggagtttttaaaactctgtctgtgtttaggctgcaccgattgcctgtccaaggcagtctgacctgcgtcaggccatcctgagggaagagaggtcacagttggcccccccacatccagagggaaattttaaagttcagtaaactactgggcaattatggattgcttggcacaccaaaaagtgattttgtctttgaagctgatgctcagacaacatctctgagtctccgctgtgcccactgaggtggacccgtggccccctcgcccaccatgaaagaaagagcaggctgttctgaagacatctttattcctgctgaaacatgggggacctggtcctttccttgcttgtccctctctggatcttatccctaggtcattcccaaagtaccatttccaaagaaggtcaccgtatgtcgggagccgctgaatagctgatccctgagttggctgcctgaacactaataactttctccatcctggtcccttccagacattgtacactctaaggctgctgtgcgtttagaggaagatacttccgctctcagcactagtaataactattcacaatcataatgaagagaaaaatcgctcttgtcagagtatcagtgccagttgaaaaggcagcttgtttgttttaatgttgctgtatctcttcaagttggaatatgatggcggtctcagaattggccttctcagctgaatgtgcttgccctttagaaggcactctatacagggttcgttattccactggctgcttgatatcctacaggggagcctattcttgagctcgatgtcagaagatgagcgttggattagcactgagaagtctgggggagtcacttacatcgaatcatttggcctctgaattgtggttttctcaacagtaaaatgggggtaatcctaacctggcttacagggttatcaggctaggatgaaatagtatatgtggaggtgcttggtgaaacactatgaagacctaaaggattgggattaacattcatcattgttatgtgacttagctgtttgagagcgattaatttccttttgctttgtgatacatgttgaacacctattgtgtactaagagaccttgtcctgggcctggagctaggacacaggagtgggaagatgacagattcagtatctgtgcttgtgaaacttacaaaggcaccctcgcccgatagagaggctgttcttcctgtaccggtcccatatgcacctgctttcaagtaaagcagacctctgcctagccttcagtgatctctaatccagtgctacagtcagacagcagcacagcttgcttccggctgaagaacattctcaagtgtttaagatcactgaaaagaattgagaggagttatcaattttccctgatcaaaacccctctggccaatgaatgtactcagatagtatctcatgggtgctctgtggtacagtgtatatgggtgcttatcaactattcaaggaacatacgttctttattggtaacctttcaggcactacacacatagaagctgaattaaggtattcagatgcaattgtagaagtcactattttttcacttttctgacacaaggaaatttttcagacatgtctaacctttaagagtagattagtgaaaccaatgtaatatgtgagaaataaacatcttcagtgacatcactgaggcaccctgacatacgagaagtgattccactgactttaggatatacttgagtacacataggtaagccccatgcaggctttgtgtaaaattcccatctctatatcttcatttgctatttgttaatttttgttatatatgtaccactccactatggtgctctatttactttcaccctcacacatttataaaccactggctttaatcaagaaacacttctttaaagaggacttagtaaatgcttttcaggaagcacagaacagccattgacttggaactaactaaaagcatttgtcgtgcccccaccccggtctacacaaccactagtgagaaaagaaagcaggaaagctttgggaaccacctgagttttttttgcacctccattgcaaagacttcttgaatgttcctaaagaaaacagagagagctatatgacagatcttaagcttccccaaagaaaaaaaaaaacagcttatttttttcttaagaattctccttccattctcaaaacgactgtgctttccaataagttgggacccgctggattaactccttggagaccctagctgccatttttcagtcagttttttctcccagtgtcccgagagcaggttaaaattcaaacattttatagcctctgtgcacaaaaataatgagattgaagctaaactataggggcttgctctcagctagttcaattgaattaaaataacacatacttaaacattttaaagtacttagccagggtctagttctgcaatggagattcttaatttaaaggctgtttttcttcctctcacaaacagtggcccaaccttgaagaacagaaagctgcttagcacccaaatgaacatgattccttaaaacaagcataacacccttggctccattccagatctcgttcatgccacagttcatctggattcctataattcctgtatgttcccatatcttaattgcccatagctgtgttgccagtacaaacaggatgagggaagagtgcacacccttaatgaatacatctaccaaccctaagaaagcaccatcatttgaaactctcaatattctttctggcactaaatggccatctactgaagtgctaatatggatatctggtaacttaacgtttcttccgagcaatgcttactccctactatctttatattctagatagagggctaccatttggcataaacaaaaattcagactttccattcagcttttcaaggaagtatattttgaaacgaattcctcagagtgctgattaatagaggatgggcattctgggctaaggtgggttccagaaccttcctgagttctgtcccactggccattttccttgatgatttgcagtaggacacagctggcctactggtcccccttgaagaagatgtgctgctgggcaaactggaagactcactgtggtggtagtgtgtgcctgtacaggtccagagcccctgcccgtagacttggctgtgtccctggagttgagcagcacagtgggaagtgcctagtacagaagaagcacctcagaaggaataagttctagtgtgaattcaggtccttttccacctaaacaaacttgaagacctttgttccttatctgtgagttttggggattgaatgaaataacatcaacgattcttcattttattacacaacactgtgccctgcagtatcatttaacaaatgaatgcacaggctcaccacatcagacttcaaatccttctcagcatatttaaaatcaggacttaaatcaaataagtataccctgaataggagtatattgtaaatattgcacagggtgtaagcgtaagatgatgacatctgcaaaactgtttgtgtggaaaagaccaaagacttgtaatttattagacattcagaatacaaagaatgtatgatgtgagtgcaaaggtcaaaaaatagaataattcattgttgggatgcattcataaaagcataagttccacataaggaaggggatagatagttctactctattctgccttgagaattatgttcagatgtaatggttcaggtttaagattggggcaaagtagagaacaactagaacaagtgaatggctttcatgacaaaatgtgaaaggaaagatgggatgtttgcttacagaagaaaagagatgaagaagagaagatgcaaaaactggcttcaaaaactggcttgatcggccaggcacggtggctcacgcctgtaatcccagcactttgggaggccaaggtgggcggatcacaaggtcaagagatcgagaccatcctggccaatacgtgaaaccccatctctactaaaaaaataagaataaaatagccgggtatggtggcgggtgcctgcagtcccagctactcaggaggctgaggcaggagaatggtgtgaacccaggaggcggagcttgcagtgagccgagatcatgccactgcactccagcctggacgacagagcaagactccgtctcaaaacaaacaaacaaacaaacaaacaaaaaactggcttgatctaagtaggatcgagtggaaagggaatagatcatcttatgtggctgaactagacccacttatgtggtgtagctcttgtagaaagcagctgtcagcctgaggtagggaagaactcttgtactgttggaacaatggtcagaggctgaagtgggccacctgtctgggttctaagttctctgtcactgaagggttctgagagaaactgtcttgtcttgtcttgtaaagaaaattgcagtaagaagagtttgatgcttataagagagagcacctagtaggtgccaggcaacccctttgtgtgctatcatttctaatttcaataaagacttgcagagaaattgaacatcagctgtctttgctttttacttctctaaaactggataatccagaccatgtattcctcttcgtatttattcactctcaagccattaatttaatgtgctagtaataacagcccatgccacttggttaagttggtaaacagcttgcaatcctagcagggtgtgccccgccacttattagcttaagctttagggcagagcaacaaatcagcacagtgcctcaaagtaattaggcaattcccttacagaaaaattagcccacaagcaagaagcttacagaaaacacaaagaaaatctcacagtacaagacatgcattggccattacatgcatcactgctataattttgaaaagattagagaaagattttcggctaataatgacccgctacacccattaagcatgtcaaaagtccatactagtcattacagagctgcaggggaaagtgcattcgtttctggaaaggggaatgttggcgtttatttgttgtgggataagagtgctttctttgcagggatgagcaagaatgtccaatgctgagcaaggatgtccagggctgtgtggtttaagtcctattttgccaatgcttggtgtcatcctgcaaagattttacccttcagtttcttaatctgtaaaagagatcaaaataaaatgtgcttctaatctattaaaaggttaaggatgagatcctaaatttccaagtttaattcattaaaggaatcaacacaggccggcttccttctactgatcttgtttgaagcctttactgcattctagaatggtatatggttatctgtgtcatgggctcactggcctcattaaaagccatgaaagaaccaaaaagatgactattttgctccctggatatcacagcaaacaaaagcacagattgaagggaagtgagaaaaagaggagagaaagaaaatggagcaaaggaagtagaaaagataggaagggagagagaaaaagaaaaaaataaagttatctgctttaagggatgagattatggcagagaagagctgcttcagtggcctgttccagctgtgaggaccacctgccccgatgaggccattgggaagggacatatcacattcacggtttacctgcccacaaacgtgggtgcagccatactcttcatgctcatgggctctgagactcctctacgttaggcatcggcctcttttttttttttttttagacagagccttgctctgtcgcccaggctggagtccagtggcgcaatctcggctcactgcaagctccacctcccgggttaacgccattctcctgcctcagcctcccgagtagctgggattacaggtgcccaccaccatgcctggctaatttttttttgtatttttagtagagacggggtttcactgcgttagccaggatggtctcgatctcctgacctcgtgatccgcccgcctcggcctcccaaagtgcttggattataggcgtaagccaccgcacccggccggcattggcctcttaacatcaacagttggcctgccctttcagcacccaatgcttttactgctaacacccagtacaccctacacaaactgcctgcacaaccctgagcctgatgaggaatgtagaggaactgaagtgaaataggtgtctccgtgtaggtggggttttatgaggatgatggaaactttggaatagaaactggaaaccccatgtctgacacagttcaagaaaactaaacaccatgggccggcaccactgttattttactttttttttgcgcagtgtaagaaggagcccaaacactcatgctgacagtacgcacagtctcaaatagcagttagatgaaggccaagtcacgtaagctgatgccgacacaattagactcaccattgccaacagctcgtcaagtctgatatcatccccctctcggagactctgtctttacatagcagatgctctggtgctgtgttacatgtaataggtgggatggccggagagaaaatcagaaaccaccgctgatgcgctgtttatttcttagtcattttatgttaaattgctgtgacttgaacgtcagcagtgtttgggatgtggtagtgaaataaaatccatatccagtgtgccaagacaaatttcagaaaaccccaaaacacaattgtcttggtttcttgctggctgtgtctgtgcacacacaaatagtagctagtttattgccctccaaccactcggtgggttgcttgtcttgccacactctggggaatggctaatgaaccccaaactacttccttcaaagctggggatgtcaggaatgaggggccactacacattcattaagcatgtcagaagtccacaccagtcactgctgagctgcaggaaaagtgcagtcatttctggaaagggaaatgagggggtttgttctcttcattctgtgggcttgtgaataagagccaggggataccactgagaacagcagcactaggcaccaatgtatggggatctgaaagaccctgggcaatactggtattagtaaagtgcttctcactgggaaactttcacactgggtgagcccccaggtctccacatcaggtgcgttctcttagggagtatccgtgaaaatactatggccttgcattaaagtttttcaagctttacttcaaggtcaaacttatctctagtggaggaggagctgctgccttgttattttatttgtattttgttgccaccacgctccattgcatgtgttggtgtttctgcctggcgtggtagtcataccttcaactcaggactcctttgcacagaaggcaggatattatactgaaaagctttggattcaaaggctagcctcacttcgactttagcccaaagttattttactttcctcactcttgatttattttcttttctttttctttttttttttttttgttgagatggagtctcgctctgtcgcccaggctggagtgcagtggcgcaatctcggctcactgcaagctctgcctcctgggttcacaccattctcctgcctcagcctccagagtagctgggactacaggcgtctgccaccacacctggctaattttgttttgtatttttagtagagacgggatttcaccatgttagccaggatggtctcgatctcctgacctcgtgatccacccacctcggcctcccaaagtgctgggattacaggtgtgagccaccgcgccaggccttgatttctttatctgtgaaatggggattaaaaaatggcctttgcagtgatgaagttagtaaaggtattataaaatgagaaggggacataaaatagaattctgagcctgcagtgaaatcaggtcattctttttggagtaggaaaggtaggatggacatttttcattcctctctagctagttcatgacgctgagtaaccagaagggaagcctggtcaagtgcattgtggttagaccatcatagtctagggcagaagttctcaaacttgagtgtaaaaaagaattgcctactattcacccagtagatctaatatggaaccaagtaacaagcatattaataagcctatcaggtgattttgatgcagggggtgagtaaacaaatatctaactaacatagtggaatttagggaagaaaaacaatttttggaggctccatcggtggagagcatgatgtaatggcagaactggaagtgggctgccaggccatctagctcaccctgccaccatattcaggaagccccactgcatcttttgggacagactgcgccttgtgagtacacaggttcttccagggaggccagtgaggtgtgatctctcacaaccttgaaagagagtgagttgtttggtttcttttttttttttaatcttctaaatttttagaaaattatttttatattgagtcaaactgtggctccttggctatatagaaagtaagtccctgaaatctttgaaatcccttgagatttgatatccctaagtcttcccttcttcagtctgagtactaccagtttctttcagtgaggggtgctgatcctggctgtacatttaaaatcatctgaggaacttaaaactaagtccaccccagtcaattaactagacttttagggacttcaacccaggcatcaagattttcaagttcctccgttgattaaaatgtgcagtcaaggcagactactactgcaaatcatagaggaatcctatttttccagtttaagagctttagaactcttcctcttttctctgtcttactctttttttctaggtataaagcctgatccaaagtttaggtgcttgagccaggtgcagtggctcacgcctgtaatcccagcactttgggaggcggaggcagtggatcacctgaggtcaggagtttgagaccagcctggccaacatggtgaaatcccgtctctactaaaaatacaaaaaattagccaggcgtggtggcaggcgcctgtaatcccagctactcaggaggctgagacaggtgagttgcgtgaacccaagaggcggaggttgcagtgagctgagattgcgccattacactccagcctgggccacagagcaagactccatctaaaaaaaaaaaaaaaggccgggcgcggtggcttatgcctgtaatcccagcactttgggaggctaaggcaggcggatcacgaggtcaagagattgagaccatcctggctaacacggtgaaaccccgtctctactaaaaaatacaaaaaattagccgggcatggtggtgggtgcctgtagtcccagctactcgggaggctgaggcaggagaatggcgtgaacccgggaggctgagcttgcagtgagccgagatcgcgccactgcactccaacctgtgcaacagagcgagactccgtctcaaaaaaaaaaaaaaaaaaagtttaggtgctcctttgtctttctgtatttctttgtagatttcttttcttctgtcgtatatttcagcagttctgaaatgttagggtacataggaattgctcaaggagtttgctaaaatgcagaccaccatccatactctttaagaaagactgttatataggatccatatatccactgcaatgagcaggaacctgtgctgctttgtaagcctcgtttagctttgcctctaggagggggactagcttggacttgatgttgaggtaatcggtgagtacctcaggcaggaggataaacaaaacctccaggccactaccaattccgttcatacccacaccttctgtgtttcactttgaactactgacctttctggcttatcttggaaaatcccccacgaggacactgagaccagtgcttgtctgtccttgacaattgtggtcagtgctgactccaagaaagctgatattaaacactaaagcctccttcttcttttccccggactttatcaatctgcttttaattgttaactaggactggtttcaccagctaggagtcaaccagtatgtagtcacacattggttctcaaactttgatgaaatggtgccatcagactttcctggatgattcacatttatcacggattcctaggcaaggctgatgccgtgggctgggagcctcactttaagaaccactgctttagcaaatacagcaaatacctataggttcttgacccaagcatttcaacattcacgcactttcttcctgccagttttgtggtgtaaccaatctaagagggaataaacaatagatagatggctgaagcattgccctcctgaagggctgaaccctagacatcattgggggacttcttgcaagcctcaaatctacattctgtttcagagctcatcacatatgagtgacattgtaagacctttattcagttttgtttttttattaacctttaactttattttgaaattattttattttattttattttatttatttattttttattttattttttgagttggagtctttctccgtcaccaggctggagtgcagtggtgcaatctcggctcgctgcaacctctgcctcccgggttcaagcgattctcctatctcagcctcccgagtagctggggctatagacgcctgccaccacgcccagctaatttttgtatttttagtagagacggggtttcaccatgtggccaggatggtcttgatctcttgacctcgcgatctgcctgcctcagcctcccacagtggtgggattacaggcgtgagccactgtgcctggattattttaattttttttagagacaggtctcactctgttgcccaggcttcagtgcagtgactcagtcatggctcactgtagtctcaccctctcaggctcaagtgatcctcccacctcagcctcccaagtaggtgggagttacaggcacatgccacatcacccagctaattttttattttttaatagaaatggggtcttgtcttgctttgttgcccaggctggtctcaaactcctagccttaaccaatcctcccactttggcctcccagagtgctgggattttaggcatgagccactgtgccaggcctgaaacaattttagactcacaagaaattgcaaaaatagtacagagagttcctatatacccttcaacagcttctcctaatgatgatcacaactgtagtacgttttcaaaggggatggataacccatttaccatgatgtgattattaggcattgcatgcctgtatcgaagtatttcatgtatcacatgaatatatacacccttactaggtagccacaaaaattaaaaattaaaaaaaattagtacatataaaaaccgaagaaatccaagcctagttaatagtattgtaccaatgtcaattaaactttttaataaaaatagtcctaatatgaacattgtagtgaaaggtgaaattgcttgatgcagagctgtttagtggaaagttaggatttctcttgtcaccttttctgatggtcaggtttatagtaaaacaggtgaaatgttaaaggatagtggtggggagtctgtgagaactttggggactggaattgctccctactcagtggaaaggaattagagtatatagcgtcatgtataaactgccccaggacacttagctcctcctgttctttctctcctcttctaatttggtctgtcaggctatcagagcactgtctctcgggggcattcatgaaaggcccactgaccacctggcagttctgttacggtatgggaagggaggcagggaggaaactgtgtggaaatttgtgctagacccagcgctccaactttccatctgcttacttatagaatcctgacaatatgacccaatacatatgaggtagaaaattatttacttcattatatagatgaagaaacaggctcagaaaagccagataatatccctgttgccacaaaactaggaactggttgattcagttcaaccagttcattcttaactggattagaattcagatagccttgaaggtcctttagtacttaagaatcctataactatatgaggcttcggcagggctagctacaaaatttgcagaatcctttttcaatatgaaaatatggggtctcttgttcaaaaaaaaaaagaaaaggagtactattgaagatgctaaaatataaaactttttcctttgttccatggtctccctctctctgtctctctcgctctccaactgtcacggtgtttttttatgtgctgtttgatattgtgctcacttgggcatggggatgctcccagagtgacaggagactttcatggggacctgagacccttgccctaaaacttggaacatgtagtccagcagctgctggggtccccctgccacaagcccacaagattgataacacattgagccaggtatctcccttcccatgggactgccacttcaacccatagggttgcaaactctgcactgggatgtgcttggtacctggattaagagggtgcatgaaaatctcagaaatcacccattaaagaactcattcatgtcaccaaaaagcacctgtaccccaaaaagtattgaaaacattttaaaaaaaggagtgggtgagagacgtgcttctactgggttgctccctgaacatattgtggcactgccagcttgtggtggggacagctgccaccaggctttttcctgaaatggcatgggttgtgtgcctgaccccaactgtcattgggtggaggaaaacagtggccactgggcgggccagggaaggcagggtgagattggggacaccagaaggcaaggggtaggaggcagagagtcctgggcaagtggacaggtgacaggaggtgggatggcacagggctgaggtccccagccctctgtgcatgctccattgtcccataagacctcgcttacaaagcatcaattcaaaaataaaatgattgagaatttcaagatggtgactagagaggccacagagcactaaattcaggtatgagacctttctgaggatggagaccctgtgcccctgtgctggccacacgctcatgaagtggagaaaaactataaggaaagatttgtgagttcaaaatacttacatacaatacgttggtaaattttttggagcagatacaagtcaacatataatgttcatacagtagtatgtgattaagtgctgtatttaagctttttgtatactgttactttggaaattagtgactagttagattttctcaggttttttttctctcccttccgtccccaaaatatggttttgcaggcatgtgtggccaaggttgaggtgagggggacaccacttgatgacatactggaatcttctatgtgcaaaattttccccgggaggaaggcccatgagaaagcctgggaggaggaccagaatcagcctcctggtgtgaaatccaaagggttgaaggaaaatcgatttgattgaactgaaaaagtaggtcagaaattgagagaaggagcgggccaggatgtgagtgtggataagttggcaaaggtcaaacacaagtacctgaccacctggcaatggaataggaactgggatgcgcattacagaggactttagcgagaactcccattccaaagggggaaatgagttcttggaggaagcagaggaaaaagctccatccctccaagactaagcgggtggatcagagctgcacaagccattaagcccctaccccgggctccctcagtggagggcgggagcctgccgcgtcccgactgggcatcaaggggcctttttgggtctccctgctccgtgtatagggtgtttatgaagtaaaggcagggtcaaagactgtgctagagcaattgacagtaattttgttgtttccaaatgaggagacatttggccagttgctcatgttcctcagccagccagggggcttgtgacccagagcagatgacagcacaggacagctggcatcaacccctggaaggggtagttggttcttcagttgacagtttttaccacactctcgtatgctggagcaggagtacaggcagggaaggctaccggctcctcccggcctggtcgcttcaccatggttacaacaccaaagcagtggctgatgggggctgctcagcagtcctttcactgtgtgtgttagctacttctacttataaaacaaggaccaaaaatgcagatttgtgttattagacagttgaaatataaacagcctaaatgcttataagagccagaggggaggagggctgtttgccaatgtataggaagcccagctgaacaactgtacttaactagcaagctactcctgtaaatatttgcaaactccccttcaaagctcaaaagcctaggacaggatcattggatgatttgcttagaagaagaagaaacaaaattgacctcatggtctgaggcagccataaaaagaaaagagtgtggatgggcagaggaccagaaaaggggggaaaaaaatggtccaaagtttaataaacacaaaagagataaaaataaatctcaagagcacttatttacaaacttgatggaaggataagattgaggcaggcgtgtgtgaaagatgggtgtttgtgaaagtggaagaggcctgcagggattccactgaaagaggcggggaaaattgaatgagatgtttactcttcctaacgacaggaaacacgctaaattagcttctctattccaggatgctccttcaaaggatgtttgaagcttctgctgtctaatgcggaggctctgcgaagatgaatgcagcatcagcctgtggaaggttttggccaagacggtgtgcaatgccagaaagcctggccccagactggcctaggcttctctggttgtctggcctgttttcagctgagctggtcggcataggaccagctgttccaatcatgggggcgggcatattccagaggagaaaaagttctatttgttctcagcagctaccttgtcaaaatgctgtgtgctagggggctccaaaagcctttctgcgtgcaccagtgccccctggcctggaagccgcccatcaactaattcgcagtggtgatgcggcggatcatcaccatgtctgcatgaatactttttttctttgaaacctggatactttggattttttggggtttttttgtttgtttgtttgtttctgagacttctgactcctgggttataaagcctcaattcacacagtcattttctgaaccagtatggaggagactggtgtagaaattccccgcttctccgtgggcctgtgtgctgagagtcacacatatataggggaaggagatgggttgggagaaagttcctatgaaggaaaaaattcaggctcttaagatgagaaaatgttggtgtgttcctagcatctttttttcttcagtgtaatcgtcagggcatggatttcccaataaatcacggaaggtatttatttctattttaagatcggcaagatggctcatttatttaataagaagttagtgttgccaacagtcagatgcctgagtctttcaagagactcctgttgatgaccaactatgcaaacgggatatttggtgaaccctgtccagatacgtgggaaagaagaaagacctggcaaatacagtctctgccctcaagattcttaaaatttcacaggggaaacaaaataaacaaacataatgcagaagtaataaaaacatttataaagaaacatgaacaaccgtgaatgattatttgtaatgaagtcagataattgaagagtgggtagaaagaaatggagccactagagttggatgaaacactctggaaaggggaaagaaagtgtgtaggagattttggaagaagattgtagaaacatacctgtaacaagtggtctgcacagtgtagatgcttgataaatgaatattgtatttgaaagcatggagttagaataggacctgctctggtctttgtatagcctcagttgcatattcaaagacattggcagattacaaaaaaaaaaaaaaaaaaaagccagcacaactctaaagcaacccaggagcttgattgattgattgactgattgatatttgagatggaacctcaccctattgcccaggctagagtatagtgttgtgatttcagctcactgcagcctccgcccccggggttcaagcaattctcctgcctcagtctccggagtagatgggattacaggtgcgcgccaccacgcctggctaatttttgtatttttagtagaaacagggttttgccatgttggccagggctggtctcaaactcctgaccttaagtggtctgcccacctcagcctcccaaagtgttgttggaattacaggcgtgacccactgtgcccgtccttcccagaagctttaaaatgtcatgtaccatcagcaactctgtattttacatggtttagaactgaaggaatttgtgccaattctttttcttcattagctaggatgacctcccgccaacagacattatcctgcataaagaattttaaaactggatctggtataagctagtacgtgggttatacttttgtttattcaaatttcctcatcataacttgactagagaatatgttaagtcatatgtgtgtgaaaaactaaaatattgaagccaaaagagattcgatatatgagcctggttaaaaaaagattatttggatgacaaactttcaaggaaaaaaaatacatgggcaaactgctggccattaggaactattttcttggcacatctgattaaagtgtatgcaggcctgacagctctctccaggcatgaactgtcataaacttgttccaattcaaaaccatctatgatttccaccagtctgtcagccttcaaaggatggggttaactgcatgctttcaaatggagttggaagtggtttgttaatctctattaatttgctactcctgtaactaaatgcacatgtttattttatttcttttttttctggttacattgttaatggtattaaactggccgttggaaactattctgtagatatttcccttatggtttcttgggattatctcacgctacagtcttctctgaaagcacaatggattttatcattttcaatgattgccctaattttttacagatgccatcccgcccactttctacagaccctacttcagaattgttcgatttgacgtctcagcaatggagaagaatgcttccaatttggtgaaagcagagttcagagtctttcgtttgcagaacccaaaagccagagtgcctgaacaacggattgagctatatcaggtaatgttcatctgttgttgttgttgttgttgttgttgttgttgttttagacagactctctctctctctctctgtcacaggctagagtacagtggcatgatcacagctcactgcaaccttgaactcctgggttcaaacgatccgcttgcctcagcctccctagtcaatgggactgcaggagtgcaccatcacacccgattatctttttaaaaaactttttttagatacgaggtctcaccgtgttgccctggctgatctggaactcctggccttaagcaatcttcccaccttggcctcaaaaagtttggggattacagacatgagccaccatacctggctcatttaggttgttgtaatgggcaatcagtttgaggtcttagagtaaaagaattctagtgtcttagattttcttagctgatataagccatgctatatattcacaatcgtgatataggccctcatttactattactgttctagtaatagcttgttcctaatcactcaggagggaagaaccctttagaatgcagtattgaagctctgagcacacttcctcagttgcatgaacagctggagtatgtactcttcagagggtttggttccagaagtcaacccgttaaactataaagtcagataatgtaggtccgatttcttcctggggaacagtcagttgaccttcctttattcatcctatagctgtttctttctccttttctatgattttctctttgttttcttattgtcttctctcttcctttttcacttttttctcctctctttgcaacctccttctctttattaactttatcccgtttccttttcctttctaattctacccactgtctccagtctacccactcaatacacacacacacacacacacacactttcctccattatttggacagccctgatgtctcctgttctcatctttgtagtggagttggagttggtgggcagctgcgtcaaaatgtaatgatgatgatgatgaaatgccaacttgctgagattttcagagatgttcttaaaagcttgttacccgagtgtagtctacagggcatttgcatcggcatcacctggggctgtgagaaatgtagaatctcaggccccaccctagactttacagaatcagaatccccattttaacaagatccgcaggtgcttcttgtgcacattaaagaaccacttgaaaaatcctgagtctggtgcagccttgtaaacaggcaacttaaatacatcctgatgccatatgaatagtggtacttgcatatagggtataggcggggaaatttcaccagggagctgacattttgatgaggccttgagacgtatctattaaaacctgatgggggatcatcattcttggcaggaagggcaggcactgcaaagacagtcttgaatgggcttgctgagggtacctgatgcatagcgctcagtgcctggaggtgaggagagactggggagaaggtggccctccaaagatagtgtgtagagtgacactacagaggattaagaaaaaaccccttgggatccccgtgataaggggtatatatgtgtgacaatatgattaaaacatgggattacttgagaaaaagaaattggcatctatgtgcagaaaccgctagtttttctggactctaatcatttggaatttgtgataattaggatcaaaattttctttgtattcattatgaaaatggagaactaccacacaaatgaatatgagacctgaagaatagtttaaaatacttaaagcagtcattttgttttctttttctgtttttttgagacagcatcttgctctgtcacccaggctagaatgcagtggtgcagtcatagctcactgcaccctcaacttccagggctcaagcgatcctacaggtgtgcatccccacgcctaactctaatgtatttttctgtttaatttttagtacagatgagttctcgctttgttgccaaggctggtctcttaattcttgagctcaagagatcatcccacctctgcttcccaatgtgctgggattacaggcatgaggcactgtgcctggccccagttttaaagtactagttcacatgtgtgttcatgaagaataattcttacttatttaaataggccctcgagaacctgtttttgagacttttaaatcctaactggcattctgggtagcaccaatgggccagccgttgctcgtcgccccaaggtcagagagcatgcttgtgtgaccagacactatgctgagcaaagactcagaagtattgtttccaatgatactcacagctatactatgaagtttgtacaatgaagtattctttctgctattatattcttttccatttcacagagaatggtgctaaatcccagagaaattaagtaacttggccagggtcacacaggtgggaaatggcagggctgggatacaaatccacctcggactcccaagtccctcctgcccctcaccacatactatgctattcctagcaaaattttccctttctcttacccttgggatcagccagaatagaagaataataagacaaactaggctagaggatgaagtaatatttggaggggaagcaaaaactggttcctatgaaaaaaagccagattaagggtagccagataaattacaagatgatttaaacaaacaaacaaaaaacatgattatatctcctttttcttctcttttttaccaattaaatcacccttaaatttccttctttgctgacgatagcatcataggttgctctctttggccctactttagttacatggcttcagtaaattggaggcagggtcacctaggtcctgttacctgtaatggaagctgctaagtccctatttttctgtggccccttgaccctgtcctctgaggagtagcctctgccagcaggcttgccaatggcttttttcctcccagggcccatcccatctccaggaaagggtgtttctcttgaggctggcaacttagaggaccttagtgagttcttggtagatgtgcctcagaggtttctgaagcaccggctgctccatgacgcaagtgacatgatgtgcatggcttagagtcccacgcttgaaagaggaacggcccaagatggaagcttttagtttggagaagcatgggcacgttcactgtcactatacacgggcatctggaagaagaagattctagcagaaaaatataaaataatagcaatttttttatctttctggggctcagctatacaactcctgaagcacagacaaggtccagagagcaagtcaaagagatccttgaacacccgaagagaagacaactcacacacacttttgatggatcagaaaggcagcctcttgtcttttattgcttcaactagtttgactatctgtagggccagaagaaattagaagcactgaattaaaagaggagggctagaggaggacaccgtgacatcaacagcaggtcctttagaccagcagtccccagcctttttggcaccagggaccagttttgtggaatacaatttttccacagagcattacttttattgtgcactttatttcattgtaatatataatgaaataattatacaactcaccataatatagaatcagtgggagcgctgagcttgttttcctgcaactatatatggtcccatctggcagtgatgggagacagtgtccgatcatcaggcatttgattatcataaggagcgtgcaacctagatccctagcacgtgcagttcacaatagggttcttgctcctttgagaatctaatgccgccgctaatctgacaggaggtggagctcaggcagtactgcaagcaatggggagtggctgtaaacacagatgaagctttgcttgcttgcctgctgctcacctcctgctgtgcggcccggctcctgatgggccatggacctgtaccgtccaggttggggacttctgctttagactaaagatttttaccactgtatcacagtaacgctatctcagataatcagaccacagaagcaatgcctgttgtggacaagttttctgaatcttaccctgtttatagttaacccactctttatctctttggcttcctgtctggcttctgacttttgcttctggcctctttatttggagtcctatttttagtatggtgttctccaactttccttttgtctccggctgccatttggaggtctttgtagtctttggtaataaactcccatctctagtcctattacaggaattgatgccgatggtaataaccttgaattatgaagatgaggctaaattatagtcaggaaactgaacacatgcaataaattttacagagtttcacatccaaaattgctgaaatattattttggaaaaaaaaaacagatttgatgcttaaatgggcagatcttcagctatttggaaagctcagctcttcagaagaacaaaacctttgaagttcttggataccctttgattactgtactacttgacacacaattggcatcctaatccctagaggaaaacagggtgactatgaaaaggttctcaggtcgtttacatggttgtttggattatttattaggactcttcaggacactgatgttcagtaggaggagagtatgtatgtgtgtacatgtgtgcacacgtgcctgtgaacttacatgtgagcataggcactccaccaggtttggaatccctgggggagcttttacgaagactaaccacagtttccttcaaggggattctgattttccctggaaaggaaaatgagagttgcctcggcacagatgttggtttcaaagagctctcctggtgactcacatgtgtgattgttcagatttggatcttccaattggaattcgcagatttaaaatatagcccaagagttttgagtcattctgtctcataaaaatgccgccaggtattctttttagagtcacaatatgaggctggatggacgtaggataacaattctatacatgagttcagggtttgtcttgtccagagctgcgaaggtctattgtttctctccacctgggatagttaggaaacccatgcttctgttgaagtcactctgagcttgtttaaacctgaaagcttgtgaacttacgattttcattaccctcccctctctacagaacagtgtgtcagaatattaatgaatgataggaaaataaaatctttctttcctgctttctctaacctctttcacgttaacaaactctaaatagcatctactggtgtgatcaagataggcttcccatgtataccaataatggagggaatatgagagggataaagtgtctgaaagatgaagggaaagaggagaaaacaaagatgaaaaacaactgtttttagatagtaacgatctttgccatatttttaaagctttatgccaaaggcagcctttattgcgatatgttcagacaaaactccagtgctctaggaatgcattcaaacccatgatagttgttatagctctcagcccatttgtaaatttgaacacacctttctttgattaagtttcccctgtatgtatgattaaaatcatgaccagaagtatgaggtagagggaaagaaaataggaaggagaattctcttcaagttgaacatcttctatatgggcaagaacacctgctgtcttggagttggataaatccccattttacacatgaagaaatgcttggggaacttaatgacatatctaagggtacccataacttcatggccctaaacaatcctttgggaccaccaaagaatacttatatttaaatttgctaacctcagaggacttggagctctccagtatttctagtttcttctcaccaactcacaccctttcaatagtcatttctcatttaaaaccttaccacctccagaatagtatgattcataccactgtctgggttatctatttgctgcacaacaagcttcaaaatgttgtggcctcaaataataatcattttgttatacttcacaagtttttgtgggtcagaaatttcatcagagcttggctggatattgtcttgctccatgtggctttggctggggtcacttggtagcatttagatgacagttgggctggtctggaggattgatgatggctttgtgcctatgcttggaacttcagtagaatgactggaaggccgggctcagctgggctcctccccctagatagtctcagatgtctccatgtggtgttcccagaagagtagtcttgtttcttacatggggactcaggtgtgcaaatgtctaaggtagaaactgcaagtcctcttaaaaacagcccagaggctgggcatggtggcttacgcatgtaatcccagcactttgagaggctgaggcaggtggatctcttgagcccaggagttcaagcctgggcaacatggtgaaataccatctctactaaaaatacaaaaattacccaggcacagtggcacacacctgtaatcccagctactcaggaggctgaggcaggagaatcgcttgaacccgggaggtggaggttgcagtgagcagagattgcaccactgcactccagcctgggcgacagagccaaattcagtctcaaaaaaaaaaaaaaaaaatagcaggcccagaaatgacacagcatcacttttgccttactctattaatcaaatgaactacagggcagcccagattcaaagggaaaggaaatagatcccatatatcaatgggaaatgtgtcaaagaagttgcagccatctttaatcttggaacactaacccactgtgtaaagtaaagtaatagtcagccgactgtgagtgtgcacctcctggcatcagcatcatacctggtgccagccatctggagataaattagcctccaccttctggttactcagggtcttgtgaagaaatgtacatataagtgatatctgtctatgaataaacatatacccaagatactcttagagcaaaagctggagaattcagagaaatgcctcagaactcattcttgccagaaagggagttgtgagaatttgcaggcaacttgccatcttggttgggctcctttcgtgggcagacatgtaattccaaggaactgagccatatgcctgaatcaagagattcctttgaacccaacaatatttgttgcagagatatctgaatagattagattgaaacaggagtgggtttggttaattggtatgcatagtattacgtcagaacgaccttcctcgtgtttcagtgtgcgtactcacatcccaggatttggtgactacgtctgtcctccccgtttaccttattgaggcagcatggcatagtatgcaatggtatgggcgttgtgacctaagctttcttagtaattcccaattagcttggggtttattatgagggtgaaatgaaataatgtctatgacggccaggtggggagtgcgtgttcaacatgtgttagttcccttcctttgctgtcactgcttagattttgacttctatgtctttgattcctccagtgggaagagctctctcctaagttacctgtgaaagtcagttgccaggttgtttttaagactgatttattagcttcagagcactgaataaagtcatacaaaaataactccctgggggaagcagagtgatgtattaggttcatacatcttacaatatcaggagaaaaagccactaaaatattgccttttcccatggggctgatagtctcaggtgtctccatgtggtcttcccagaacagtaatctgacttcttagatggagattcaagtgtgcaaatgtccaaggcagaagctgcaagtcctcttaaaaactaggcccagaggctgggcgcggtggctcacacctataatcccagcactttgggaggctgaggcaggtggattgcttgagcccaggagttcaagaccagcctgggcaacatggtgaaaatccatctctactaaaaaatacaaaaattagctgggcgcggtggcacatgcctgtaaacccagctactctggaggctgaggcaggagaatcacttgaacccgagaggcagaggttgcagtgagccgagatcacacaatctctgcctcccgggttgcgtcactgttggcgctggtagaatatcatctgccaatgggttcctgttaatcagtagaagagaaatgtgctgaggtgaatttaaaggggaccttagatttcttgactgtggcctgagaaggcatcggcgctgtgcatttctacagagaggcagggcatccagcttcagctgaagccaccgctagcatggcaaagggacccctctctctacagaaaactgtcaagactttggcaagtgaaagtacagatggtcccctatttaagattttttcaactttgtgatggtgtaaaagtgactcaacttacttttgttcatacgtatgatatcaggacacaatcccgttgtaagtcgaggagcatctgtaaaataaaatctgccccccatttgctctgacctctttccttcggattttaatgtctcattgcatttgcatttaaacagtaaccagcttgtcaaatgtgatgaaatgtcatttctagaggctatcggttgcaaggatataaaacagtggtgaaatcctaagtcatttacatccatttagttttgtatagtaaatattaactgatttttcagacttgaggatgatagggtgaattgatgtttatggagcaaaataagtaagggaagatggtagtggggggagtgaatcatcagctacctttactggacattgcatatgtaacatctctgcaacagattttaaaatgcacgttcttaaggtttcatagtgaaagttcagggtagatggcctaggcctaccttttaagggattctgatgctgcaaaattgaaaggtggggtttttgtcataccagggagcacagcactaatggggttaatgaaaattgcctctttttcctaaccctaaacacatgtgcacacacacacacacacacacacacacgcacacacggttcagctttcatttctcatattgcccaagagggtgtaaaataaaaagaggtcagccaaaaaactgtctgttaaattagacttgcaaaaatgctactgacaaacaaacaaacaaacaaaaagtcatactgtgctcctgttgtacataattttacagcatacaatcttcttaatactgatcctagccccggcgccacattggagacatacatagcatagtaacccacctaaaaaaagaataaaaaacaccatgaggtataataaacactttgtttgcacaaggctattaatatctcagggttttttttcaaactgatcaaatggcgtgcttgcctcataaggaaactggattgttaccatttgcattaggttataacattagtcagcagacaagaccccccaaaaagtagaatgaacagcagaccttctccactgtattcaaataaatgttagtgaatatgcaatagtaactaataatcttattcttttttcataatgtgactcagtaacaatattgataattatcgctaatacatgcagtgattactgtgtgctaaggtaggtactggtctcatccttattttacaagtgaggaaactaggatacagtgaagttcagtagcttgcccaggccaggcaggtaggaagaagcagagccaggatttgaacccaggcggtctgaccccagggatcatgctcttgaccatgattccatactagcagaaagaacacagattttggagttgatcagggtgggtgcaaggcatagctttggtcctttggggagtctgaggaagtcatgtcactaacactatttccacaccagtaaaatgcagatgaaagcacctacttggcaaagattttataaggcatagagataatgcatggaaacttctagcacagtatctgtatcctcagcggttactattattatcattacagtttccgagcattgagtttgaactgttgtaagaaacagtgtgaaatttatgatctgctcagaatctgttaaaaatgaatgcttcccctagcccttcttgctgtagggtctgggttcttggttgctgtcccaggagtttgcttcagggtctccttcaagaatattttccactcactcagcttgtggtggttcattaagttgcagatgagcaggccgggcgcggtggctcatgcctgtaattccagcactttgggaggccgaggtgggtggaacacttgaggtcaggagtttgagaccagcctggctaacatggtgaaaccccatttctactataaatataaaaattagccaggcgtggtggcgggcgcctgtaatcccagctactcaggaggctgaggcaggagaatcacttgaacctggtaggcggaatttgcagtgagcccagactgtgtcactgcactccagcctgggcgacagagcgagactctgtctcaaaagaaaaaaaaaaaaaaaaaaaaaaaaagttgcagatgagcatatcagagtgggaaaggaggagacctttgcagccagtcagccctttctctgaacctcagtttttcatctgaaactggagataacatttcttgcctaatgagttcctgtgaggagaacgcctaggttaagtgtctggcacacaagatgcggaaggagtaggttactgtcaggatttttcttgtcatcttgaacatggttcatatttcccctaaggttggcttgtgattctaaaaccactcaacagtggtgtcagtcatctctgcttggatgtggtctgatctgttttctgttaacagtgggacagagcagggttttggggaacagccattgttttatcactgtgtacatttgctttatcaagatgttaagggctgcagtgctgaactgggggctgtgctctgtcttgcttctctttttgaagagtgattacaatgactgactccaataggggtgtctttttatctcatctcctgtcttgttactacctctccctgctccaccaccacacaaataggtttgatatatgcttcccaattgatttttaataaggttccttttttttttcatgttgtaaatgttcagtatgccaactatcctgtaacctcctttagggcaaaagctgtttcaagggagcatgcatgttttttttctcaatgccaacagtactcaggatattttttggaaccccgttctagaactgtggcagagtccagcatacatacttgagaattccccaaaggagacaaatctggatttgcgaaaggtagtgttgatttttgaagactgccaaagttctatggaagaggaaaatgataagtcattcagctgattttactggttcttatatttctgaaagtcagccacctcccatgtctctgctgttactatgcttgtccaagcagttcttgtccctcacctgggccatggcagtggcctcctggttggtccccctgtttccaccctggccccttgatatggtttggctgtgtctccactcaatctcatcttgaattcaaatgtgttgtgggagggactgggtgggaggtaattgaatcatgggagcaagtctttcccatgctgctcttgtgatagtgaataagtctcatgagatctgatggttttaaatagaggtggtcccccgcacaagctctctttctcttctcttgtctgccaccatgtgagatgtgcctttcaccttctgccatgactgtgaggcctccctagccacatggaactgtaagtccaataaacccttttctcttataaattgcccagtcttgcagcagtgcgaaaatggactaatacagtgaattggtatcagtagagtggggtgctgctgaaaagatacccaaaatgtggaagcaactttggaactgggtaacgagcagaggttaaaacagtttggagggctcagaagaagtcaggaaaatgtgggaaagtttggaacttcctagagacctgttgaatggctttgacaaaaatgctgatggtgatatgaacaataaggtctaggctgaggtggtctcagatggagatcaggaacttgttgggaactggagcaaaggtgactctacgctttgttttagcagagacagatggcattttgcccctaccctagagatttgtggaactttgaacttgagacagatgatttagggtatctggtgaaagaaacttctaagcagcaaagcattcaagaggtgacttgggtgctgttaaaggcattcagttttaaaagggaaacagaaaataaaagtttggaaaatttgcagcctgacaatgtaatagaaaagaaaatctcattttctgaggtgaaattgaagctggatgcaaaaatttgcttaagtaatgaggagccaaatgttaatccccaagacaatgggaaaaatgtctccagagcatgccagaggtcttcatggcagcccctcccatcataggcctaaaggcctaagaggaaaatgtggttttgtgggcctggcccagggtccctgtgctgtgtgcaggctagggatttggtgccctgcatcccagccactccagctgtggctgaaaagggccaacatagagcttgggccatggcttcagagggtgcaagccccaagccttggcagcttctacatggtgttgagcctgtgagtgcacagaagtaaagaactggggtttggaaacctctgcctagatttcagaagatgtgtggaaatgcctggatgcccaggcagaagtttgctgtaggggcagggtcctcatggagaacctctgctagggcagtgcagaagcgaaatatggagttggagcccccacacagagtttctactggggcaccacctagtggagctgtgaaaagagggccaccatcttccagaccccagaatggtagatccaccaacagcttgcaccgtatgcctggaaaaatcacaagacactcaacactagcccataaaagcagccaagaggggggctataccttgcaaagccatgggggcagagctgcccaaggccatgggagcccacttcttgcatcagcgtgacctggacttgagacgtggagtctaaggagatcattttggagctttaagattttactgccctgctggatttcagactttcatggggcctacagcccctttgttttgaccaatttctcccatttggaatgactatatttacccaatgcctgtacccccgttgtatctaggaagtaactaacttgcttttgattttataggctcataggcagaagggacttgccttgtctcagatgagactttgtactgtggacttttgagttaatgctgaaatgagttaagactttggggagctgttgagaaggcatgattggttttgaaatgtgaggacatgagatttgggaggggctggggcagaatggtatggtttggctgtgtccccacccagatctcatcttgaatttccatgtgttgtgggagggacctagtgggaggtaattgaatcatgggggcaagtctttcccatgctgttctcgtaatcgtgaataagtctcatgatatcatgataagtctcatgatatgatggttttaaaaagaggcattctgctacacaagctctctctctttgtctgctgccatgcacttaagatgtgactttctcctccttgccttccatcatgattgtgaggcctcctcagccaagtggaactgtaagtccaataaacctttttattttgtaaattgctcagtctcagctatgtctttatcagcagcatgaaaatggactaatacaccccctcagcagctgtttacagcatagcaatcaaagtgattcctgataaaatattggtcagatcaaagtcttctctttaaagctctacagtggcttcgtatctcaccctgagtagaagccaagtccttaccatgacttaggaggctggctctgacctgttccttagtcacccacccctcagccataatttccccctcattcatagggctcccccatttgtcaatgacctctttgctcttcctcagacactgcactcactccttcctgtggcttgtggccactgttccctccacccacagtgcttttcccaactacccatatggttggttctctttatttctttaggtctttccttagagaccacctgctcagggagaccttctttggccaccgtacctaagatctcagagtcgcttttcccaacacatcctagccccaatgtctactgtgcttttctccttgataatcttcattatctgccatatttgatctattccatctttatgttgtttataatcttatctctacctctagccataaactactggagatgtgtctggtccacagtgggtgttcaataagtgttttttaatgaatttaactaaaatgtcaaaataagattcaactataaggaatgtccttcaaataagtatgtaacttataaaggggattctgttgagaaacatcactcatttattcggatttggaaattctgctccatttgttttaaagatatctaaatattgatgaagaaagaaatgtatataactatgcatcttctgtgacttattcagagctaattctgatgaagtatttaatattaatagataataaccatgtaggtaaaaaaataaaataaaattatgtaataaattaatgaaactgatattcttgggtaccccataaacttgatgttttcagaaaaaacaagctctttatttatttatttgggcttgttagtttatagtcacatgccctaaattaaagtgctcacttaaattatagtacaggccacatatgttataggtgccaggaggtaggaatcaagttagaagtctactccccaagttcacatgtgttagtgttaaagtcagagtggaattggaagggggaggtcaaataaaaaattagaagatatggctccagagagcttgaggtcttgtggacagtctttccctcaatggcaggaaataggtaggtcattgtcaaaatttatactgctgggctgtgtggtacagcctcaaagactgtaggaattcagctaagaaaaagacagtacagtcttgatttaattctccttcaaattctaccattacgtattgtactgcacccctctctcgcctggtctatactgatgtggctttagtccagttgaatccttttctcttttgtgtgatttatacctgatggtctcatgaatgctactgagctgcagcatctgacagactttctgttcacacaaaggactccttcatcccttcaacctggagaaatggatttacttgtttatgcacatgtgcattcagcacaaaggttcatctgtaaagtttttttttttaatgaaggaaacaatagggaattataaggtatttcatcacagaggagagacttttctgtgtgtgtgtgcatgtgtgttgtgtgcgtgtatgtgtgtatgtgtgtaacttgaaggcacatctagtgacatttccataaaggtcatcaaaggtctgcgtatgccatactgtatcataatttcacatgggtatgtataatacaggtgtatatcaatgtgtaatactctgtactgtaaagcgaaagagttcacgtagtgatgtaataatgtagctatctgagctccaaagagacttgtattctcagtcttctgaggctgatatgtattccacgggagctgactgaaggccctcgtgaagctcttgccaggtatacattacttacgacctcttagacagatgcaattataaaggagccatgacaattacaggacatggtgatggcagaagcaaggtaagtactgggtgtgttaagccacttctgaaggataatcatgcagtgtgtcggtgtggtaggcacccccaaagtgacccagcataatcaaggaggctacagttagacaggaagagagagctccatttgtgcctccttgaaataaaagccactgtacccagttctgattctctataaagctccactggctattatttggaaattctctttcttgctttctctccctcatttcatttttataatgaaataaatagaaagggtaaaatacagtattaaattgcttattctgtctgataattctttctgtccttcttgatatatataatctctgtggtgggtttctggatgtgtttaaaattccaagaagcagtttttttttttttttatcactataaaagaccgattgttcaggggcttatttgtcacttgatcaaatgtgtctttctaatgaagtctgttaactaataagaatataccaagcagggattgggtaagctgccatgaaaaatactctgtgggggtaataagagagagaaagaacattttttgctttgaaggagctcatagttagattgagcattatactccccacagtataatttatgaatcactactgttagaagtgggattgtgtcccttcccctacacataaaaaaaagatatgttgaagtcataatccccagtactttggaatgtgatctgatttgaaaataggctcattgcagatataattagttgagatgaggtcatcctgcaggagggtgggtccctaatccagtatgactggtgtccttataaaaagacagccatgtgaagactcagtcacagggagcctgccatgtgaagatgaaggcagaaattgaagctatgcaactatagccaaggaacaccaaaaattgccagcaaaccaccagatgctagaagaggcaaagaaggatcctccctggaggcgtcagagagatcatggcccagccaacaccgtgatttcagacttctagcccccagatttgtgacaggataagttagtgttataagtcacccagtttgtggtactttgttactacagttctaggttacccatacacctatcaagccaactctccctaaatcctagtatatattgttagaaaagataaaagggcactgaagagagaggaggatgccttccttccttccttctttctttctttcttcttgttttttttgtttttttgttttctttttttttgtttttgacagagtctcgctctgtcacccaggctggaatgcagtggtacaatcttggctcgctgcagcctcaacctcccaggctcaacagatcctcctgccccagccttttgagtaactgggactacagatgtgcaccaccatgtccagctaatttttaaaaatgttttcatagaggtgaggtctcattatgttgctcagactggtctcaaacttctgggctcaaacgatccttccatctcagcgtcccatagtgctgagattacaggcgtgaggcaccacgcctggccttgttctcccttctaatgaaccagcacatccctattacctggactgtgttctcttagtgctggttttttggatgttcatagtcatccttttacactctcctctctacaggaaatcttccctgacctcatctacctggcaaggatagatgccctgcctgtaacatttcctggtaacctatgaacacatcgttttaagtttttgttgagatgtctatattcccttactacccaatgcactcctttaagaacaggcaccatcttattatcctggggtatacgtataatgcaatgctttgcttacagccagtgcttaatatttgttgaactaaactggaggaagtgaggtataaaataaaatcaaacaaatgaataaatgaggactcaagtgcatacaagatgctcggcaatgaatgaatgactgaacaaacaaattaactgatcatattaaatatttgaatattattagttattattattactttgaatgagggtaaaaggctcctccaaagccaatgaaagccttccagagtatggatgtgggagtgatgtgttggagaatcatttgttcctgctgtaggtaagccaagaaatgctcacaagagtgtgttctctgtgcctgtctgcctgagagaaaatcttggtctttaataacacggttttgacctagagagtcagatttctccaaaattaatcaatgaatatgtattctaccagtgtcagcaaaccaaaatataagggtttgtggggatttaaataagtttatgtttccctctctcttgtatgggcttaatattctattggaggaaatggacatttccacacatccaggattacccttgaagccactatgcgcaagggaccacatgctcagcaaatcccgtagcattgcatggggaactagggaaagggacctgactttagtttagagtgaaagtaagcatgtcattgaaaaactgggcttcaagtttggattagaagagtggaaaggcttgttttgttttgttttttaggagaaaactggaggagggaaaggcattctgatagggttgctagttagaagccaaagtttggaagtttggagtatataatccatgttttagagatattgtttagattaggcttctagggatgaaaggcgcgtgtgagatgataggttggtggccagttgtgttatcaatactgaactaaggaatctggagtttattcactaggcattagaagcctctgaaagtttttgacaaggtagggaacataatcataacaataactcacacgtattgaataccaggcaatgtgactgatgctctccctactccgtgacacttaattttctcgacaaacatacaaggtgcgttttactattccttttcattgatgagagaattatagatccagtaagccatagtttaggcttgtctgactccaaagcctctgcaccttttcgctacgctaatgattttcaaaggcacttggcacagccctatggcttcttcaaagaactctaagggaccactgagtaaatggaatggattgattgtcaggtggcccagatggccaggacccttagtcaatgagtgaaattccacttttttctgctgtataccctgcatatcacagagtgttgatttcagaaatggccaccaggaaggaggtaactaagaagccagcaacaggttctggttttggccttatgattttaacattgttatcaccaacatgatgaagacattggctgcactgttgctagtgctctgtggctccgaagagtagcttatacattgaatagcaaactgaaaattcagagagattccaaaaggctaaaacttgggtcagataatagagttcaacattaacagatatatatgtgtaatttgcatttatgtttgaaaaatgaattatataaatacaggctacagcagtggttctcagagtaatccctggttagcagcttctacatcacctgggaacttgttagaaatgcagattcttgggcctccacctcatcctattaaatcagaggctctggggatggggcttagcaatctgtgttaatgagcactccagatgtttctgaagcaggctaacattggagaccactgggctagaaagaccaaccctcctcccttcttgctttgcattatttctttctctttattccacctcattccagaaaggatttggagtggaaaaatctgacttaacaacagtttgtgaataagaacaaaggttttattttacaaaaaaatttctgtgactcaatgatgtgttgtggctgctgccaaaagtaaatagtttgcattaaaagtagtgaccagaacaagggaagcaatagctactcccctcttcacatttgacaggttctgtatatctccatattctgttagaccatatctggagtttgttgaggaactaattttaagaagacattggaaagggttttaacaaggatggtgacacaccttgaacttttgccttaaagggatcagttgagggaagccacctcttgtgactagagcctgacatggaaaagaaagaattttacatcttgctccagagggcgaaaaacaatattggaaagccttctccactggtattaagagggaaagacattagtccaggctcttcctgaagggctttgttaacacacctaagtgcttcaggcttccgttttttgtttgtttgtttgtttgtttttgttttttatttagttggagtcttgctccatcacggaggctggagtgcagtggtgtgttctcggctcaccacaagctccgtctcctgggttcacgccattctcctgcctcagcctcccgagtagctgggattacaggtgccagccaccacgcccggctaattttttgtatttttagtagagacgggatttcaccgtgttagccaggatggtcttgatctcctgacctcataatctgcccacctcagcctcccaaagtgctaggattacagatgtgagccaccgtgcccgacctggtcttctgtttcttttagaatgcagataataagggccatgatgttcatcccacaagatttctgtgaagggctaaaaacatggcaaaaagttcaaatatttgaaaaactacaatggttgtacaaatatgaggcaatggcgctattattaaggaagactagttgatggaaattttaagtccaagataatggagaatctcaacaatatggattgtccaaaagggggacgacctttctcattaaatagtgagttcacggtcatgagaggcctttagacaaagagatgttagagaatgaactgtatgggattgaagcagatggtttcaaagtgccttgccaatgccagtatttcataatgctgaagtgaatgacttgaggtcaggcagatctgagagactcgtgctcacagccagcagagtgaatgtttgattcatcatttgttcatcactacttgcaagtcactgcaaacatttaaaacatttaaatacatttaaacactgaacacacttaaagatatttaatgattaaacatatttaaagcgttaaaaacattaaatgcatttaaaaacaagatgggcccacactaatgaacctggtgtcaatttttctctacagcactatagttaaattccctttgcattagaagtctgattgaatagccccatggtctcctgtggatctgttgatgtatgaatttggaaagtaacattgaattcccaatgctttcttataactctttgcaatgtctcatagacgtgtaagagatgttgcccttagtgtctaacccaagtcctgagttgttttacagcatttttattttaaggttaagatttcttctggctataattttgcatctagacttctacttgttttttcccccctcaaactattgggtaacatcagtgactttcacctttatccactgcccagttggctgctttccaatggcagagaaatgaatggatgcttttgtgtagggagttgtgtaattcaatgaagagcttggagccttgctgaaggcgatatgtgggtatttcacacatattatatctaatgattatatatcagtaatgtaatgaaggtggcattcaaacatcactgtgggtggcagctaagccaaagacagctaaatcttatttttaatacatgagaagcccccttttctaattcaatcagaaacagttgttggtcagttaaagattaaaaaatcagttaaagccagggattagaaaaacataggagagagaaacagaaagagagagatgcaaaccttaaatttttaaaacttaaaacaaatatatatgtatgtacatatggatgtatacatacacattcacatgctgaggctgagttctttttgtgaaaggccaaggacttttctttgacatggatgtgccaattaccaatccatgtcattttgttttgtataaatcacatttatagtgcatcatctacaatttctatttttatttttctgaagtagagatgtttaaggacaattgctgagcaacctgagtgtaggattcttctaactttttatcgtattatttcttctgtagctgtctctctcacacctaaaattagaaaaaaaattattgtgataaaatatacataatataaacattacagtttaaccatcctttaagtatacaagtcagcagcattaagtacattcaccacaatattgtatagccatcaccactatccatttctagaactttttttatcgccagcagaaactctgtacccattaaacaataccttctaattaccttctacacccctactaacctctaacctctattctgcttcttttttttcttcttatttatttattttattattatactttaagttctagggtacatgtgcacaatgtgcaggtttgttacatatgtatacatgtgccatgttggtgtgctgcacccattaacttgtcatttacattaggtatatctcctaatgctatccctcccctctccccccacctcaggacaagccccagtgtgtgatgttccccttcctgtgtccaagtgttctcattgttcaattcccacctatgagtgagaacatgcggtgtttggttttctgtccttgcgatagtttgctgagaatgatggtttctagcttcatccatgtccctacagaagacatgaactcatcctttttttgactgtgtagtattccatggtgtatatgtgccacattttcttaatccagtctatcattgatgggcatttgggttggttccaagtctttgctattgtgaatagtgccgcaataaacattcgtgtgcatgtgtctttatagcagcatgatttataatcctttgggtatatacccagtaatgggatggctgggtcaaatggtatttctacttctagacccttgaggaattgccacactgtcttccacaatggttgaactagtttacagtcccaccaacagtgtaaaagtgttcctatttctccacatcctctccagcacctgttgtttcctgactttttaatgactgccattctaactggtgtgagatggtatctcattgtggttttgatttgcatttctctgatggccagtgatgatgagcattttttcatgtatctgttggctgcataaatgtcttcttttgagaagtgtctgttcatatcctttgcctactttttgatggggttgtttgattttttcttgtaaatttgtttaagttctttgtagattctggatattagccctttgtcagatgggtagattgcaaaaattttctcccattctgtaggttgcctgttcactttgatggtagtttctttttgctgtgcagaagctctttagtttaattagatcccatttgccaattttggcttttgttgccattgcttttggtgttttagacatgaagtccttgcccatgcccatgtcctgaatggtattgcctgggttttcttctagggcttttatggttttaggtctaacatttaagtctttaatccatcttgaattaatttttgtataaggtgtaaggaagggatccaatttcagctttctacatatggctagccagttttcccagcaccatttattaaatagggaatcctttctccatttcttgtttttgtcaggtttgtcaaagatcagatggtcgtagatgtgtggtgttatttctgagggctctgttctgttccattgatctatatctctgttttggtaccagcaccatgcttttttggttactgtagccttgtagtatagtttgaagtcaggtagcatgatgcttccagctttgttcttttggcttaggtttgtcttggcaatgtgggctcttttttggttccatatgaactttaaagtagttttttccaattctgtgaagaaagccactggtagcttgatggggatggcactgaatctataaattaccttgggcagtatggccattttcacgatattgattctccctatccatgagcatcttttttttttttttttttttttttctgagacagagtcttgctctgtcagccaggctggagtgcagtggcacgatctcagctcactgcaacctccgcctcctgggctcaagcaattttcctgcctcagtctcccgagtagctgggattacaggtgtgtgccacaacacccagctaatttttgtatttttaatagagacggggtttcaccatgttggccaggctggtctcaaactcctgacctcaggtaatccacctgccttggcctcccaaagagctgggattacaggcgtgagccactgtgcctggcctattctgctttttatctctatgaatttgcctatttaaagtaccttttgtaagtggaatcacaatatttgtccttctgtgtcagcttatttcacttagcataatcctcagagttcatccatgtcatgtagcatgtgtctgaattttattctttcttatggctgaataatatcttagtggatgagtgtactacattttgtttatgcattcatctcttgatgagtacttgaattttttcccaccttttgactattgtgagtaatgctgctatgaacattgatgtataagtattgcttgagtgccagctttcagttcttttggctatatatcttaagaatggaatttctggatcatggggtaattcaatgtttgcctttttgaggaactagcaaactgttttccaaaaaactttctttcctataggaacttgtctttatgaagactttccaagacagtcaactggctttcggagaagaaacagctctctttacttttggtcctgcatttcatcagtttctagaccatttaattaacttgcataattacaataacaagtccaagtgtcataagcaggtttagaaatgtatatcatttcatgctttctagggaaaaaaagaaatgtataaaattgatatttgttaagcatacaactcaactggtaagagtggaagtgcttggagagtaactttccccaatgatccccagtgtgctttgggcatcagccaatatatattataaaacacagaattaatggagaatgctggttactctggccagttaaggggaggccagttaagagagcttctactattcaactaaattatctttgtcatgataagatacataaagaggccgggcgtggtagctcaagcctgtaatcctagcactttgggaggctgaggtgggtggctcgagaccagcctgggcaacatggcaaaaccccgtctctactaaaaatataaaaaattagccgggcatgggtggcgcacacctgtagtcccagctactccggagtctgaggcgagagaatcacttgaaccctggaggcggaggttgcagtgagccaagatcacaccactgtactccaacctgggtgatagagtgagaccctgtctcaaaaaaaaaaaaagtataaagaaatttagaagcaaatgactcatgaatctagaaaaacaattaacagctacatatccacaactactaacattcaatactcttgttgtttggagacctgagaaagacagacagcaaaggctaaaatagaatgggaagttgactgatctggtcacttcctgtataaacttttgaatgtaagcagcaggttgattttccatgccttcttctcttacagttcaatttagtgtgggtgataaatgggagataaacagaggatagtgaggttgtgcctattcttaggaagaagatacctttcaagttaagattcaagactttacgatgtgattagaaggttttctagatagttctgaagcaaaatcatgaagctgtaggaggaatacttttatatagcatcattcatccttgttagcaacccaaatgattaaaggtttgggaaattacacctttaaatatggtctaaaggaactgggtttatttagtttagagaaagcaagcaagcacgctgagggggacttaatcatagtctccaagaatatgagggatattctctgagtgatggaaagcagctgtttcctgtttccactaaggactggataagaagaatggagttaacatgcaacaagtgggttaagaactctttggccatgaagttcaagacaacaaatccaccagacaaaagtcgctactgtgtttgagaattatgtagctaactaactgtatttcttgggtggtttatatgtggcctgttcatgagtctggagctagtgaaaaagatccagaggacctttcacccaagtgagaggatgagattgtctgttttctgagcctaccagtgctctgtggttgaggaagctcttatcgtagttctcctagtaggatttaaaagagaaaaagcttcagagtctctttgctgctctttgaactctttccaagtaagataatctaaatgtactccttttctataaggtggaagatttatatagatttggcattatgtgtcttttctgcttatttggtcgatatggccataatttttaaaaattctgtgtctttagtgaaactggacatatatatacacacatatatacatgtatatgtatgtatatgtcatagacatttgacatgtatatcataagtaattaattcagcaatggagacaatgtttagttctaggtagtatgtctaaatgttagctatgtgaataagataatacactgtgctaattagcagcacagaaatatgcaaagcattttgtaaaaatgcactgttgcagattagctaggggaagaatttagagacaaaacgatgagttctgtgaatgttaccagtttttagtcaatgaggcagatcagaatgcctgaaaactgcttctcaaccattgtttttcttattcctgttccatagtaggttaattataccatttattcagaattagataagtgatgtcttactttcccaactgggagtattttcaaggcaaggtttgattcctaggagatggactgctattaagctgtatctttaaagctgtagctttatgccaacattcattgtgtatacgttccactatcttatattttcatcttgtaccagcatttattttaatcttatttaaaaatctttgcctctgtcattgaatgttttcttgactcaataacttgtttggcctttaaaaatccagcactgaagtgggaaaatgactcaggattgagttggatcatctcttcacacttgttcactgggaggcattgggcaagttagttaacctccttgagtttgcttccttaatctaccctacaggaacattttgaggattaaataaaataaaataatgcatgccaagcccagagcatagtgtacccagccctcaagtcatgtttatctgctttctttaattcgcaaagaacatttcttacctatcatagagccattgttgcctccacattctcttcttttagtggaggttttggaccacaggggcagatctgtagaataagtcttgtgtaaaattcatgagggcacccaagggtctaattgtatgaatctccttccttttctatatttacttaatccagaaaaaagtctaccattatggcaagtattttaggaagcgtctgttgccaaattacctgaaacaaatcatgtacacacatggaaggaaagtacattttcagatgagtggaaagatgatgcatttttgttttacaaggtttaaaggatagttaataaatcttctagatactgaaataaacatttaatagatattgattcaattgagtgctatggtttgaaacgatatcaaattgaagacatgatccctgacctgggaagttttatgaatttgctggagagaccaagcccataggtatggaatgaccacaaaacagagtagtacaaaaatccggaagagtagtacaaaaatgacagcttgaacccctaagtactgaggaaaggcagcatacagggtttcagtagggatttactatagtagacttagaatcatgatttagttcctaaaaccactatcatttcaaaatagaatttttttaaaaccacctaaaatattcacttcctttcgaaacctaggaacatactacagttgcgctttactcatttgagataaatacacctttcttgaaatgttaactttttctttatttttttttgtttttgagaggcaatcccactctgtcacccaggctggagtgcagtaatgccacctcggctcactgcaacctccgtctcccgggttcgggtgattgtcctgcttcagcctcccgagtagctgggattacaggcgcccaccactgtgcctggctaatttttgtgtttagtagagacagggttttaccatgttggccaggctggtcttgaactcctgacttcaagtgatccgtccaactcagcctcccaaagtgctgggattacggtgagccaccacgcccagcctgagataaatacatcttcctaaagcctcagtgtttaggctggtttgctttcagatattcatctatgcaccataccaaactacttctgctgagattcattctgagtctgcaggggatggaatacctttataaatcataacaaatcacattaagagtaaaatatcccagctagggacttacctcaaaagctgaggcatgacacatattttaatggcaatggatttggaaaccaaggttaggaccgttctttctttattagaaggagatttataattcagggcctttgagagtgagcctgggtcctctgaactggacttctcctcttgtcccttcctgtaccccaactccccaaattaaataagtagggaagcagaacaagaaaaccattaacttaatagcatagaatttatggctgaaatcttgcaaagcttatgtcagcaaagtaaaataattactgtcactttcttttagacacttggctttatggttcctgtcacctttatcataacatgcagctgatttagtagctattttttcatggcaaatagcctggtgttgtgtttttatgcatgtgaccatgcaattgagatgacaatgcatggctatactacagtagagctaaatttaggtaatgaattagaacactgttaatagttttggtttagtcatgctgtcagaatgccaactcagccttttctcttgctctttttcccctccagattctcaagtccaaagatttaacatctccaacccagcgctacatcgacagcaaagttgtgaaaacaagagcagaaggcgaatggctctccttcgatgtaactgatgctgttcatgaatggcttcaccataaaggttacaagccactctctcttttcctcccaagatgttcagtatccctaagttactttaaattgattgcagatttaagggtatagacacacatacaaatgacctccttgacttaatgttttccagacaggaacctgggatttaaaataagcttacactgtccctgctgcacttttgtaccatctaataattacatcatcccaaataaaagtgaagaactagaagcaagatttgcaggtaaccaaaacttggtcatatgaggtgggggagggaagggtctatattgataatctcatgggggataaaatcagtttgcatgtgaaaatgagactggtaaggcctggggagtttcattcatttggacagtgatatggttggatatacatatgtgaagggagaaaggattggaagaacggaataggttcccagtttataattctcaatgcccagtgatgacttggtcaataataactgattaactcattaaccctccagtagtaagttaaggcctttgttcttcattgtagcaaaccaactttccatctatactgatattatagagaaagatagaatgtgtttaagaaaattcattgataatcccccaaaccaaatgtcaggaactgacaaccgtatttcacagaagaaaggagtctcctcctgctacagcttccataactaaccttccatgtataagaacattccaccttttctagtccatacccagtatttcaagtgggttccttatcagaattttatattagtttataaacacataaaaatgttttggctttccccacgcttacctttaagtaagttggacaaaagtcatggagagtgaggcgataccaagggctcaagtcacttcatgtattagatgatgagttgttggatgatgagaggtgagaggaaatccatgcctatgtgccgatacagcatctgcccacaatgccaggccagagaattgatttccctgccctcctaacatcacccaggacctccatccacttttagaagactacagcagcccttgctcatggaaaaatactcccagaggtctagagatttatttcagtctctaacctagtcatgattctctggagtgtggagattaaatgcttaaactggcagtctcttgagcatgctttggggagctcaagtttctaaatctcagatggaatcaggaaagtgttgaggatgccataaaataaatgaaaaagccctttcttcacagcttcccaaaatagcattaggtaagggtgacttctgtttcacttgaacctaattcactccaattcagttaagtctcagtttatgttcattaggaaagtcttttgagtttagtagtcttaggaagagtgtgaaccagcgggtgacaaggcatgttctattgccatgtgttcagttgttgagggcttgaacgcagcctaaactgaggattgactaaaataaactgcctagattgcccttggactataggtcaaagactgcttctgtagtgactttcataaccaacagccctggctttgacaccgaactgccttctgacaagagccccatttagaagtgttaattgtcacgtgggttagtcgtagtcctgttgtgccatatctatttccatggggaataactgttgccagctgatgctgctttggtggtcatcactgctatttgtgacaatatacaaaggaaaaaaatatggctgactatatttgatgaaggtgaagctaaatgtttattacccaaatgcattttttcaaggtattgatggcacctccacatataccagtggtgatcagaaaactataaagtccactaggaaaaaaaacagtgggaagaccccacatctcctgctaatgttattgccctcctacagacttgagtcacaacagaccaaccggcggaagaagcgtgctttggatgcggcctattgctttaggtaaaggaaagaaaagtaaaaccaagtaattgcatctgttaactcttaaactgcctttgccctttcttttactgtgtattgacccaagtggaactcactgctaaggccagatagagtgcagtacagctcctgtgtctcataataccattcttcccagaggcttatattcatcaggtctttagcagtgaaccaagtgtgaagggagaaaactagccccctgaattttttccccaaaattcctctgaagttctttggtgctgaagaagaaaacaagctctctgctcctcagaacaaataaaagcttatttgaggtgtgtgatgtcaactccttaattaagaaagacccaccatctggatgatgccttcatcctcaccaagtccaagtgctgatagtcacacttctttcatagtaacagagatgagacagcagaagaatgccgtgtgtcacacctttagcaacagcatatgagagaagcaagaagaatttatttcccattcccacatgagtgcatggagggagaatgtgaatgttcttatgtggtctcagtaagaggagggctctttccttattttgagaggtacaggacagggaagggtcctcactgatgaagtgctcaaaatgtcagaggccatgagtaaagtggcactttttggttgccagatccagtggttgccctcagcaagactccatgtttcttgatctctggttcattcctagatcagagaacatgtggtgaaacaaaggatcaattctcaaaggaaaatgccttagatggttgtttgaaaattgctgttgtacttctttcattttatatttgaaagggcaatagaggctggatggcagaactgcccagtgttgattggaaagggcttcatcatgcccagccactctctgcttatatctggtcatctgaaggtaaatgtatgattttccaggtcacagacaaggaagtcagggtatagaactcataagggcaagtagtccagcaaatcaccaccacatacaacaccctatcatgaaagtcacttgagattacaataaagccattaaaacctggcccatgatatttgctcattagatgtttgttgaataaatgaatgaatcatttttctggtttggggtgaggtggtggtagagtgagggtggtgaatcagctttaaaatctccattgctttttttttttttttttaacagaaatgtgcaggataattgctgcctacgtccactttacattgatttcaagagggatctagggtggaaatggatacacgaacccaaagggtacaatgccaacttctgtgctggagcatgcccgtatttatggagttcagacactcagcacagcagggtgagtgttcagcttacctgttgcctctgttcttgggttaccatgtgcacctgctgatagtatttccaaatgagttgtaattaacctcgtgctgtcttaccatcacacatgtatgggtactggagaaaaatctttcattaggttggtgcaaaagtattcgcagtttttgccattgaaaataatggcaagaaactcccctaatagatgaggaggaagaatgttaactgtaggtgaaatcagaaagtgacactgatcggttacaaaccataagtctcacctgcccagttattaacaactggagggaagttttgtttacttttttctttattttatattctttttcaaaaacaatttttattgatacataattgcatatattaatgaggtacatgtgatattttgatacatgtatacaatgtgtaatgatgaaatcagggtaattaggatatccattgcctcaaaaatttatcatttcctcatttggggaacattccagatcatctcttctagttactttaaaatagacaataaattattgttaactatagtaaccctactgtgctataaaacattagaatttattccttctatctaactgtattttcatacctattaatcaacttctcttcacccttaccctgttcccagcctctggtaaccatcattctactctctgcctccataagttttatattcttaacagctataagcataaatagccaagaaaacaccctttttagaatcaatatgtcacatagtatcatatatagataaagtgtgaagggacccaggtctccatctaaaaaaaaaatctgctatcatctccatcagagactgttatattagaaagaacattggggatttcagttaatgcctgggagtgtgtgattattagtaaatacactatcaatttactaatgtatgacagaatgtaatttaacatctctaaacctcagtttcttatcagtaagaaggaatgtctgtattaaaagttatctttaaaataataatgccaaactcaagagttgatatgaagtacgaaagatgatatacatgaaaatgacttgaaaattcgtttctctactttttttttaatgtaacacaaagtaaatgagaatctgagtattttatcaagttgtttcaatgaagacagagttgattcagaaggtaattcccagattggatggtatgagtttccggcaagattagagaagagtttttctatgtaataatgatatttgttcacatgcttcctcttgatggctcatcaggattttagagatagaaaggacatcttatccaacgctttcattttcttaaagaaattggggaccgggcgcagtgactcatgcctgtatttccagcacttcgggaggccgaggcaggtggatcacgaggtcaggagttcaagaccagcctggtcaagatgatgaaaccccgtctctactaaaaatacaaaaaaattaaccaggcatggtggcgggtgcctgcaatcccagctactcgggaggttgaggcagagaatcgcttgaacccaggaggcggaggttgcagtgagccgagatcgcaccactgcactccagcctgggtggcagagtgagatcctgtctcaaaaaaaaaaaaaaaaaaaagaaattggggtctagatcatgtagtctagatgatacccaaaaccaaacagaaaattagtgacaaaccaaggcttggcatgcaggcctccttgttttataaccaggcctccatttgctctatcttagtgggtttaattcctaaaatatggttacacgttagggtttctattctgctctttatgcctctgtaaatctccctattaaagaagcattagaaaaattgccttcactgcagggtaggaaaatggatcagctgccaaaaaagatcacatactacattcagctgaattcatgagtttgggggttatcaattattttagacaatctgtattataaaaaattcctctttagttcatatgaaaactcatgtgttcagggagcataaagtatatttatttataaatacctacatatgctggaatttaaattgacaaatacggctcctcttccttcagctgttttcccaactcccctgtagactttggcactcgggggcgaccgtgtgcttggccatgtgagggaagcttgctcatgcctgtccctttgtctgagctctctggccaggctgcctcctctgggctgcggcagcagtagctgtaatgtgggcaaggccctgttgccaagtagaaacataattctcctctctgatacacagagggagtgtgtgaaggctgagaccatgcttgtttttcaaggagagaggaagaataactgtcatggtcacaaatatgtggtttggacagttacccaagaagccagaggtagcttaataaagtagtcagtgttgctgtgctgaacagatcttctgtcttaggctgaaaaaattgcagtgaatctcgaggaaaaggtcacttgctgtttgactaacacattaatggcatccttggaaatgtctctgtatcatcagtggggaacctacatacttccattagtaaaagtctcacacccctctgatacagaatggggttgaaggtgtaaggctaattatagaaccgtctcttcattctgttttcagacttgccattaactcctccaactcagcaactaccatttaccgcataggttagtggagggttgattatgattgtgattatgattatgatcgttttaagcaaaatgtaagaaagtgaataattatttcttataggagatcttagagatcacttttatgtcatttctagcatcactgtgtttatgaagcaatggtaaaaaaacaggcttttttttttttaatgaaaattgaggataccttaaattggcctgaggagacacttaacgtagaaagatttcatttccttccttccttatttatttatttaaagaaacagggtctgggtctgttgtccaagctggtcctgaactcctacactcaagtgatccttcaaagtgttgggattacaggcgtgagccaccgtgcccagcctgtagaaagatttcacattgcatacaggtgtctttttctatacccaaaggtagattaaagctcttatgagagctttgataaaactttttattcttctacttattcatgtattcatttcttcacttagtacatgaatctcattttgtccagagaagacttactagggccacaagataaaagcaaagtctgtagagttcctgatctggagggagctcttaatctagatgggattgaaatgtatactcaagaaacaacttcatttacagagtagtgtagaaataagaccaaatgctataaggatcaagttttgtggggacctaggatgtatgtgcagccaagcactgatcagaggaaagacttactggaaaaaccgggaaaaatctgttgaatgagcaattttttccaatctgactcttacagaatcatttgcttaagatgtgtggaaaacgagttccgtgtgggaaaataatgactttggtgattgctaaggtcacatatcagtttgactgtaatttaggaaattagcaaccaaaaataattttaaattgcctactcagtgctgtgactgctaacaatgtggaattctttttaaaaacgaattgcgttcattttccgtctttccctatgttgtctctcctctcctgtgtcctttcaggtcctgagcttatataataccataaatccagaagcatctgcttctccttgctgcgtgtcccaagatttagaacctctaaccattctctactacattggcaaaacacccaagattgaacagctttctaatatgattgtaaagtcttgcaaatgcagctaaaattcttggaaaagtggcaagaccaaaatgacaatgatgatgataatgatgatgacgacgacaacgatgatgcttgtaacaagaaaacataagagagccttggttcatcagtgttaaaaaatttttgaaaaggcggtactagttcagacactttggaagtttgtgttctgtttgttaaaactggcatctgacacaaaaaaagttgaaggccttattctacatttcacctactttgtaagtgagagagacaagaagcaaattttttttaaagaaaaaaataaacactggaagaatttattagtgttaattatgtgaacaacgacaacaacaacaacaacaacaaccacaacaaacaggaaaatcccattaagtggagttgctgtacgtaccgttcctatcccgcgcctcacttgatttttctgtattgctatgcaataggcacccttcccattcttactcttagagttaacagtgagttatttattgtgtgttactatataatgaacgtttcattgcccttggaaaataaaacaggtgtataaagtggagaccaaatactttgccagaaactcatggatggcttaaggaacttgaactcaaacgagccagaaaaaaagaggtcatattaatgggatgaaaacccaagtgagttattatatgaccgagaaagtctgcattaagataaagaccctgaaaacacatgttatgtatcagctgcctaaggaagcttcttgtaaggtccaaaaactaaaaagactgttaataaaagaaactttcagtcagaataagtctgtaagtttttttttttctttttaattgtaaatggttctttgtcagtttagtaaaccagtgaaatgttgaaatgttttgacatgtactggtcaaacttcagaccttaaaatattgctgtatagctatgctataggttttttcctttgttttggtatatgtaaccatacctatattattaaaatagatggatatagaagccagcataattgaaaacacatctgcagatctcttttgcaaactattaaatcaaaacattaactactttatgtgtaatgtgtaaatttttaccatattttttatattctgtaataatgtcaactatgatttagattgacttaaatttgggctctttttaatgatcactcacaaatgtatgtttcttttagctggccagtacttttgagtaaagcccctatagtttgacttgcactacaaatgcattttttttttaataacatttgccctacttgtgct

SEQ ID NO: 25111 - DNA, 1197 bp, Homo Sapiens
  misc_feature (47)..(47): n is a, c, g, or t
  misc_feature (49)..(49): n is a, c, g, or t
gaaggtcagcgtgtgaagtaggcgctggcaacgcggggttaccctgntntattgaggagtaacggcccagcggaccacccaggcttgaggcagcggcgggaaccactcggtttgctgcgataccatggaaggaggcgggggaagcggcaacaaaaccacagggggattggccggctttttcggagccggcggagcaggttactcgcacgcggatttggctggcgtcccgctaactggtatgaaccctctgtctccttatttaaatgtggatccacgatacctcgtgcaggatacagatgagtttattttacctaccggagctaataaaacccggggcagatttgagctggccttctttacgattggaggatgttgcatgacaggggctgcgtttggtgcaatgaatggtcttcggctaggattgaaggaaacccagaacatggcctggtccaaaccaagaaatgtacagattttgaatatggtgactaggcaaggggcactttgggctaatactctaggttctctggctttgctctatagtgcatttggtgtcatcattgagaaaacacgaggtgcagaagatgaccttaacacagtagcagctggaaccatgacaggcatgttgtataaatgtacaggtggtcttcgagggatagcacgaggtggtctgacaggactaacacttaccagcctctatgcactatataataactgggagcacatgaaaggctccttgctccaacagtcactctgaagattttgccaactcatgaatggaggacacttcagtagtcatctagatccttttataagacagtttggagttattctctctcttctacctacaattagtttgaaaaattggagattttgatttgctgtgatgaaaatcctggatggctgaccaagactggcacttgttccagccattagtgagttgaagccaaagcccttgggtgactcactgagtaccatggttctgttctcctctggagatcttgcacgtatctgttttcctcccccatgaactagaaaaccacttactcccagaattcaggtcgtgcttgttagtactatatcaccaagtccattcatttaatgatccaaaactgtaatgtgcactgtattccaaataaagggtaaaaacagaaccaaagttataactccaaaaaaaaaaaaaaaaaaaaaaaaaaaaaa

SEQ ID NO: 25112 - DNA, 2355 bp, Homo Sapiens
gcagaggaggcggcggaacaccccgggttggtcgggtttccaagggctgacccgagctccagcactttttccgcgcctgatttttcagagctcttcagaaaccaggctgctttcaggaacattgctgtggattcccagggcctattccactagaagcaagatggctgaactcaatactcatgtgaatgtcaaggaaaagatctatgcagttagatcagttgttcccaacaaaagcaataatgaaatagtcctggtgctccaacagtttgattttaatgtggataaagccgtgcaagcctttgtggatggcagtgcaattcaagttctaaaagaatggaatatgacaggaaaaaagaagaacaataaaagaaaaagaagcaagtccaagcagcatcaaggcaacaaagatgctaaagacaaggtggagaggcctgaggcagggcccctgcagccgcagccaccacagattcaaaacggccccatgaatggctgcgagaaggacagctcgtccacagattctgctaacgaaaaaccagcccttatccctcgtgagaaaaagatctcgatacttgaggaaccttcaaaggcacttcgtggggtcacagaaggcaacagactactgcaacagaaactatccttagatgggaaccccaaacctatacatggaacaacagagaggtcagatggcctacagtggtcagctgagcagccttgtaacccaagcaagcctaaggcaaaaacatctcctgttaagtccaatacccctgcagctcatcttgaaataaagccagatgagttggcaaagaaaagaggcccaaatattgagaaatcagtgaaggatttgcaacgctgcaccgtttctctaactagatatcgcgtcatgattaaggaagaagtggatagttccgtgaagaagatcaaagctgcctttgctgaattacacaactgcatcattgacaaagaagtttcattaatggcagaaatggataaagttaaagaagaagccatggaaatcctgactgctcgtcagaagaaagcagaagaactaaagagactcactaaccttgccagtcagatggcagagatgcagctggccgaactcagggcagaaattaagcactttgtcagcgagcgtaaatatgacgaggagctcgggaaagctgcccggttttcctgtgacatcgaacagctgaaggcccaaatcatgctctgcggagaaattacacatccaaagaacaactattcctcaagaactccctgcagctccctgctgcctctgctgaatgcgcacgcagcaacctctgggaaacagagtaacttttcccgaaaatcatccactcacaataagccctctgaaggcaaagcggcaaaccccaaaatggtgagcagtctccccagcaccgccgacccctctcaccagaccatgccggccaacaagcagaatggatcttctaaccaaagacggagatttaatccacagtatcataacaacaggctaaatgggcctgccaagtcgcagggcagtgggaatgaagccgagccactgggaaagggcaacagccgccacgaacacagaagacagccgcacaacggcttccggcccaaaaacaaaggcggtgccaaaaatcaagaggcttccttggggatgaagacccccgaggccccggcccattctgaaaagccccggcgaaggcagcacgctgcagacacctcggaggccaggcccttccggggtagtgtcggtagggtttcacagtgcaatctctgccccacgagaatagaagtttccacagatgcagcagttctctcagtcccggctgtgacgttggtggcctgagctaggaggaaaaagagcagttttcactcagttttggttccctgcccgaggtgctgacccaattcgctgccaaaagagtgtcaatcagaatatacaaatcccgtatggttgtgtcatcctctcttaatcatttttactaattctaataatcagctctagcttgcttcataattttcatggctttgcttgatctgttgatgctttctctcatcaagactttgcagcattttagccaggcagtatttactcattattaggaaaatcaagatgtggctgaagatcagaggctcagttagcaacctgtgttgtagcagtgatgtcagtccatagattgtctttagagagttaatgttacaaaaaagaattcttaataatcagacaaacatgatctgctgaggacacatgcgcttttgtagaatttaacatctggtgtttttctgaaaaaatatatatacatatattgctttatttgaaacaaattaaaatatgctgcatttgaaaaaaaaaaaaaaaaaaaa

SEQ ID NO: 25113 - DNA, 3769 bp, Homo Sapiens
ggggtcctgcagcctcccgagtgcggagaggcggggccgcccgctgccgcccggctgcctgcgccccctcccgcggccccggctctgggagcggggcgccccgcgcgcgggcacacggcggccagagcgccgaggcggtaccttcagcctgcaatgagaggaacccgggagagcccccgggagccagcgaagagcttggctgctgcgtccagggctgctgctgccgccgcggctgcttgaaactcctcaaagttgagagccggctagagggtgccgcccgccgggagccggagggaaaggaagtcgggaggtgcaagagtgacagacacggacagacggacgcgcagaccttcggaaggcactgcgtaggcagcctccccggagcccacgaggctccccagcaccgttcactggtgggaggctgagccggtggaaaagacaccgggaagagactcagaggcgaccataatgtcgttacgtgtacacactctgcccaccctgcttggagccgtcgtcagaccgggctgcagggagctgctgtgtttgctgatgatcacagtgactgtgggccctggtgcctctggggtgtgccccaccgcttgcatctgtgccactgacatcgtcagctgcaccaacaaaaacctgtccaaggtgcctgggaaccttttcagactgattaagagactggacctgagttataacagaattgggcttctggattctgagtggattccagtatcgtttgcaaagctgaacaccctaattcttcgtcataacaacatcaccagcatttccacgggcagtttttccacaactccaaatttgaagtgtcttgacttatcgtccaataagctgaagacggtgaaaaatgctgtattccaagagttgaaggttctggaagtgcttctgctttacaacaatcacatatcctatctcgatccttcagcgtttggagggctctcccagttgcagaaactctacttaagtggaaattttctcacacagtttccgatggatttgtatgttggaaggttcaagctggcagaactgatgtttttagatgtttcttataaccgaattccttccatgccaatgcaccacataaatttagtgccaggaaaacagctgagaggcatctaccttcatggaaacccatttgtctgtgactgttccctgtactccttgctggtcttttggtatcgtaggcactttagctcagtgatggattttaagaacgattacacctgtcgcctgtggtctgactccaggcactcgcgtcaggtacttctgctccaggatagctttatgaattgctctgacagcatcatcaatggttcctttcgtgcgcttggctttattcatgaggctcaggtcggggaaagactgatggtccactgtgacagcaagacaggtaatgcaaatacggatttcatctgggtgggtccagataacagactgctagagccggataaagagatggaaaacttttacgtgtttcacaatggaagtctggttatagaaagccctcgttttgaggatgctggagtgtattcttgtatcgcaatgaataagcaacgcctgttaaatgaaactgtggacgtcacaataaatgtgagcaatttcactgtaagcagatcccatgctcatgaggcatttaacacagcttttaccactcttgctgcttgcgtggccagtatcgttttggtacttttgtacctctatctgactccatgcccctgcaagtgtaaaaccaagagacagaaaaatatgctacaccaaagcaatgcccattcatcgattctcagtcctggccccgctagtgatgcctccgctgatgaacggaaggcaggtgcaggtaaaagagtggtgtttttggaacccctgaaggatactgcagcagggcagaacgggaaagtcaggctctttcccagcgaggcagtgatagctgagggcatcctaaagtccacgagggggaaatctgactcagattcagtcaattcagtgttttctgacacaccttttgtggcgtccacttaatttgtgcctatatttgtatgatgtcataatttaatctgttcatatttaactttgtgtgtggtctgcaaaataaacagcaggacagaaattgtgttgttttgttctttgaaatacaaccaaattctcttaaaatgattggtaggaaatgaggtaaagtacttcagttcctcaatgtgccagagaaagatggggttgttttccaaagtttaagttctagatcacaatatcttagcttttagcactattggtaatttcagagtaggcccaaaggtgatatgactcccattgtccctttatttaggatattgaaagaaaaaataaactttatgtattagtgtcctttaaaaatagactttgctaacttactagtaccagagttattttaaagaaaaacactagtgtccaatttcatttttaaaagatgtagaaagaagaatcaagcatcaattaattataaagcctaaagcaaagttagatttgggggttattcagccaaaattaccgttttagaccagaatgaatagactacactgataaaatgtactggataatgccacatcctatatggtgttatagaaatagtgcaaggaaagtacatttgtttgcctgtcttttcattttgtacattcttcccattctgtattcttgtacaaaagatctcattgaaaatttaaagtcatcataatttgttgccataaatatgtaagtgtcaataccaaaatgtctgagtaacttcttaaatccctgttctagcaaactaatattggttcatgtgcttgtgtatatgtaaatcttaaattatgtgaactattaaatagaccctactgtactgtgctttggacatttgaattaatgtaaatatatgtaatctgtgacttgatattttgttttatttggctatttaaaaacataaatctaaaatgtcttatgttatcagattatgctattttgtataaagcaccactgatagcaaatctctctccaaaattcttatagtaaagttgatttttttaaagggggaggggaaggctttaatgtgttctagatcaatttataccttccgtatgacgttttactctgatatcattgtgcactttagccagatccagaaaacactcaaatttattttgcaacaagtgagagcccaggagacctccttattatcctgtctctgctttgaggcaatcaagtaccctctctgaacctaggttccctcatctgtaaaacaaaggtttcagaccagatggtgtttaaggtttctccccatactggaatgaatgatttcttggtggtattagcatcatcacagacctatacttgctttctgaaactctaccacatactgaaggaatacaggaatgggattaagatgactagcatagcagtgtacagcttgaagagatgttccacatcatcactccagctccttctcttttctcagggacaaatgaggcccagagagaatacgacctgtgtaaggtcaaacagtggcagggaaagaaggagagctggggtttagcattctccctggtgaagattggaggtccaaagaaatgactcctttttaagggatgggcataaaaaagtgatcaaaacattgcaaaggagaatcaaagattgattgtcctggggctaagaaagaagataatttttaaagaatgggagtgggcaacagtgaaaaatattgcagataagtagataaggatagaagatcaaccactgactggtagta

SEQ ID NO: 25114 - DNA, 4784 bp, Homo Sapiens
gaggcgacactgagtctccaagtccggagaggtgcccgagggaaaagaggcggcagctaaactggtcctggagagaagccccttccgcccctctcctcagccagcatgtcccggactccgccgctcctcagtccgcgcggtggggaccccgggccgtggcggccggcgcagccctgacgggttgcgaaccagggggcgccccgaacgcgggggttggggtctgggagcgcgagcggccgctacggtacgagcggggtgtgctgagtcccgtggccacccccggccccagccatgaggagggacgagcgagacgccaaagccatgcggtccctgcagccgccggatggggccggctcgccccccgagagtctgaggaacggctacgtgaagagctgcgtgagccccttgcggcaggaccctccgcgcggcttcttcttccacctctgccgcttctgcaacgtggagctgcggccgccgccggcctctccccagcagccgcggcgctgctcccccttctgccgggcgcgcctctcgctgggcgccctggctgcctttgtcctcgccctgctgctgggcgcggaacccgagagctgggctgccggggccgcctggctgcggacgctgctgagcgtgtgttcgcacagcttgagccccctcttcagcatcgcctgtgccttcttcttcctcacctgcttcctcacccggaccaagcggggacccggcccgggccggagctgcggctcctggtggctgctggcgctgcccgcctgctgttacctgggggacttcttggtgtggcagtggtggtcttggccttggggggatggcgacgcagggtccgcggccccgcacacgcccccggaggcggcagcgggcaggttgctgctggtgctgagctgcgtagggctgctgctgacgctcgcgcacccgctgcggctccggcactgcgttctggtgctgctcctggccagcttcgtctggtgggtctccttcaccagcctcgggtcgctgccctccgccctcaggccgctgctctccggcctggtggggggcgctggctgcctgctggccctggggttggatcacttctttcaaatcagggaagcgcctcttcatcctcgactgtccagtgccgccgaagaaaaagtgcctgtgatccgaccccggaggaggtccagctgcgtgtcgttaggagaaactgcagccagttactatggcagttgcaaaatattcaggagaccgtcgttgccttgtatttccagagaacagatgattctttgggattgggacttaaaacaatggtataagcctcattatcaaaattctggaggtggaaatggagttgatctttcagtgctaaatgaggctcgcaatatggtgtcagatcttctgactgatccaagccttccaccacaagtcatttcctctctacggagtattagtagcttaatgggtgctttctcaggttcctgtaggccaaagattaatcctctcacaccatttcctggattttacccctgttctgaaatagaggacccagctgagaaaggggatagaaaacttaacaagggactaaataggaatagtttgccaactccacagctgaggagaagctcaggaacttcaggattgctacctgttgaacagtcttcaaggtgggatcgtaataatggcaaaaggcctcaccaagaatttggcatttcaagtcaaggatgctatctaaatgggccttttaattcaaatctactgactatcccgaagcaaaggtcatcttctgtatcactgactcaccatgtaggtctcagaagagctggtgttttgtccagtctgagtcctgtgaattcttccaaccatggaccagtgtctactggctctctaactaatcgatcacccatagaatttcctgatactgctgattttcttaataagccaagcgttatcttgcagagatctctgggcaatgcacctaatactccagatttttatcagcaacttagaaattctgatagcaatctgtgtaacagctgtggacatcaaatgctgaaatatgtttcaacatctgaatcagatggtacagattgctgcagtggaaaatcaggtgaagaagaaaacattttctcgaaagaatcattcaaacttatggaaactcaacaagaagaggaaacagagaagaaagacagcagaaaattatttcaggaaggtgataagtggctaacagaagaggcacagagtgaacagcaaacaaatattgaacaggaagtatcactggacctgattttagtagaagagtatgactcattaatagaaaagatgagcaactggaattttccaatttttgaacttgtagaaaagatgggagagaaatcaggaaggattctcagtcaggttatgtataccttatttcaagacactggtttattggaaatatttaaaattcccactcaacaatttatgaactattttcgtgcattagaaaatggctatcgagacattccttatcacaatcgtatacatgccacagatgtgctacatgcagtttggtatctgacaacacggccagttcctggcttacagcagatccacaatggttgtggaacaggaaatgaaacagattctgatggtagaattaaccatgggcgaattgcttatatttcttcgaagagctgctctaatcctgatgagagttatggctgcctgtcttcaaacattcctgcattagaattgatggctctatacgtggcagctgccatgcatgattatgatcacccagggaggacaaatgcatttctagtggctacaaatgcccctcaggcagttttatacaatgacagatctgttctggaaaatcatcatgctgcgtcagcttggaatctatatctttctcgcccagaatacaacttccttcttcatcttgatcatgtggaattcaagcgctttcgttttttagtcattgaagcaatccttgctacggatcttaaaaagcattttgattttctcgcagaattcaatgccaaggcaaatgatgtaaatagtaatggcatagaatggagtaatgaaaatgatcgcctcttggtatgccaggtgtgcatcaaactggcagatataaatggcccagcaaaagttcgagacttgcatttgaaatggacagaaggcattgtcaatgaattttatgagcagggagatgaagaagcaaatcttggtctgcccatcagtccattcatggatcgttcttctcctcaactagcaaaactccaagaatcttttatcacccacatagtgggtcccctgtgtaactcctatgatgctgctggtttgctaccaggtcagtggttagaagcagaagaggataatgatactgaaagtggtgatgatgaagacggtgaagaattagatacagaagatgaagaaatggaaaacaatctaaatccaaaaccaccaagaaggaaaagcagacggcgaatattttgtcagctaatgcaccacctcactgaaaaccacaagatatggaaggaaatcgtagaggaagaagaaaaatgtaaagctgatgggaataaactgcaggtggagaattcctccttacctcaagcagatgagattcaggtaattgaagaggcagatgaagaggaatagcgacagtttgagtaaaagaaaagtcatattgaagaagcccagagggttgtgcccaggggcagaaatcattgcctagtgttcaccggctgactctcaactgaccattcccatgtggacaggccttaatactgtgagaggatccttgctctgctggcagtttcccactcctatgcactttcacaggaactagaaaactattcttaaaccaaaaataccatccgtgttgacccatgttgcagagcccttacttaaatccttcactggtgtatgaatactttgtcataatgctgctttgctgggtagtgagctcttatttttcactgggggtcagctataactaaaaactcaagtgacatatttcagttaccaaagtggccaggaactttttgcttttatgaaaatagattcatattgtatttcccagtgtgtcttttatgtctttgaatgttttggagaaaagtctatgcctgtctaaaaatgaatccagtgttgcctttctgagggatttctgctcaatgcaatacactgttcagtgctattctcccagctaggtttatccatgaaggactgagtgacctttgttgtatttaacaaaatccaggtgcatcaatttctgatgctttttactattgtgtattatctactatgtgtgttttatttctgctgagagtattcaggtttgccatggacatcagaagtttgaattccagtcttatcttatgttccatggctgaattttaaagctgtttaggtttaacaatgaagggatttattctttagtcaaaattgttgtttttactctagctcaggattcgtatttttaaagatttagttaatataaacacagcacagatttgtcagaagaaaaaaaatttgctgtaataccaaaactaacctcatcaaagatacagaaaaaaagaaatatagtgagccctaaaggacacatacattgaataaataattggaacatgtggttatctttagatccacatcttagctgtcatttgttcactctaaaactgatgttcatctttctgttaatttccctctgcctaaagagtacatgacagaaatgacctatcactacttattatttctgaagcctaactgcaagagtgatttcttgagaacaagtaaagaactggctcgtgccg

SEQ ID NO: 25115 - DNA, 410 bp, Homo Sapiens
gaattgggcccgacgtcgcatgctcccggccgccatggcggccgcgggaattcgattagcgtggtcgcggccgaggtccccaagtcagaaagactctgcctctaactttctggggcttggggatgaagataaagtgttacacccagtgtttgtccaccacagtctgtggggcagagagacccttcctgggactgaattctcaatttgaagcactgttgttcaaagatctcccttctgggtctgacaagaagaaacataacccttatttattgcattcttctggcttacatacattgccctcactaatcaatggacatttcagcatttcattactaattttgagagaaggccaccatggaatttaataaaaatattattaaaaaaaaaaaaaaaaaaaaaaaaaaaaaaaa

SEQ ID NO: 25116 - DNA, 678 bp, Homo Sapiens
  misc_feature (203)..(203): n is a, c, g, or t
tttcagagacagggtcttgctatgttgcccaggctggactcaaactcctgggctcaagcgattcttccgccccagcctcctgagtggctgagactacaggtgtgtgccactgtgcccagcaagattttaaaaaatacgtatgcccggacaccactctaaaccaactaaatgagaatcagatatcgtgaagtcactaatcattntgctcctgggtctttatgacagttttgctcctgggaaactcctgggaatgtggtagagagagagaaagagatgggaaaataagattttaagaagtgttgctatgcattttgaaaataatttttatttggtgtttgtcttgagggaaggcggtaaacatttcaattgcctttaagtgtgcttggatgctggaacgatggttctttgaatgcagcgtcaaactggcattgggtcacatggcagccagcattaacctttatgccacatttataaaacatgaatgtcatgagcccactctcagagaccttataatttggagggttaggtcagatccacaaatctcttctatctcatggtaaaggaaacctggcgtgtagcaggagatggtgtgataacaataacatatcgcatgatcagtatttgtattcttcttagcaatattaaactttttgacctcctcaaaaaaaaaaaaaaaaa

SEQ ID NO: 25117 - DNA, 3859 bp, Homo Sapiens
gcccgagggccgcagcgccggggccggcgatgagcgcgaggagccggcatgagcgcagacagcagccctctcgtgggcagcacgcccaccggttatgggaccctgacgatagggacatcaatagatcccctcagctcctcagtttcatccgtgaggctcagcggctactgtggcagtccatggagggtcatcggctatcacgtcgtggtctggatgatggctgggatccctttgctgctcttccgttggaagcccctgtggggggtgcggctgcggctccggccctgcaacctggcccacgccgaaacactcgttatcgaaataagagacaaagaggatagttcctggcagctcttcactgtccaggtgcagactgaggccatcggcgagggcagcctggagccgtccccacagtcccaggcagaggatggccggagccaggcggcagttggggcggtaccagagggtgcctggaaggatacggcccagctccacaagagcgaggaggcgaagcgggtgctgcggtattacctcttccagggccagcgctatatctggatcgagacccagcaagccttctaccaggtcagcctcctggaccatggccgctcttgtgacgacgtccaccgctcccgccatggcctcagcctccaggaccaaatggtgaggaaggccatttacggccccaacgtgatcagcataccggtcaagtcctacccccagctgctggtggacgaggcactgaacccctactatgggttccaggccttcagcatcgcgctgtggctggctgaccactactactggtacgccctgtgcatcttcctcatttcctccatctccatctgcctgtcgctgtacaagaccagaaagcaaagccagactctaagggacatggtcaagttgtccatgcgggtgtgcgtgtgccggccagggggagaggaagagtgggtggactccagtgagctagtgcccggagactgcctggtgctgccccaggagggtgggctgatgccctgtgatgccgccctggtggccggcgagtgcatggtgaatgagagctctctgacaggagagagcattccagtgctgaagacggcactgccggaggggctggggccctactgtgcagagacacaccggcggcacacactcttctgcgggaccctcatcttgcaggcccgggcctatgtgggaccgcacgtcctggcagtggtgacccgcacagggttctgcacggcaaaagggggcctggtgagctccatcttgcacccccggcccatcaacttcaagttctataaacacagcatgaagtttgtggctgccctctctgtcctggctctcctcggcaccatctacagcatcttcatcctctaccgaaaccgggtgcctctgaatgagattgtaatccgggctctcgacctggtgaccgtggtggtgccacctgccctgcctgctgccatgactgtgtgcacgctctacgcccagagccgactgcggagacagggcattttctgcatccacccactgcgcatcaacctggggggcaagctgcagctggtgtgtttcgacaagacgggcaccctcactgaggacggcttagacgtgatgggggtggtgcccctgaaggggcaggcattcctgcccctggtcccagagcctcgccgcctgcctgtggggcccctgctccgagcactggccacctgccatgccctcagccggctccaggacacccccgtgggcgaccccatggacttgaagatggtggagtctactggctgggtcctggaggaagagccggctgcagactcagcatttgggacccaggtcttggcagtgatgagacctccactttgggagccccagctgcaggcaatggaggagcccccggtgccagtcagcgtcctccaccgcttccccttctcttcggctctgcagcgcatgagtgtggtggtggcgtggccaggggccactcagcccgaggcctacgtcaaaggctccccggagctggtggcagggctctgcaaccccgagacagtgcccaccgacttcgcccagatgctgcagagctatacagctgctggctaccgtgtcgtggccctggccagcaagccactgcccactgtgcccagcctggaggcagcccagcaactgacgagggacactgtggaaggagacctgagcctcctggggctgctggtcatgaggaacctactgaagccgcagacaacgccagttatccaggctctgcgaaggacccgcatccgcgccgtcatggtgacaggggacaacctgcagacagcggtgactgtggcccggggctgtggcatggtggccccccaggagcatctgatcatcgtccacgccacccaccctgagcggggtcagcctgcctctctcgagttcctgccgatggagtcccccacagccgtgaatggcgttaaggatcctgaccaggctgcaagctacaccgtggagccagacccccgatccaggcacctggccctcagcgggcccacctttggtatcattgtgaagcacttccccaagctgctgcccaaggtcctggtccagggcactgtctttgcccgcatggcccctgagcagaagacagagctggtgtgcgagctacagaagcttcagtactgcgtgggcatgtgcggagacggtgccaatgactgtggggccctgaaggcggctgatgtcggcatctcgctgtcccaggcagaagcctcagtggtctcacccttcacctcgagcatggccagtattgagtgcgtgcccatggtcatcagggaggggcgctgttctcttgacacttcgttcagcgtcttcaagtacatggctctgtacagcctgacccagttcatctccgtcctgatcctctacacgatcaacaccaacctgggtgacctgcagttcctggccatcgacctggtcatcaccaccacagtggcagtgctcatgagccgcacggggccagcgctggtcctgggacgggtacggccaccgggggcgctgctcagcgtgcccgtgctcagcagcctgctgctgcagatggtcctggtgaccggcgtgcagctagggggctacttcctgaccctggcccagccatggttcgtgcctctgaacaggacagtggccgcaccagacaacctgcccaactacgagaacaccgtggtcttctctctgtccagcttccagtacctcatcctggctgcagctgtgtccaagggggcgcccttccgccggccgctctacaccaatgtgcccttcctggtggccctggcgctcctgagctccgtcctggtgggccttgtcctggtccccggcctcctgcaggggccgctggcgctgaggaacatcactgacaccggcttcaagctgctgctgctgggtctggtcaccctcaacttcgtgggggccttcatgctggagagcgtgctagaccagtgcctccccgcctgcctgcgccgcctccggcccaagcgggcctccaagaagcgcttcaagcagctggaacgagagctggccgagcagccctggccaccgctgcccgccggccccctgaggtagtgcaggcccacgggcaccccagacactggaactccctgcctctgagccaccaactggacccctctccagcaacaccaccgccaccacctcccacatccctgaggttggcgactgtctacactcctcccccgagaccacccccaccctggggaagcgttgactactgtcccctaccttggaccatcccgcgtaggggtggcagcccccagctcccctcagtgctgctgtcagtgtagcaaataaagtcatgatattttcctggcaaaaaaaaaaaaaaaaaaaa

SEQ ID NO: 25118 - DNA, 1323 bp, Homo Sapiens
atgcgtccccacctgtcgccgccgctgcagcagctactactgccggtgctgctcgcctgcgccgcgcactcgactggagcccttccccgactatgtgacgtgctacaagtgctgtgggaagagcaagaccagtgcctgcaggaactctccagagagcagacaggagacctgggcacggagcagccagtgccaggttgtgaggggatgtgggacaacataagctgctggccctcttctgtgccgggccggatggtggaggtggaatgcccgagattcctccggatgctcaccagcagaaatggttccttgttccgaaactgcacacaggatggctggtcagaaaccttccccaggcctaatctggcctgtggcgttaatgtgaacgactcttccaacgagaagcggcactcctacctgctgaagctgaaagtcatgtacaccgtgggctacagctcctccctggtcatgctcctggtcgcccttggcatcctctgtgctttccggaggctccactgcactcgcaactacatccacatgcacctgttcgtgtccttcatccttcgtgccctgtccaacttcatcaaggacgccgtgctcttctcctcagatgatgtcacctactgcgatgcccacagggcgggctgcaagctggtcatggtgctgttccagtactgcatcatggccaactactcctggctgctggtggaaggcctctaccttcacacactcctcgccatctccttcttctctgaaagaaagtacctccagggatttgtggcattcggatggggttctccagccatttttgttgctttgtgggctattgccagacactttctggaagatgttgggtgctgggacatcaatgccaacgcatccatctggtggatcattcgtggtcctgtgatcctctccatcctgattaatttcatccttttcataaacattctaagaatcctgatgagaaaacttagaacccaagaaacaagaggaaatgaagtcagccattataagcgcctggccaggtccactctcctgctgatccccctctttggcatccactacatcgtcttcgccttctccccagaggacgctatggagatccagctgttttttgaactagcccttggctcattccagggactggtggtggccgtcctctactgcttcctcaatggggaggtgcagctggaggttcagaagaagtggcagcaatggcacctccgtgagttcccactgcaccccgtggcctccttcagcaacagcaccaaggccagccacttggagcagagccagggcacctgcaggaccagcatcatctga

SEQ ID NO: 25119 - DNA, 3715 bp, Homo Sapiens
  misc_feature (2556)..(2556): n is a, c, g, or t
gaattccgaatcatgtgcagaatgctgaatcttcccccagccaggacgaataagacagcgcggaaaagcagattctcgtaattctggaattgcatgttgcaaggagtctcctggatcttcgcacccagcttcgggtagggagggagtccgggtcccgggctaggccagcccggcaggtggagagggtccccggcagccccgcgcgcccctggccatgtctttaatgccctgccccttcatgtggccttctgagggttcccagggctggccagggttgtttcccacccgcgcgcgcgctctcacccccagccaaacccacctggcagggctccctccagccgagaccttttgattcccggctcccgcgctcccgcctccgcgccagcccgggaggtggccctggacagccggacctcgcccggccccggctgggaccatggtgtttctctcgggaaatgcttccgacagctccaactgcacccaaccgccggcaccggtgaacatttccaaggccattctgctcggggtgatcttggggggcctcattcttttcggggtgctgggtaacatcctagtgatcctctccgtagcctgtcaccgacacctgcactcagtcacgcactactacatcgtcaacctggcggtggccgacctcctgctcacctccacggtgctgcccttctccgccatcttcgaggtcctaggctactgggccttcggcagggtcttctgcaacatctgggcggcagtggatgtgctgtgctgcaccgcgtccatcatgggcctctgcatcatctccatcgaccgctacatcggcgtgagctacccgctgcgctacccaaccatcgtcacccagaggaggggtctcatggctctgctctgcgtctgggcactctccctggtcatatccattggacccctgttcggctggaggcagccggcccccgaggacgagaccatctgccagatcaacgaggagccgggctacgtgctcttctcagcgctgggctccttctacctgcctctggccatcatcctggtcatgtactgccgcgtctacgtggtggccaagagggagagccggggcctcaagtctggcctcaagaccgacaagtcggactcggagcaagtgacgctccgcatccatcggaaaaacgccccggcaggaggcagcgggatggccagcgccaagaccaagacgcacttctcagtgaggctcctcaagttctcccgggagaagaaagcggccaaaacgctgggcatcgtggtcggctgcttcgtcctctgctggctgccttttttcttagtcatgcccattggtaagtcttgaacacccctcactttagcatctgggggtcttcaccctcctcggcttctgttaccccagactcccagtccgggatggaagaggaaggattagcatttcaaacagcacagctctagggcaattagaaaaggctcccttgtagaaaagtgaattttcattctctttctactccagtctcatttatattaggtcctagagcactttttcgactgtaaagtggcttccaactgatgcagattaattggtctctttaataagaatgtcaacttttcttaatgcctataagcacgtgttcaatttaaacgcatctgctctctctagtctcagagtctccaccaagtgcttaggctgactgtggaatgccattttcactctgctacagaatgcaaattctcttggcgtgaaaatagtactatcagaatggaatttaaccattttattgtggttttgtttagttagacttgaaagccattctgtaaatgaactctctagggggataaatgattaaatagttcctgttggtttgtgcagtgacctctcctgttccctcctgctttgattctcttttggggcaaatatttgttcagctgattacaggagggacaggattccattactgcagacacaccctctgaggcatctccaagtagggattgaggctgcttgcccactttgcctgactattgtctttggccagtggtcctaataccaggtgggttgttgccagctataaacaaaaggcagtctgggagaggtgcctggtctgctaaccagcctctgcagaaggctacccctaccagagaattgccagctgcccagtggtgcatatgaaagaggtcttagacacagcaactctgggtaagtttattaaatctccatggggttgaaattccatcttccatctctttgcttaagaatcatcagagcctgttggacaacataccacatgtcacttcctcttggtgaacagaagggatgtgtgtggaaaaaccagttatatcacaaccatttctgagcacacattctctccctaaggccagggagtaaagaacatttgactcaggatcctttgaacctgggtagaaggtacccgcccccttcctctcaggtattatcctgttccaagctgcaccgactggctactgtggtggtggcatcgggtaattatcctggagactgcggctgggagatccttaagggtaggagttatgggatattgtaatcagggntatgttctaaatttagcatccctacaggaaaggggaaggaaattagtttttattgagtacctgttaagtagtaggcactgtgttaggtcctctacttatgcaaccagtgttttttgagcatctactgtgaagctagcagtgtattaggtgctggccataagccacgcatggtaccttccttcatggaaacggcatgctgtttcatatattctacagtaaccttccaaggaaggtgagtttattcccagtttacacatgaaggtctttgtgcctaagtgactgaccccaggtgtccttcagccagttaagtgtttgaatgagaatttacaccaaggttggcataattctaaagccaacacttttcatcctatcaagttgtccagggagtaataaagtgacctagacatgctggcccagaaagccagagatgctgttgggccaagcaaaccatgcctgtgaaggtgctcactctggactgataactggctttgttcaggtagctatgggaaggatagttggcagtagcaggttcccagaggcgtgttggtagcctcagattctggcactggtaaaactcagacatggcaggtttcaagtgggcatcagggttttgcccagagtgagctgcttattaattttttcttttttttttttttttttgagacggagtctcgctcttgttgcctaggctggagtgcagtggcgcgatctcagctcactgcagcctctgcctcccgggttcaagtgattctcctgcctcagcctcccaagtagctgggattacaggcatgcgccaccacacctggctaattttgtatttttagtagagatggggtttctccatgttggtcaagctggtttcaaactcccaacctcaggtgatccgcctgcctcagcctcccaaaatgctgggattacaggcatgaaccaccgtgcctggccccggccaattttttcattgttaaaaccctctcaggccctgccaatagatgacagtggtgtgcgtgtggggagaaggtggcctgccccaggtatctttacttagtggtggagtgatgcttcaaggactgaaagtgtagacccttagccagattactgcctgcctggagtcacctgatgaaatgctgaacctgttcggctgtcttgtccccggaattcg

SEQ ID NO: 25120 - DNA, 6099 bp, Homo Sapiens
gatctgggtacccgtagctgttgtcaccggggtgaattggcttcttccctcaaaaggggcagacaacgctggggtcttaactcgtccccgctttatgcttgtgggaggcagtttttcaggatttccttctcgaccccccttccccccccccccatatacttgtctagctctgagccaatagctatcaggccgagagaaataaagacggtaaagtgttgaggactgggacacaggttgggtccagttgatggggagcggaggcttttccttcatcatttgcctccgcttccccctttcttttcgtccggcccccagctgattccgcgccgcttagattgggaggggaaagagcaccgaagaagcttcgaggatctggtggcagcaaatgcacacattcctccagactacctccttaaaatttgtgagagaattggtcctttactagataaagagatccctcagagtgttcctggggtacagacattattaggtgttggtcggcagtctctgctacgggatgccaaagactgtaagagtacactatggaatgggtctgcttttgcggctctgcatagaggcagacctccagaactacctgtaaattatgtgaaacctccaaatgtggttaaaatggccagtggatctgcctttgcctgaaagaaagacttcattgctcttaaaatttgaatatcacctctgccaggcaattaaccggctgtagtcgctttggtcatattttcccttcatctgcttaccagcacattaagatgcataagagaattctggggcacttgtcatctgtctactgtgtagcatttgaccgaagcgggagaagaatttttacaggttccgatgactgtttagtaaaaatttgggctacagatgatggacgccttcttgctacacttcgtggacactctgctgaaatttctgacatggctgttaactatgaaaacactcttattgctgcaggcagctgtgataaggtagtaagagtatggtgtcttcgaacttgtgcacccgttgcagtccttcagggccattcagcttctattacttccatacagagatcgcccggtgaaatttactgagagatccagacctggagtccagatatcttgttcatctttcagttctggtggtatgttcattacaactggtagtactgaccatgtgattagaatatattatttgggttctgaggttcctgagaaaattgctgaattagagtcacatacggataaagttgttgctgttcagttctgtaacaatggagacagaatgacaagataatgaaaaatgataatcccaatattgccaagggttttgggaaaatggacacttctacaactcgtgatgagattataaattattaaaaaaacttttcggggaaacaatttggcatttaagatttgttagtggaagtcgagatggaacggcaagaatttggcagtatcagcaacaagaatggaagagtatagtgctagacatggctactaaaatgactggcaataatttgccatctggagaagacaagatcactaaacttaaggtgactatggtggcctgggatcgctatgataccacagttattactgcagtgaacaattttcttttgaaagtgtggaattctatcacaggacagcttcttcatacattatctggacatgatgatgaagtattcgttctagaagcccatccatttgatcaaaggatcatactttcagcaggtcatgatgggaacatttttatttgggaccttgaccgggggaccaaaattcggaattactttaacatgattgaaggccaaggccatggtgcggtgtttgattgtaaattttcaccagatggaaaccattttgcctgcacagattctcatggacatttgctgctttttggttttggatgcagtaaatactacgaaaagattccagatcagatgttcttccacacggattatcgtcctcttattcgtgatgccaataactatgtattggatgaacaaacccaacaagctcctcacctcatgcctcctccatttttggtggatgttgatggaaatcctcatcccacaaaattccaacggttggtaccaggacgggaaaattgtaaagatgaacagcttataccacagctgggatatgtggctaatggtgatggtgaggtagtagaacaggtaattgggcagcaaaccaatgaccaagatgagagcattcttgatggaataatcagggagctgcagagagaacaagacctgagactaattaatgaaggagatgttccacatttaccagttaatagagcatactctgttaatggtgctctgagaagtccaaacatggacatatcttcttccccaaacatcaggcttcgaagacatagtagtcaaattgaaggtgttagacaaatgcataacaatgctcctcggagccagatggccactgaaagagatctcatggcgtggagcagaagagtggtggtcaatgaactaaataatggggttagtagggtacaggaagaatgtcgaactgcaaaaggtgacatagaaatcagtctttatacagttgaaaagaagaaaaagccatcttacactactcaaaggaatgattatgagcctagctgtgggcgttctttacgcaggacacagcgcaaacgtcagcatacttaccaaacacggtccaacatagagcataattcacaggcatcatgtcaaaattcaggtgtacaggaagactcagacagttcttcagaggaagatgaaactgttggcacaagtgacgcttcggtagaggatcctgttgttgaatggcaaagtgaaagttcttccagtgactcatcaagtgaatattctgattggacagcagatgctggaataaatttacaacccccaaaaagacaaaccagacagacaacacgtaaaatatgcagcagctctgatgaggaaaatttgaagtccctagaagaaaggcagaagaaacctaagcagactagaaagaagaaaggaggactggtttctatagcaggtgagcctaatgaagaatggtttgcccctcagtggatcttggatactataccccgacgttccccatttgtcccacaaatgggagatgagcttatctattttaggcaaggacatgaagcttatgttcgggctgtaaggaaatcgaaaatatacagtgttaatttacaaaaacagccatggaacaaaatggatctcagggagcaagagtttgttaagattgtaggaatcaaatatgaggttggcccacccacactgtgctgcttgaagcttgcatttctggacccaatttcaggcaaaatgactggagaatctttttccattaagtatcatgacatgccggatgtcattgacttccttgtgctacatcagttttataatgaagccaaagaaaggaactggcagattggtgatagattccgcagtataatagatgacgcctggtggtttgggactgtggagagtcagcagccttttcaaccagagtatcctgatagttctttccagtgttacagtgttcactgggacaataatgagagagaaaagatgagcccatgggatatggagccaattccagaaggaactgcctttccagatgaagttggtgctggtgttcctgtctcccaggaagaattgactgctttgctatacaaaccccaggaaggagagtggggggctcattccagagacgaagaatgtgaacgggttattcagggcatcaaccaccttctttccctggattttgccagcccttttgctgttccagtggatctcagtgcctaccccttgtattgtactgtagttgcttatccaactgacctcaataccatcaggcggagacttgaaaatcgcttttacaggagaatatcagcattaatgtgggaggtacgctatattgaacataatgccaggactttcaatgagccagacagtcctatagttaaagcagctaaaattgtaactgatgtcttacttcgatttattggggatcagagctgtactgatatactggatacttataataaaattaaagcagaagaacgaaacagtactgatgcagaggaggatacagaaattgttgatttagattcagacggtcctggtacttcatctggaagaagggtcaaatgccgaggcagaagacagtctttaaagtgtaatcctgatgcttggaaaaaacaatgcaaggaactattgagcctcatttatgaacgtgaagactcggagccatttcgacagccagctgatcttctttcttacccaggtcatcaggagcaagagggagaatcctcagagtctgttgttccagaaagacaacaagattcatctctttctgaggattatcaagatgttatagatactcctgtggacttcagcactgtgaaagaaactttggaagcaggaaactatggtagtcctctggaattttataaggatgttcgccaaatattcaacaactccaaagcttatacctctaataaaaagtcaaggatctatagcatgatgctgcgattatctgccttatttgaaagtcatatcaaaaatatcatctctgaatataagtcagcaatccagagtcagaagaggagaaggccacggtacagaaaacgtctaagaagcagcagcagttcattatctagtagtggagcacctagtccaaaagggaagcagaaacaaatgaagttgcagcctaaaaatgaccagaatacctcagtatctcatgccaggactagctctcctttctcatctcctgtttcagatgctgctgaagggctttcactatatctacttgatgatgagccagatgggccattttcttcatcgagcttcggtggatatagccgaagtggaaatagccatgacccagggaaagccaaatcatttcggaatagagttttgccagttaaacaagatcactcccttgatggaccccttacaaatggtgatggcagagagccccggacaggaatcaagagaaaactacttagtgcatcagaagaagatgaaaacatgggaggagaagataaagagaaaaaagaaacaaaagagaaatctcatttatccacctcagagagtggagagttaggatccagtttaagttctgaaagtacctgtggttctgactctgactctgaatcaacttccagaacagatcaagattacgtagatggagaccatgattatagcaaattcatacaaaccagacctaaaagaaaactcagaaagcaacatggcaatggaaaaagaaattggaagaccagaggcacaggaggaagaggcagatggggaagatggggtagatggagtagaggaggcagaggaagaggaggcaggggacgagggagtcgaggaagaggtggaggtggcactagggggaggggaagagggagaggaggaagaggtgcttctagaggagctaccagagccaaacgagcacgtattgcagatgatgaatttgataccatgttttcaggacgtttcagtagactgcctcgaattaaaacaagaaaccaaggcaggaggactgttttatataatgatgattctgataatgacaattttgtgtccactgaggatcctctgaatcttggtacatccagatcaggcagagtgcgtaaaatgacagaaaaagccagggttagccatctcatgggatggaattattaacagttaataaatttagaataacttaaaaaattcaatggccttctactgcagggaatttaccaggaaatctacaaagcaagttgtgtggggacttctgcttcctttcacattggtgcttttccatttatgccagtatacatttgtttcaagacttttgatctccacacttcatttgttcaaataagccttactcattaggccttaaattaaaagaaattctgcccacacacacacaaacacatacacacacatacacacacacagacacacacacacgaaacacaacacagacactacagatttactacattaaaggagcattcagcttcttaagagtagcatgacatttttatctcaatagaatagccctcttttgcttttgtatcacagaagtatagcaccttcttacagag

SEQ ID NO: 25121 - DNA, 1638 bp, Homo Sapiens
caaatgcctggccgctgtcagagtgacgccgcgatgagagtaaacgggccagcatcccgtgcaccagcggggtggaccagcgggagtctgcacacaggcccccgagcaggacgccctcgtgcgcaggcgcggggtgtacgtgggcggggcctcctcctccggccccgcccagcgaaggagcttcctcttccgaggaaaggcggggcctgggcgcccgcgggaaacccgggcccgttgcatccgctgggtgtagccgtggggatggcaggttcggggaggctggtcctacggccctggattcgggagctgattctggggtcagagacaccctccagtccacgagccgggcagctgcttgaggtactacaggacgccgaggccgcggtcgcgggcccatcccacgcccctgatacgtccgacgtcggggccacgctgcttgtgtctgacgggacccacagtgtccgatgcctggtgacgcgggaggccctggacacctcggactgggaggagaaggagttcggcttccgcgggacagagggccggctgctgctgctgcaggactgcggggttcatgtccaggtcgctgagggcggcgcgcccgcagagttctatctccaggtggaccgcttcagcctgctgcccacggagcagccccggctacgggtgcctggttgcaaccaagacttagatgttcagaaaaagctctatgactgccttgaggagcacctttcagagtccacctcgtccaatgcaggcctatcactgtcccagcttctggatgaaatgcgggaggaccaggagcatcagggggcactcgtgtgcctggctgaaagctgcctgacactggagggcccttgcacagcaccccctgtcacccactgggctgcctcacgatgcaaggccacgggagaagctgtgtacactgtccccagctcaatgctgtgcatctctgagaatgaccagctaattctgagctctctaggcccctgtcagaggacacagggccctgagctgcccccaccagacccggctctgcaggacctatctctgaccctcatagcctctcctccttcctcacccagttcctcaggaaccccggccttacccggccacatgtcatccgaggaaagtggtaccagcatcagccttctgcctgccctgtccttggctgctccagacccagggcagagaagcagctcccagccctcaccagccatctgctcagcccctgccaccctgacccccaggtccccacacgccagccgtacccccagctccccactccagagctgcactcccagtctctcaccccgtagccatgtccccagtccacaccaggctcttgtgaccaggccccagaaacctagcctggagttcaaggagtttgtagggttgccctgcaagaatcggccgccttttcccaggaccggagctaccaggggagcccaggagccctgctctgtctgggaacccccaaagaggcatcgtgatggttctgccttccagtatgagtatgagccaccctgcacgtccctctgtgctcgggtccaagctgccaggcttcctccccagctcatggcctgggccttgcactttctgatggatgcacagccagggtctgagccaactccgatgtga

SEQ ID NO: 25122 - DNA, 59753 bp, Homo Sapiens
tctatttccccactgggatagtacagaagagggagcaagaactcatcatcaaagagaactgagacttaggcgtaccattctaaaaagcccttgttccttgtctcccttgcctctcccgcccccctcagctctgcagtaattcctcagagattgtacagtctctccactttaaatataaatatataaatataaatatatatatgtataaacttccccctgtctttctctcctctcttttttttaattttctataataaagtttcctattggataaggtcagctccctgatttatgcctggttcctattggaagctcacaggggctgacatcacttaggaaagcgaagggggtagggctgccagatcagtttgtcaccacccaggctcccttgcctttggctgggtgcaacttccattttaggtgttggatctgagggggaaaaaaaagagagagggagagagagagaaagaagagcaggaaagatcccgaaaggaggaagaggtggcgaaaaatcaactgccctgctggatttgtctttctcagcaccttggcgaagccttgggtttctttcttaaaggactgatttttagaactccacatttgaggtgtgtggcttttgaagaaaatgtatgtactgacgggaaaaggaggataagcaagtcgaatttttgtcttacggtaaccggagggaattaaaaaacgggagagtctgttatgctgatgagtaacttttaagcaattatttttcttttctactttcagtactttggcgggggagattttggtattttattatatttaaaaaggtaaaatatacaagacctagaaacaaacttctaggtctctttaatacaggaagctgaatagatccagaggggtaagagcaggtttgaaaatttacattttggtgtgttctttgattttatttatttatttttctggattaagctaacatatttctgttttcagagcccaaatcaaaagttggttttttggcatgttgcatgtgggttgggaaagaaatttgtccgtgtcggaacccagttataccgatggttcttcatatgtttaaaactttttttttcttttatcattggatttgtggaagtggaaagttgcagggagctttgcagtgtaaatggtattgtttttcccccagagagtttgaacggcccgtatcggtttcagccctgctgttcctgggtggatccctcttacttttccaggtgcggtgggtgggagcctcattctcctgctagatgtagtctcccttctttggcttataaaagaaaacaaatggaaccatgttaactgaattgccatctccttcttccttctaaactacctttgatagcaaagatttgtggaggtgtttgttaaatctgcaaatacgataacgtttggtttatgtgtttaaagggataaggaaattctaatcatgctttttatttcacctgagtaaagtggcaacatacctgaaaatattttcagctttttgcactctgaaagggccaagggtggaataaaattaggtttagaaaaaccatttatacaaagtttagtgtttaaaatacatttcagaaaacaagggagatttttatttttaaaccaacctgaaagttgttttttggagttgaatttattgtttagttaatttaccatgaaatctgaaatctcttagagctgaaggcccatgactgtgctttcatatcttatatttaatcttaagatttgttttgtttttgcaaatacattcttgcaaaagtacggattctagataattatatagccaactcatcagtagctgaaaaactagggtattctcttctctttttgaaaatgtgaatccgcctgaaaattatagatgctgtcctaattgtaacaagatgggctttagtgtgtaagctgctcattagctttaaactggtatggatctttaataatctgatttcgttctcccctcacccccctgccacaaatttttttaagactagacttccttgaatttcttttctagaatgagggtatttcttgaaagacgatttcatccttgtgaagttgtggcttcaggaggaaacagaactttgttcctccttcaaatacaacctaggcaaaggctgcaggaaatttttgatgtctgaatctcataattataacaagtacagttaaaaagaaagaaaaaatacaatgtgtataggctgttgaactgtagttcttgtttaatattttccaaattttctttcaaatgttctctctgccttgactccagcctggggaggtttcttggatctttagagtgttggtcatgttgcttccagagtgtctgtttcccactcaacctttagggggagggatgagggaatctgaaggaggagtacaaaggcagtttgaaaataggttctggatgactgagtggtggtgatttgggtctagctttaaatagtgggctttgtgtagctgaagtgagcatcctagttaacctagtgtccaggactatttccacgaactaagggttgttttgactggtgtgtagtacagagcctttggggtgataagatggaagatttgtcttttacctcacctccactggttctttcaggaattataagggatgcagataagtaaatcttttattttttaaattttttgttttgctcattgtcttggttttggggtaaaaaatgatgataggtaagtatgagctgttcagatatttctttccttgtttgcctcctatgtacggttggtttctttgttatgtgagtaaggtagtggtctgtgttccagattgcggggcgggggggcggttctcttttaggtggttggagttctagtacctttctcagggttccagcatggacagtcagagaagctccaacatgttctctgagctagggtaaaattgagactattggtgatattaacaaaaagaaaagcactaagtaattacaatccagccttaggtttatgaagtagctgctctccagggatgaatgagataggatggatgcaaataaattaagcatagatcactatcaattggaataacaaaatgattagctttgtataatttatctccttctattttggtaccctgttagtaactgccaaggccctcattcccccctacctccccacaccttgtttttagtgtattctaagcattttgcataaactattaatttcccaccactggtttttttgtttgttttgttttttaaggaatttgaccctcagagaagctgaggtttggtgaaaatctcactgcctgtaaatggttgaggccaggattaaccctggtctgactaactacaaagtccatggacttaaccactaatatactgccattctccagagagaatggaaacaacagctcgaactaaaacgagcccttgctagaggcaggagtgtttcatcttggcacaggggcagtactcacttaaatttccaactccctccaactccccactacccttgttgggataatgtatgcaaaagatctattttccatagagcccatggggagctggatgtgctagaatggatattattttaatctttagaacgagaatctttccatatccatatgcccaccattgctgtcctaatttcttaaacttcctggaattgtgtcacacgttgtttatcagtaaaatttcttcttccagagaatttgttaggtatgtggtttggaatgataggatatcatcaacttgcagggacaggcttgtaggaggtagttcagatattcttgtctttccctctagactatgagcagcttgggtgtaggtactgtcttatctctgtatctttttagcacctgtcttagtgtttggtacatactgaggtgctcagtaagccttggttaaataaggcatttgatgagaatcagtgagggactgatttgtggggaaggcttgaaaggaagcaaaacaacatagattaatcaaattgcaatgtacttttgcaacttttactgtagtctgtagttttaaccttttatgcgtctcctcccttaatttttttttttttttttttttttgagacagggtcttgctcttgtcatccaggctggagtgcagtggtgaaatcatggctcactgcagcctcaaactcctgggctcaagtggtgctcccacctcagtcttctgagtagctaggactatgggtgcacaccactatgcttggctaatttttgtgtatttttgtggagatggggtctctctatgtagtccaggctggtctcaaacacctgggctcaagccatcctcctacctcggcctcctaaagtgctgggattataggtgtgccccaccacacctggccctcccttatatttttaagcaaagtttctagagataatggaggatttaaaattttagcttttctttaatcctgttcctttcttggcaagtggtacaaagaatagtataaaaagtaaggatctggcctggtgcggtggctcacgcctgtgatcccggcagtttgggaggtccaggtgggtggatcgctgggcaacatggtgaagactcctctttacaaaaaatacaaaaattagctgggcgtggtggcatgtacccgtagtcctagctactggttgcagcaagccgagatcatgccactgccctccagactgggcttgcagagccagatcctatctcaaaaaataataataataaataaataaataataagtatcctagtccgttcatttcataatgaacttcaacactgaaaaccttaaatgttgccattttctaggggagagtatattaagacatcagcagaaaagtactgctttcagccctggttggaggtgaatggtttctgtgcttgttaataaaaacgttaagagcttgggatgatagttttgaacatcagtgtttcaaagaaagtatgtttggatatcagtgtattttttaaatcactgttttagccacaaaactttagattttgttcatgtattgggaagcttatgagtttaagaaccgaaattagttttcttgggtaatttaaaaggtattaacaaggaacttgcctacaggagtgaactgtaggtaataaggatgtgaataagtacaaatattctttcatgttctcttccctcaaagaagggttaaatgacacacaaagctgaagtagggattgctctgcctaaattatgcagctgcctccaaggtttccaatagagcattgatgtagcctggcagggagattgtaagaaggcaagaacaactgttctggttagaactaatgagggggaaattagggtatggattgatttgtatttaattgtttaatgtatttttcggaagtaatttttttccctaattctacttggaattgcatgttattattaaatattaagcattgagaatggggcctgaatttaccactttattcagggatcgtgttccctgtttttagggccacttcttctccagtgagcccttcagtttgattggtgtggtgtggacaatttagatcaggcatatagtgggggaattataaagaggcaaagaattttcttatctttttttttttttttgagatggagtcttgctctgttgtccaggctggagtgcagtggcacgatctcagctcactgcaacctccgcctcccggtttcaagcgattctcctgcctcagcctcccaagtagctgggactacaggtgcgcgccaccacgccctgctaattttttgtatatttagtagggatgggttttaccatttttgccaggttggtctcaaactcctgacttcatgatccgcctgccttggcctcccagattacagtcttgagccactgcgcccggccagaattttatcttaaagccttccttgctggtcagcagtaggtaatttggtcatgactttcacaaaacatgtcccaggttggttgatgtgatgtgatgacaaaagcacttctcaactttttatttcaaacttgcaggaaagttgctctagcacagtaactggtatactcttcatttgcctaggtatcatttgttaacatgttgccacaaatgctttattctatattttttggtaaatatgctaaccaaaaagggaatttccaatctgagacttccataatatggtgaggcaaggcagcataacataatgattaagagtatggatggggagctagactgccacggaggaaacatgtaacctagggcaaattgcttaatctctctctgccttggcctccttgtctgtaaaatggggataatattaaccatcttatagattgttgtgacacttaagttatttaatgtatgtgaactttatagagtaatgcagagctcctagtaatgtcttgtgtttgctattagaatggatgcttcaaagaactcaaatttcgtttgttgaactaatgcccttgaaggtctttttttttttttttgagacggagtcttgctctgtctcccaggctagagtgtagtagtgcaatctttgcttgctgcaacctctgcctcccgggttcaagcaattctcctgcctcagcctcccgagtagctgggactacaggtgcccgccaccacgcccggctgatttttgtatttttagtagaggagggggtttcaccatattggccaggctggtctcgaactcctgacctcaaatgatccacccacctcggccttccaaagtgctgggattacaggcgtgagccaccatgcccgtccgaaggtctcttaaaacctgagaatctgtggtagatgtaggtgcttgcattacagaatatatgggcttcctgagtgggtaaagctaacttttaaatttttttaatgggaaaaaattagtaataggtaatattggagagttgtgtgggtgaggttcaaaacaacggtagtatgagaatggataactttagtaaagtgaagtgtcagtgggaggaagataaacagaatgatttgtatgatttgtggacatcatccttttttttttttttttttttttttttagacagagtcttgctctgtcgcccaggctggagtgcagtggcgcgatctcggctcactgcaagctctgcctcccgggttcacgccattctcctgcctcagcctcccgagtagctgggactacaggcgcccgccaccacgcctggctaattttttgtatttttagtagagacggggtttcactgtgttagccaggatgatcttgatctcctgacctcgtgatccgcccacctcgacctcccaaagtgctgggattacaggcgtgagccaccaagcccagccagacatcattctgtatttgcaacccttatttgtggacatttataaaactgacatgagttcatgaatgcttcctgtgagaagtgtgcttctaagaaaggagtcagcttttatatgtggaaaagccaagctgtggtctgtgggaaatacatatgtgttagatacaaccttgcctagaaacttgcgggtttattccagcctaggaattttccttctcttttcctcccttttcttcatacttaagaacccatgaaactagtgttctaaatagtacttaagccaatttctttgaataattttttttttttacatttttattttaaaaatgagacagaggctgggcgcggtggctcacacctgtaatcccagcactttgggaggctgaggcaggcgcatcacttgaggtcaggagtttgagaccagcctggccaacatggtgaaaacctgtctctactaaagatacaaaaaaaaaaaaattagctgggcatggtggtgcatgcctgtaatctgagctactcgggaggctgaggcaggagaatcgcttgaacccgggacccgggaggtggaggttgcagtgagccgatatcatgtcattgcaccccagcctgggcgacagggcgagactccgtctcaaaaaaaaaaaaacagagagacagagtcttggtatgttgccctgtctccaactcctgggctcaagtgattctcctacttcagcccctggagtagctgggactacaggcacacaccaccttgcctggctatttaagctaatttcttttggcactctgtagcctcccacattcagttcctcacatttattttacctataatttcttctaccaattctcctgtattttctccttttcttttgctttcctgttctctgtggtgtcttcctttgtctctctttgcctcctcttgcctcccctatcttttttttcttttaggttgggtttcctttttttccctttaggttttcccttaggtcttcatgggcgttgctttgcctcactaacagttaacataaagacgtatttctgtttcttgtacccatgtgctaaaggtacaactgttaggataccacttcatttcagttagatctagtttaggcatacaattgtaatccaagaagactgatctcttctagtgattcagattggttttatctttgatttttagatttcatctgcatttcttgattaattactcattttggtttagttgacagttgagcaaaaaaaaaattactttctccggagtaaatcatctgttttatttatgctttctatgttgttctatgttgtagtgcagtagcacattaggaggtatctttgtggagtgaaaagatttttgtggctgggcgcggtggtggttcatgcctgtaatcccagcactttgggaggccgaaggcaggtggttcacctgaggtcaggagtttgagaccagcctggccaaaatggtgaaaccctgtctctactaaaaatacaaaaattagccgggcgtggtggcgggcgcctgtaatcccagctactcgggaagctgaggcaggagaattgcttgaatctgtgaggtggaggttgcggcgagtggagatcgcaccactgcactccagcctgggcaacagagtgagactccgtctcaaaaataaaaaataaaaaaaaaaaagaaagatttttgttacacggttgggctcggtggctcacacctgtaatcctagcactttgggaggccgaggcaggcggatcacgaggtcaagagattgagaccatcctggccaacgtggtgaaaccctgtgtctactaaaatttcaaaaattagctgggcgtggtggcacatgcctgtagtcccagctcctcaggaggctgaggcagaagaatcccttgaacccaggaggcagaggttgcaatgagccgaaatcgcgccactgcactctagcctggcgagagagtgagactccatctcaaaaaaaataaaaaaataaaaaaaaagaaaagaaaagatttttgttttaggaagctcatattttaagaaactaaaatatattctcatggttgaggacataagacattgttatagaaactaggtcaacttctcaatacctttatcaaagcacctgcagttcccatttcattgcaagtgaagtaaatctcattgaaataaagtagctggtgtatattcagtacacttttaaaatagcctattttaaaagagaaattggtgccaatctgatttatttcctgctttgttggaatgggggaagttctgtaacctcattgctgttctgctctctattgactactttgttaactggggcacagttggcctcttggatgtctaccgtgctgaaggtcagccaaataggcaggtaagactacctaggcctcttcataggcctaactaagatcacagttggaaaaaaaaaagtatagaaaaagaaaagaaagttgttttttttttctaaaatttaactttttgtattcattgaagaaggaagtaaaacatctccattcaaaagaaatttgagagtctgtttatgccatacactgaagtacaacaataaacaaaatagacctactgtttgttctcaaagagcttacattctagttgtgagagacaaataataagcgagtaaatatgtagtatgtcagagtgtggtaatattattgagaaaaaagtaaagtagaatgagtagtatggaggaaagaacgtctcagggtgggggtgaggttattttatatagagtggtcagggagggtctcatgtgtaaggtatgtttgagagagaccaagagaaatggaggatggagtcatgtagatatgaggagtaggaagtgcaaaggccctgaggctggttattgccaatgaacaaaagagattgaggggagggaaggagaagtaagagacctgtccagagaggaccaatgggaatgtattttgggggaaggggaataatgtagggtcttgttgtatactatattgtacaaagaaaaattatctccacttcaaaccccagagacaacggctgttaccgaatttttgtgtctttcttgtaacttgaggtagcacctgacccaacctccatatttctcccattgtggaatctccatgaaagtatagttagcagataatttgcatagtagcagattttgcataggttgattacctttgtcttagagaatgataataaggcagctacttagaataagctgatatgtttttgggaagtgggatcaaaatttttctttttcttttttttttttcttttttgatacaaggtctgtctcggcagtgttaacaatctcagctcagtgcagcctccgcctcccacgctcaagccatcctcccacctcagcctcctgagtagctgggactataggcatgcactactacacccagctaatttttgtattttttttttttttttgtagagacagggtttttccctgttgcccaggctggtctcaaacttctgagctcaagtgatctgcctgcctcgccctcccaaagtgctgggattacaggtgtgagctactgtgcccagcccccaaatttttctttccaagagaaatactgtatatttctccatcttcttatctaactagtcagttttctataagcaggagtgacagcctagacctgtacagtttccttttgaggacaaaatttattggtttggtttatgtgcttttgaccaaataggcttgccccacttgtctgctgcttctccttttgctcatttgaccaaaaagctcctgtttccccatgccctgattgttgagaattcatggctttgaggacccctttataggtcaccatatccgtatttctgtcttgcacattgggagagatgattatccctgaaactaactttccttatgtttgtttaggcattagaggttattaaagcacatcctgagccactttacctagttgactttggagttgaggaagaagcaccaactatttagtgatttgatgttccatgcatatacgaaagtaaaaggatatttgattgaatacctatgtcttgaatcacacactgttactttccctcttaagatttctggtttagctggtctgtccctcagtgagagtctctgtctcgttctctctctctctctctgtctcgctctgtctcctctctctctctccctctccctctttctctctctttctctcacccgtctcctcctctctctttggagtttttagccctggctcttaacctggttaccctctgttctttcctttaattatgcttatctggttgtcatctggttacttaatattagggatgccctcaaccaagaaactttttttcttcccatctcctcctttgttcaggtaactgtatcgtcttgcatgggaaataatccaggcaatcagagattacccaaaattttgaaattgttttaaacaactggtttatatgtattacttcatcatatatagatggtgtgagatgtttgtggttgtcttgagagttttttgagatagagctttgctctgtcatccaggctggagtgcagtgacatgatcataatttattgcagccttgacttcccaggctcaaatgatcctcccatctcagcctccatcacatctggctactttttgtgttttttgtagagacatggtctctatatgttgcccaggctggtctcgaactcctgggctcaagtgatcctcctcctttggcctcccaaagtgcagtaattacaggcatgagtcactgtggccagcctgagagtacctgagattatgtttttttttttttttgagacggagtttaagctcttgttgcccaggctggagtgcaatggcacgacctcggctcactgcaacctccacctcctgggttcaagtgattctcctgtctcagcctcctgagtagctgggattatgggtgcatgccaccacgcctggctatgtctttttttttttttttaaattaaaaaatttttttggctgggtgcagtggcttacatctgtaatcccagcactttgggaagctgaggtgggcggatcgcttgaggtcaggagttagagaccagcctggccaacatagcaaaacctcatctctactaaaaaaaaaatataaaaattagccgggcgtggtggtgggtacttgtagttccatatactcaggaggccgaggcaggagaatggcttgaaccctggaggcggaggttgcattgagattgcactattgcattccagcctgggcaacagagtgagactccgtctcaaaaaacaaaacaattttatttttggttttgttttaaatgtacctttattgtttgactttgggatctgggagagagtatgtcttttaatgccattcttctttcttgagtcttcggtgacacatgtttacttgtgggaatatttcactttttagttcttttaaagaccttttgctattcgcttgctcttactcaaaccagaagttaaagtggcttgcataagtgtcagaggtaaccacttggatccagagtttctggttctctctctgttgtcaagtggtttagaattatctagggtctttaatggtagatttaagactttggagttcttttgggatagaatatgcaaccaggttttgaaaatttggcatagctctttgttccttgaaggccatctaagatgttttaaacataattgtgttctccaatctgcagtgtacagagggatatcctacaatgtagcaactcgggattccagagaagatggtgctggcaagtgagacagttcttccttctaggttctaagtctgcagtacaggagttaggactgtgccattccagccatccttatatttagattcatgctttcaaagagcctctaatctagactgaataatgatctgagctgtctggtgagcagtaaaactggcccaaataatgtattttataaccagtgcccttttagcaagaaagtcagtgggttgttagggataggccactacagtggttcacaacaggccataagagtctatgagggtttatttatttatttatttatttatttatttatttattttgagatggagtcttactctgttgcctaggctggagtgcagtggcgtgatcttggctcgctgcaacctccgcctcccaggttcaagtgattctcgtgccttagcctcctgagtagctgggattaaggcatgcgccaccatacctgcttaatttttgtatttttagtagaggtggggttttgccatgttggccaggctggtctcaaactcctgacctcaggtgatctgcctgcctcagcctcccaaagtgctgggattacaggtgtgagccaccatgcccagcctatgagggtttttttttttttttaagacatgaattcccagacttccctgtagaaactgatgtagaggggggatttaattttttcaaaaagctccctaggtgattctgatcattcacgtttgaggatcacaaaacctgaatatttgaattaagcttacatgtatatgttatttctcaggtggatggttatttagttaaggtgagaagtagagccaggcacggtggcctgtgcctttggtctcagctacttaggaagctaaggagagacttgagcccaggagtttgacaccagctttggcaatatagggagaccccgtctcgaaaaaaaaaaaaaacaacacacacacacacacacacaaaacaagagaagtacagaagatggtttattgtagtagacatgacgagaaggtcgttaatttgaagtgaagtgatttacctctgtgtcctgtattgttttggaattaaagatgttacctcttgatttgggggttatgccaacacttagcatggtatggaggactcgcctattgggaggaagggaaaactttagactgtatctgtggttttaaattgtggaacaaattcaggagaggatgttagcattgaaatttagctggacaatttgtttaaaactggacaggaagggccaatgttacttcctgtctgaaaaggaagcgctggcttccttcccttcctccttggttaactctggccaacttggaatatgggtgggggaggggctggttatgttagtaatcgtgttaccactaatgttcgtgtatagccgcttaaggtttactcttttccttacttgaaacatgtagatgggtgctgtgtgtgctcctgtttccttgttcttatatgggagccctgtactaggtttgagtttagtctgggaagcctaatctctcagacgttacttttacattcaaccttatatacacctcccttgtattttctgacatttgaaaatacaccaaagagttggagggaagaaactgaaactcatttgacacggagcggggtaagttgtggaaaggagaacataattgggcagaggggagtggatgacagaggtttcttatttttgaattgagccaagaaagcattccttctaagtggggccagttggcactgttactgctattttagttcaggcttctccttcctactgaccagtcaattgtattaagtgtttgatgtgagtttgaactgaggtctcaggaggggagggagcgagggagggtggtggtggaaacagctggtgccttcatcaagctatctcaattactcttcagagtgtttgggggtgggggttggtggcacaggaattagatgtgtgttagcagagtctcagcaactcttatgtagtgggtttgaattctcaggcactcttaatgctatgtgggatgttggctagttggaatgtagctaaacctttcccagtcacattcttctgcctcgcctccctgtaattctttcagcattgggcctgctttggagaaagaggggtgtgggaagttagacagcaaaacagattcatccttcctacccattgagtattcagcttaggtcttgggccctccagaggctttcttcatatccattcattattcctttagttgggctttctaaatatgtctgcaaagagtctgagatacaattagaactgggacctctggtgaagttaagttgaattgtaatcagttggctatacttgtcgtcttccctccctcacaccccaggattactgtatttctgagtcagcactccttttctatctcacctgctcaatttgatgcagagaacttgccaagcatccttttggattagcagcattgatgtgggtgtgttcagttctctgtctggggtgtgtcttttacaactttttttttggtatctcagaaaactctcccctactaaaagctactatttttatctactttagtatatctacttcacaccgtggtacttaattaactcatttatttggtctgggctatgcataaggaagaattggataagaatactaacagtcataactaattgttcagtattcttgagagataaagggagttagtctgataccatgccaagtaagagactgttaactttttttgtgtatgcttcagtgatagagtttgcaatggctgggctctgctgctgaagttccatagtgttgctaaatattcttttctattcaaccctagaatggctattgtgtatattactgccctacccttgccacctggtcataccagatccagataaggactaaatccttctttttttggtcacccaggctggagtgtagtggcatgatctcagctcactgcaacctctgcctcccgggctcaagtgattcccctgccttagccacctggagtagcttggattacaggtgtgctccaccatgcccggcaaatttttttatttttagtagagatggggtttcaccatgttggccagcctggtctcgaactcctgacctccagtggtttgcctgcttcggcctcccaaagtgctgggattacaggcttgagccactgtgccaggccaaggactaaatccttctaagttgtctgtttagacttagttcctttgtatcatgtgctgctttagaccagggttcggcccatactacttctagcagatctaagaagatgaaaggaatctaggaaaaataaagggagaagacaagacaagaagtgatagcatattaccagttagttcctggtgtgcccctctggttggaggactctgctgagcatcttgctcattttatgcaaagggaattgagccctttgggcaaagggtgttgcttctttggatttcaagaatctctagctaatagagcttaacctctgtttgcatttttgcttctgtgatttagggctaatttccaatgggttgtacaagataatagaaaaatgtatcatttatctcattcttgcagttagtggaggacctttattaggagaggaggctttcttttctgactaggctccaaatttacagcccctgacccacttcagggggttgtgagcaggaaaagctgatgttgctgtcttgacctctttgccgccaggatttggcttctgtgcaattcctagtggttgtcctctcattctctagggaaacggggaactttgctcccagcacctgattaaactgcctctttgtagggtggagtccgctgcctttgtttgttctctgtggagcctgtcttagtaatcaactctatgcttgtagggagaaagtttgaaaggctgaaaacagaggtggatgatagggaaggtgaagttcctaaagtagttctccaaatgggaatattccattgactgaatccagattggtaatcaaattgccataatgggatgtgtcacatgtagctgagctgaattaacagcatcagtagctttaaaatccctaatgcagtgcctccaaagtgaagaaacttgccaagtaggaatcttaaaaattccctcaccccctccaaacttttagatccacacacagtctttctgctgattcttaaaggcctgagctttgtcctacgtagtgttggcttggggcagagaggagggttgttttccctgaacatgataaggagctgagcagggcaaagtgggggctctggcccgtgattggtagacaggatgccctggaatgcagttggcctgcagcccagaatccagcactttgtatttgtttgtttctgggagactgtggtctggtgctactgtgacaggaagtgagaaagctgggagtgggggaacagagagggtcgatgtctttgtggttctcctgtgaaatctctttgtccctggagagcagctctgctacagagctctgctgagaagagagcagcctttgtgtgtctaatgggtctcggagcatctagctactccgagggattagagagtgtgaattctgactgtggccttttgcgttttagcacttaagttatataaatggtcctgatctcttagcactgggaagcttactgagttttgtgtgtgctgctattctttgtggatctctaggatttaattaagaaaggaattctagaaggaaatagatgttaagtaatgttcatttgctgtatatgttgcaggtaccttgttgggtttaaaagggacagaaggaaacaggtaatgctgaggtcctttacattttatatctcatccttccaattggcaccctactgcatacagatcaggagaaacctacccgcttagtattaagagttactagcaattctctaatgtttgatcataactagagaatggttggtagtttcctgggatttttcttccctatgtctagactgaaatagcacctgtaataccctctctcttttctgccctcttttctctcttgttttgtgttttccctgccttccattccagctgtgaaacaggcatcttttctcactttgtggattggatggctgagtccttaactttgagccaagctggctggttcctgagcacacacacaaacccgcctttgattgtccaggaggacagctgccctagaggcagattgctaacataccactagaacaatccttcttctctgttcttatgctggctagcacaatctttactgcctctagttccttctgtttcccaccccatctctgatctttgcttttggcttagtgagatgtcacattaaaaatgagagtagggattggattttttttcttgtggtagggttgagggggtgatcagagaatgtgacatgtagccagctttctagagcaggcttgccagtggtaaggtaggtaatttttacagagtagtgcctcttttgttcttagcacctttcctcctgagtactaggttcttataaaagggaaggtaaatctgaagtaggctgcaagctactcttcccaaattgagtaaggttttgttctttaaagtgaagataagacccaaaagtctagctggctccattccaccttctcttgcctccttcccctctccgtaaaaaaaatgtcaactttgggttaacttcttaattggaactagaatgactttttttttttttttgagacagggtcttactctgtcactgaggctggagtacagtggcacaatcttggctgactgcagcctggaaccaccaggctcaagtgatcctcccacctcagcctcccgagtagctggaactacaggcacatgccaccacccccagctaattttttgtattttttgtagagatggtgtcttgccattttgcccaggctggtctcaaactcctgagctcaagcagtctgcctgcctcagcctcccaaagtgctgggattacaggcttgaaccacctctcctggcccgaagaatgacttttaaccccaggaaacatagaaaattcatactctttccactttatcaagaaggagcatggacttggaataaaataggagttttcactacttactactagttgatgagcttgggcaagatactaaatacttctggtatataggtagtatacttatttataaaaagaggccattacctcagcaggtgttgaaaggattatatgataacttcaaggggaagagcaataatgcacaactttcttccccttcaagatgggattttcttctttcagataaggagaaacatttcctcctgctatctgtcctaaagccaagaaaggaccttaacacttctgattgatttatttatagattgacatgctctgtctccctgttgcttatctcaaaaggaagacatactccaaacttgatgaaaagaatgccttattggtcttttcagggttttgaggaattgggactgtgtaaatctggctcaattacatgcttccaccttttccaagttattttcaaatgatgggcaaagaggtgggggaatgccatagattgaaagtttggtgagaagctgctattttctttctttctttctttttcaagatggagtttcactcttattgcccaggctggagtgcaatggcgcaatctctgctcactgcaacctccacctcctgggttcaagcgattctcctgcctcagcctcccgggtagctaggattacaggcatctgccaccacgccaggctaatttttgtattttcagcagagacagcgtttcaccatgttgaccaggctagtctcaaactcctgacctggtgatccacccgcctcagcctcccaaagtgctgggattacaggcgtgagcaaccgcacctggccgagaagctgctattttaaaaaaggaatgtgagctcaaacagttgggtgacccctagtaaactctaaggttaagcttttccatgaatattttttttttccgagtctagggtatggaaggatataaggtgtcttagttaattttaggatttctcttttatgacatgagacctaatcaatacctttgcatttcaatgaggctttttcttatttttcatagtgtacctgatctctctcctcttgtaggaaggagaaaggcatttggcctctccccttcctttagtctaacaccttcctctgtttttttgcccctccctcttatctttgtttccttatcggcctctccctaaagccctgctttctccttttaaggctaggtgaggtgtctttggcaaggttgcacagggatccaggtaagtaactcagtctcttctcaggattagagaaaactcagtgtgaactgtcccagtggagggccttggagaggcacatggataatgggggaggagaaggaggcggcctggcctgagagatcaggacttgttagaccagtcctgtgtgtgcgtcatgcatgctccacagagaagcaggtttttttctttctgtaccctttcagtcctgggccccctcactagctgagagccacacccttccttggcttcaaagccagcccagcactaagccattttagtatgttatggtttagagggggttctcagaatacttgggaggggaaaagagagaaaaagaagaatgttttatttggtctcagaatttaggaggtcatgatggtggaggtgatttttttttttttaagttgcagtaaaaactttaaatattgacaggtagctttgggtaaggattataagactaaagggagtttaaggtaccctgttgatgtatagaggttgccagctcaaattccttttaacaaggagtattatcttgtttatatctttgttttttaaaaaattcttttctctgacgttccaatcagagagaatgtatcactctttcctaagaggagggtggtctgcccagagccttccttaattcatcagagagattcctggtggacacctagtttttcctcatgaaaataagacttctttggtcagccttttaccctcttttaaaataaaatccttaactaaattaaatttaacagtgtttaattgaacaaagaacagttcactaattggggagccttctgagccacagtaggctcagagactccagtgcagacgtggtagaagatttatggacagaaaaaggaaagtgatgaacaaaaaatggaagtgaggtacagaaacagctggattggttatggctcagctggaacagttggccccctttgagtggccaaaactcagtgattggcacaagagtaggttacagtctatttctaccaccatttaggttatagttcattatgtacagataaatctttaggccaaacttaaaagatgtaaggaggcataaacttgcctaggctaaacttgatttaacacttctaaatggagaagttgggcctagcaggaagcagatccatgaggaagcatagaaagagtgaacactaggagaaggccatatccagaataatacaggttttgtgacttgagtagtgctcagttgagattgtgaagtgagcacagtccttttaatcttaacgcaaatcagcttcagggacttggaattaacagaagatgagtcttcccagtgaagtgagaaatactagaactgttctgactgagcatgaaggtggaacatggttgggcatggtggctcacgcctgtaatcccagcactttgggaggccaaggctggtgggtcacttgaggtcgggagttcaagaccagcctggccaacgtggtgaaaccgtgtctctactaaaaatacaaaaattagccaggcatagtggcacatgcctatagtcccagctacttgggaggctgaagcaggagaattgcttgaacctgggaggtggaggttgcagtgagccgagatgacggcattgcatctgggcgacagagcaagactccatctcaaaaacaaacaaacaaacaaaaaaaaacgtggaacatcaagtggaggtagggcggggtacttagactttggactctggtataagcactgataagaagccatagaaaggccgggctcacgcctgtaatcccagcactttggaaggccgcggcgggtggatcacgaggtcaggagatcgagaccatcctggctaacacggtgaaaccccgtctctactaaaaatacaaaaaattagccgggcgtgttggcgggcgcctgtggtcccagctactggggaggctgaggcaggagaatgctgtgaacccgggaggcggagcttgcagtgagccgagatcgcgccactgcactccatcctgggtgacagagcgagactccatctcaaaataaaaaaaaagccatagaaaatcttgacaaaatatatttctttgatttagaaacaaaatggcaagtttgtttgtggttgaaccggaatatttcttcaaatttggggtcaggtgccagttaaggcaaataaatgccttttaggtatctgaagggcccctttctggcttgaatgttatgtaatacagttctgtagtgttacaggtgctatattttgttgattagtattctgcagtaggaggcttggtatgctatttatttatttatttacgtatttatttttgagacagggtcttactctgtcgcccaggtggcaatgtagtgattgtggctcactgtggtctggacctcctagactcaagcaattctcccacctcagcctcctgagtagctgggactacagtgtgcaccaccatgcccagttaatttttgtaatttttttgtagaggtggggttttgccatgttgcccaggctgatctttaaactcctgggctcaagtgatctgcccaccttggcctcccaaagtgctgggattacaggtgtgagccactttgcccagcccagtgtgcttttgaaaaaagccctttgcattccctagaatggctgggcacagtggctcatgccagtaatccctgcactttgggaggccaaggcaagaggattgcttgagcccacgaggtccatgctgtagtgagctgtgatcacaccactgcactctagccagggcgacaagagctagatcctgtctcaaaaaaaaaaaaaaaaaattccctagaacgacatggaaatggagttttgcctgtcattgtttttagatggagagcataaatttgtgacactcgttttgttgttgttgtttttgagacagagtcttactctgtcatccaggctggagtgcagtggcacaatctcggcacactgaaacttttgtctcttgagttcaagtgattctcctgcctcagcctcctgaatagctgggattacaggtgtgtgccaacatgcccggctaatttttttgtattttaagtagagatggggtttcaccatgttgaccaggctggtttcgaactcctgaactcaagtgatcctcccatctcagcctcctaaagtgctgtgattacaggcatgagccgtggtgcccggccatgacattggttttgattttataatgaataaataggaagaaaggaggagagctgcctttgagactggctctgaagacaaaattatttttgcaaaaacccaaagattggtgaacttcagagttcacataggctatggttttatatatattagctcattaaaactaaaccatgaagagtaatagaaatggaagcttacaggggttataacttttccaaggtctcctagctagtttttggaggagccaagacttggacccccagtcttttgacccctaatctggagttttattttgtttttccctctaaaagtgaataattcctgtagttttcaggtctgctgcaaatgaaagaggggagcctggggaggctggtttacaaacttcaaaaactccaccaaccacacccaagctctagtccctgtagtagtaacaatattactggctttctgtgcgtcaagacatttttctaagcactttacatgaaatgcctcatttaatcttcacaaccaccctgtgtatttttattcctccattttacaaaaaaggaagctgcagtttcgagtggttgatactttgcccaaagtcatatagctaataaggatagatcttatacttaaacccaggcagataacaaagcctatacacttaacctcttaagaatcataattccaaattgtatttctttagtcagtttacagtagaagaaatcattccagggactgtgctattggtaggtgatttttttgtgtgtgtgtgtgtgtggggtactgagtctagctctgtcacccatgctggagtgcagcggcatgatctcggctcactgcaacctccgcctcccgggttcaagtgattctcctgcctcagcctcctgagtagctgggattacaggtgtgcaccaccaagcctggctaattttttatttttagtagagacggggtttcaccatgttggtcaggccggtctcaaacccctgaccttgtgatccgctcacctcggcctcccaaagtgctgggattacaggcttgagccaccacgcccggccggtaagtgatttttttgttttttggacctcctatctggttagcactgtctagttgtttggtccttctgggtatttgatttaatttaacttcttttggttgggagttcttacagacgagactgagtttttatcattatcattgcttggatgaaggatctttactatggactatggactctgggtaatagcaggaatatctttctagtgtgggtgggatccagtaatgtaggacttaatggcttattgagagtaaaactaggtattctcagaaaatctagtcttaagggggaataacaagtttcactttatgtttcctcaaccccctgacttcaggaattctttgattttttttttttttttttggtgagaggaaatgtagtctatttaaaaatctaagtaagtggaggccggctgccgtggctcacgcctgtaatcccagcactatgggaggctgaggcaggcggatcatgaggtcaggagatcgagaccatcctggctgacacggtgaaaccccgtctccactaaaaatacaaaaaattagcccggtgtggtgtcatgcacctgtaatcccagctattcgggaggctgaggcaggagaatcgcctgaacccaggaggtggaggttgcagtgagctgagattgcaccacagcactccagcctgggccactaagcgagactccatctcaaaaaaataaataaataaaaaatgtaagtggcaaagctggaaaggcattgggctggacttgtaattacgactcctgactgtctgccaaagtcagctgaaggtttgtagtgtgatctttttgatgcatatggcatgagaagaatcttttttccttaagtctccaagcgatgagaccatttactgtagcctgcctaacagcttcattctttccccactcatacattccttttcctcccattttttttctgttttctcacttctatgtagatattatgggtaactcttgagcctaaaaaaacaaagtagaacccttttctttccctgttttcctgtgatagttgagaagaaagctctcaaaggttgtagaggagaggctctggaccatccatctggtactgactgcacttctatttggacttgacaccatggcatagaaagagaacacaggctttggaatggcatagacctgggtttaaattcaaaatttgctattaactgtgagaccttgggtagtttcttcacccatgagtcttatttgcaataaaacttccttagggttgttgtaaggattgccaagatagtaaatgtaaaacattcagtaatcattagtttcacattccctttctccaaggtaataaattgttaaggcctcaaatacagaatcaagaacttattatgacagatgtgtaatgatgtgatgacttccaggcactagagaagtgtcctttgtcccagaaacactggtataggtgggacgttctagtaaatagattaggagtagggaaaccagcccattcactccttagaacctagttatgtttttgatccagttgatttcatctactagttcacaaaatagtttgaggctgagacattacggtgaagtaatgtaattggaagtgttaaaccaacttttgaaacaacttaatacctgacatttgtatataacatacattgtctcacctaatcctcacaacaactctgagttagaccgggctaatttcctaactcctgggaagcagcaattttttttctttttccccaatttggttcctggaaacggggcaaatggatttggcatcttacaagtgagaatatgacagggtttactgccattgttgggtagtagtagagccagaactgggaccagtcttcttgagttgtgttctatcccatatggcctctgcttctgtcctttttcaggcagaatatctccccatgcttttagacctaggaatctgatctttttgtgtaattgtgctgtcttcttttccaaattagagccaggtggtcagctttaaagctgtgaagatggtggaagctaatgtttctccagatactgctttctgacctagagccctgagtatttttcctatctcccttcctaaccttcttcactgaatttaagttgcagggccatttatggccatctatacactttctctttgcagcagggaatgtcactgtatcccccgtggtagcagtaatttgggcttttattagcaaagaagattatagggtggatgctgctggagtggtaattgcacttcagaccctgttgaaattcagtaactggaagaatctctttttgagctcagagtcctcttggtgtggaaggttcataggtcattgtacatagtggataagggcaagtacttaagaaatggagatgaaaggggagcacctttttttttaaaataagggtgcttattcaagaaagacctttgagtggcctgttggaatgtagggtgggaatatgagaaagtggcaatgggttttggactgaaaggaagaagagttgataggcgattatgggaacttcgagctggggtaggaggaatttagggaagggcaaccacgttctttaaacttagggactggattgattcaggagtttattggacacttacttatcagttcctttgggtactcttgcttgctgacttctgcatacactctaagccaaacaggcccgggcatttgtgcttggtggggctctggggagcgtgggaaagggaactgaagcaaaaggctcagcctaggctagtccccacatgtcttccccacacaacttttgcattggtttctcaatgtctttgtgggcatgctgggactgggctttgaggtttctgccttaggggtgggaagggagggggaagggcattccaacagcagtttttttctttttccccaatttggttgctggaaacagggtaaatggatttttatacatattataacctgttcctggttatatatggaaatacaaatagaggagctctcacttgacagtagaatccaggttttaatgaaaatgacatccaaggcctaggtatctgaacacaacaaggtctaaagggcacttgtcacattaagcaattccaagtcatattttaaattacttcctttcattcctaatattgccccttgctcttcttgtttttatgtattgggtatattttattttcctctcattcccatttttccttcaaatatttctgcagctctctccttcctgcttcctccttgctgtggtggctgggatgcttcttccatgattttttgaatctagactgggctgttctctgtgttaaaccaatcagttgcgaccttctcttaacaggtgtgtatggaaatatgtttattaagaaggaaaaatcttactttttaagaaatatgtatttttattcctttcatgtcatagcagaaaaaaatctttttaaataccttttttctttatgggttggtgagagggtgggaattggggagaatatttatttcaaaacctgtctttcaacattgtatattttggactggcataaagtctttcatagctataagagagaaaaaaacccattgagtccaacagagtatcactaatgcctgtaaaacctcctgtttatataatggtatggagaactcttcatttttatataactatcttttattgtatagatagcacacatagaccctctagatacttggatatttatcctgagttggaacaaataaaagggtaaaaagatagtctatttaaaacaagagtgtccaatcttttggcttccctgggctacagtggaagaagaattgtgttgggccatacataatgtacgctaaggatagccaatgagctaaaaaagaattgcaaaaaaaaaaatctcataatgtttcaagaaagtttacaaatttgtgttgggccgcattcaaagctgtcctgggctgcatgcgtcccgcgggccaagggttggacaagcttgagttagaggtttctgcaggattacagagatgtgggaacttccagccattgacgtgtggaggttaggatatgaactactgtgaggtgcactttcagaggttgaggctaatactccttttcctacttcccaaggaggtgaagtttcctgaagacagtgcttttttacatgtagagttttttgtggttctgttactctgttgtctccattagtcaaggaacacgttttgccatcaatataatatttaacaaactatagtagtatagtttggaaagtagaaacgcccttttatgaatgtattattatatttttggaggcagagtctcactctgttgtccagcctggagtgcagcggtgccatctcggctcactacactctccgtctcctgggttcacgcaattctcatgcctcggctgggattacaggtgcctaccaccatgcctggctaatttttgtatttttagtagagataaggtttccccatgttggccaggctggtcttgaccaactgaacctgacctcaagtgatccacccacctcggcctcgtaaagtgctgggattacaggtgtgagccacctactttcatttctttctttcttttttttttttttttgagacggagtcttgcattgtcgccccagctggagtgcaatggcgcgatcttggctcactgcaacctccgctattctcctgcctcagcctcccgagttgctgggattataggagtacgccaccacacccggctaattttgtctgtgtgtgtgtttttttttttttttttttttttgagacggagtcttgcactgtcgcctaggctggagtgcaatagtgcgatcttggctcactgtaagctccacctccggcgttcacgccattctcctgtctcagcctcccgagtagctggaattacaggctcccgccaccacgcccggcctttttttgtatttttttagtagagacagggtttcactatgttggccagactggtctcgaacttctgacctcgtgatccgcctgcttcggcctcccaaagtgctgggattacaggtgtaagccacagtgcccggccttttcatttcttaattggcatttagtttagcatagtaattttttttttttaatttgctgccacttcagcagttttagtgtttagatgtgggagaggttaagtaagatctgtattgccctattatctctaaaagtggcttgtccctgcaggatagtgaatgcttgtctgtaccattggagttacacatttcattgagttgataccagcagatttttttcagggaaaaataatccaatctcataactacagcacctcaccacattctccctctcctaacagtgtagagacttagatttaattgcacctttcctttcaatagttatttctggtgggatgttgaagaaagctagtgggcaaaggattccgcttgaacagacactggtgatgggctcccaggcttggcggtggcttgctttctgcactgcagtaaaaccacgagagggcatctttggctctgggattaataattcatctgtcttctctgacctgtgaccttttctctcctttctcttaccctttcccggtagtgtgaagtgagggggtctctctccctccttctccttcctctgtgattcaccttcctttttaccctgccctgcggcggctccgccccttaccttcatggacgactcagaggtggagtcgaccgccagcatcttggcctctgtgaaggaacaagaggcccagtttgagaagctgacccgggcgctggaggaggaacggcgccacgtctcggcgcagctggaacgcgtccgggtctcaccacaagatgccaacccactcatggccaacggcacactcacccgccggcatcaggtaacccctctctccatcagacgtgcaggtaggactttggcatggtcacagagaggctatgatcctttttgggaagctactctccttttggtgatgggctgtccagtgcccgttcttccagggatttttttccaggggtgttaaatgctgataagagacaaggaatattgctgctggactgagctgggtgcagttactatctctagaagcatccatctgacttcctgttttgctggagtaggttttttggggtgggctacaattctagtaatggtagatagtttagtttgcagctgtactcaagttacttttcttttctgatttttttttcttggtatcaaaaaatcaggaaagtaaatgcccacttaatggttgggcatcttgtgctctcagccctagttcagtctccctgagggaacagtctgtacccaggtgtggcagtatccataaattgtgtactcctgctccatattgtccttgtgtgctctttttgttggctgtgtaaatcatgtgttggaggaaggggtcattgttaattctgttggttagagttggagagggagcatcatgctgctgtttaacccaaataaccacaggagccagtggtctctgggttggctgactctgtgatgtgacttgggagagttggtgttagaaatgagaagtatcttgtgtttcctctggtttttctagtctgactttgctgtgatgtaatctgtctgaggttttgtctgtcttcctctgtgtgtgtgtgcgtgtgtgcgcgcgcactcgcgcatgtgtgtgtgtggtagacattgcctgatagattgcatcttacgagagatctctgagtgggaaccagaacagtactcatgccctgatagtccttttcattgagtaatttttatttatttatttaaataggagtgcagtggtgcaatcttggctcactgcaacgttcgcctcccgggttcaagcaattctcctgcctcagcctcctgagtagctgggactacaggcgtgtgccaccacacccagccaatttttgtagttttagtagaaatggggtttcaccatgttggccaggatggtctcgatctcttgacctcgtgatccacctgcctcggcctcccaaagtactgggattacgcgtgagctactgcacccggctgagtgatttttttttttttttttttaagatagagaaagtccctcatactgaggagccttgcagttgagagagaacagaattccagttggaggatcaaggaatttgagggaggcagcatgcttgcagtgttcctaggatttttacaggaactacaatagaaagttagggatgaaattatattgaaaggggaaagctggactgctcaggtttggaggtcatggggaattccaggattcagtatgtggttgctctcttatttttaacttctgcttagcagtaaaaccacacccttccttcttcctgaaagtaatgtttaacttcctctccctgcagcattacactctatgtaatgggagtggggtggaggaagagtctcccaaggtggttggatctcactattctactggaagaggagcaggcaaatatatttttatgtggtataatgtcattagattatttcctgctgcttaagacagagcaacttctggatgacattttggaatgtattctgtggctctaataattgttggtaaagatattgagccttctgttttcttgaggggagttggggtgcttgtttttgtacttggaaagggagactcgtatctcttgcttttttctttaattaaatttctgttttttacattaggacatgatagccatcttgcttctttctttaaaaagctgcctggaatgggagtttccagtggtagtactgcatgaagattcatgagactataaagctctttggaaaccccccaacttagcccttccaactttccttacatttttatggctttccaaaaaggttgcatgtaagggaaattatctaggtctgtgctgtttattcagcaaatagtttttgagcacctgttatgtgccaggcactgttcaaggcactagactaaactaaacttatcccaaaaaaccctctgccctcgtggagtttacgttcttatgttccagagaccctgtctgccagagttccaggcctgattttcaattttgaggaaagtgctaagactaaagagtgaatggttcttttatgagtactgacacaaggactccaggccacacatatcttcttgaaagcccttttcctgtttgaaaaaaagatcgtttgtatttgatagagcaaaagaaggccacaaaatgaattgtcttcttgtgggctgtgtttcagaacggccggtttgtgggcgatgctgaccttgaaagacagaaattttcagatttgaaactcaacggaccccaggtaattctttggctcaagacctgggttgcttcattcatattttcttatttccccagcctataagagcatatttgtgtcttgtaaggtgcctggcacattgtacatactcgtcaattagtttcttttatttacgaaaacaaagaagtggagctccaaagtatatatgcagttttgttttggaatgaattttaatgaccattgatctttatgactattcctcctccccactgccaccccatttgatccctaagtactgcgtttcttttctagagacagtaggcttctactttgcagcaaaaaaccctacctaaaatctggctggtcttgagccttttagacggtatctgaagagtaacataaagccagtcaaaagatggctcttactgggattttcaggtttgtcttaaaagttctttatttttggccaggcatggtggctcatgcctgtaatcccagcactttgggaggctgaggtgggcagatcacctcaggtcgggagttggagaccagcctgaccaacatggagaaaccccgtctctactgaaaatacaaaattagtcaggcgtggtggcacatgcctgtaatcccagctactcgggaggctgaggcaggagaattgcttgaaaccaggtggcggagattgtggtgagctgagatcatgccattgtactccagcctgggcaacaagagcaaaactctgtctcaaaaaaaaaaaaaaagttctttattttagactgggcacggtgtctcatgcctgtaatccaacactttgggaggccaaggcagagcaaaactccgtctcaaaaaaaaaaaaaaaacaaagttctttattttggccaggcgtggtttgctcattcctgtaattccagcactttgggaggctgaggctggaggattgcttgagcccaggagttcaagaccagcctgggcaacatagaccctgtctctacaaaaaaaataaaattagccaggcatggtggcgtgagcctgtagttctagctactcaggaggctgaaatggcaagattgcttgagcctgggaggttggggctccagtgagctatgatcatgccactgcactctagcttgggtgatagagtgagaccctatctcaagtaaataaatacaagttatttatttattgggtgagctgctcttttgagggatcactcagatatagatgaaactgcatttaacacagttcatgttcacttagatgaccacagctgggaagttaaatctactgtctgtcacttggatgttgatgtggctatagttagttcatgtttgttaaatgactacaactgggaaattatgtctactgtccttttgtacaagttcaaaagatgacagccacccatctaaaaatcctgaggcctatagaagatgcatgaggagtccctgtctccaggtttaccacttatgcttcttattaggatggcttgttatacatagcacttaatagtagtttcttctcttttctcttttgcatataggatcacagtcaccttctatatagcaccatccccaggatgcaggagccggggcagattgtggagacctacacggaggaggatcctgagggagccatgtctgtagtctctgtggagacctcagatgatgggaccactcggcgcacagagaccacggtaaactaagacgtgtgtaagatctggaagtgataagaggtcttttcttctctattaggggaggggttaagcacttaattaagatggaggactgatatgccattattgatctgattgcatgaagtgatctctggccagatagaaaggatgaagagatgggaaaatcttatgggatagggaagacagaaggtatatcagggtctatagtagcttcccttataagcatagttactgtcagggcaattttcctgcttggggacttcctataggatggaaagaaagatagatggtaggctttaaggcattcctaggtaaagtgacctagggatataaagatttgtttcttttggagtggtatagaatttaattgttcatggctgggcgcggtgggtcacgcttgtaatcccagccctgtgggaggctgaggtgggcggatcacgaggtcaggagtttgagaccagtctgggcaacatagtgaaaccccgtctctactaaaaatacaaaaaattagccaggtgtggtggtgtgtgcctgtaataccagctactcgggaggctgaggcaggagaattgcgtgaacctgggaggcagaggttgcaggtgagccgagatcacgccattgcactccagccagggcaacagtgcaagactccatctcaaaaaaaaaaaaagaatttaattgctcacttccttaattagtttttctttttcttgtttcctacttgcaggtcaagaaagtagtgaagactgtgacaacacggacagtacagccagtcgctatgggaccagacgggttgcctgtggatgcttcatcagtttctaacaactatatccagactttgggtcgtgatttccgcaagaatggcaatgggggacctggtccctatgtggggcaagctggcactgctacccttcctaggaacttccactaccctcctgatggttatagtcgccactatgaagatggttatccaggtggcagtgataactatggcagtctgtcccgggtgacccgcattgaggagcggtataggcccagcatggaaggctaccgggcacctagtagacaggatgtgtatgggccccaaccccaggttcgggtaggtgggagcagcgtggatctgcatcgctttcatccagagccttatgggctagaggatgaccagcgtagtatgggctatgatgacctggattatggtatgatgtctgattatggcactgcccgtcggactgggacaccctctgaccctcgtcggcgcctcaggtaggcaagaataggggaagagaaaagggtctttccaagaccagggacaaggggtagcttttccttcaacttctaggggctttttgggatcagagatactcgtggcctcctcccctctgcttttttttggggtgaaaagctaccctgtttttcccttttctgacttggcttagtattgacttgctatatatatataatataaatatatatataattttttaaatgaaaataatataattttattttttatttttttgagacagagtcttgctctttcacccatgctggagtacaggggtgccatcttggctcactgccacctccgcctcctgggttcaagtgattctcatgcctcagcctccctagtagttgggactacaggcaagcaccatcacgcctggctaatttttatatttttagtagagatggggtttcaccatgttggccaggctggtctcaaactcccgacctctggtgatccacccgccttggcctccaaaagtgctgggattacaggcgtgagccaccgcgcctggtccacaagttgttttctataattgaatatatgggccaggcgcggtggctcacgcctgtaatcccagcgcttttggagactgaggtgggtggatcacctgaggtccggagttcaagaccagcctgaccaacatggagaaaccccgcctctactaaaaatacaaaattagctgggcgtagtggtgcatgcctgtaatctcagctactcgggaggctgaggcaggagaatcatatgaacccgggaggcagaggttgtggtgagccaagatcatgccattgcactccagcctgggcaacaagagcgaaactccacctcaaaaaaaaaaaaaaaaaaaaacaacttgtgattgttattagtctgtgtcctgaagaatgaactttgcttctgcttctatgctgaagtttttgctgtttctggctaagatgtgacccccttttggtgtgttaggcagaggattctgatgtctggggccatggaattcttgctcacttcttcctgggaatttctttagtttctgatttggtattaagaacagagtccattgggcacggtgtctcacgcttgtaatcccagcactttgggaggccgagttgggcggatcacgaggtcaggagatcgagatcatcctggctaacacggtgaaaccctgtctctactaaaaatacaaaaattagccgggtgttgtggctcgtgcctgtagtctcagctactcaggaggctgaggcaggagaatcacttgaacccgggtggcagaggctgtagtgagccgagatcccgccactgcactccagcctgggtgacatagtgagactgtctcaaaaaaaaaaaaaaaaaagccaaaaaaaccccaaaacaaaacatagttgagggttttaggaattcagaaccaaaagagacagttgaggacgtgtataagaactttcttgtgtttttaatcccaaagttaaaaacaaactttgacctcacaagggccttgacattctgtgcttagggtcttattatttgattgtaaagtgaaattgtggtggcatccttgggtgggggtcgggggatacattagcaacactctgaaaggtcactaagcagctgcctactctgactttactacttgttcctggagattctttggtgatgtgaaaaaaggagtgattgatgtttggactggtacatggtttgccttgttgcattgagagaatgctttagaatggggtcgacagacccctgaaaatgaccacgtagaactattttaggctttgcaggccatgtatcatctttgtcgtatgttgttctttttttcaaacaatcttttaaaaatagcattatggggatgtacaaaaacaggtttggcccatgggctgccaatgctgcttcagaataaattagaaacagtgttttccaggtaaagagaaatgataagaaacaagggatgatttatggttgtcttgatggtaaggatatcctagcagctgttgctgaatttctctatatggggtcatgaccttttaaagcaaatgccttggtgctcattttcctcatatattaggtagctttggttaagagtgaacagggctgggcccaggggtagaggccccattatctaagactgagtcactcacctttcaggtgtcttggatagctaatccaactcccatgtgactcatttttattcctacaggagcaccagacctcggctggtgcaacctagagcagtggtagataacagccttcattgaagcagtctgtccagggtgttggctctactgcaagtctgctttttctgacttcctcattagtaaagagtgattggacccagatgggtgtgggtggccaggtcattctctgccatccctagttgtgctagttcacatagagttttgggcctggttcttgggtttgttccagggtagcactggacttggaaacctgcttgactagcaagcatatttgctgcttcctgttccaggctagaagagtaatacaaggtcaaacttaaacagtgaggcagtgattagtggaaaaagcactgaaccctgagaccttggttctagttgtgcctttgccactagctaagtagcctcaagcaagtcatttggtcttcccaggcacagctttgtttcttgtaaaacaaaggaaagaatgtccaatccactgcctttgtatagaaaaggatataggatagagttatctggaaattttggttatggtaattgttcttataattttgtatattaataatagaggttaaacatgttcaatacagagcctgaaaaacccagaaaagcattaccatctattgataaagaaccactgttaacattttggtgcatatcctttgagtttttttaattatacatgtaactatatcctattttccctctactaaaatggaatcttaacatactgcttaatagcctacttttaagctatctaagctattcattttgtttccgtgttttttttttttttttttttttttttgagatggagtcttgctctgtcacccaggctggagagcagtggtgcgatctggtattatacccaggaggctttttgttccatgcatggtattttataatgttagtaaatacttttccttaattttatagtaagcagaaaatttttatggttggggtggatgcaaaagtgatacataatagtttagaagacaaccaattttgttttaccagctgtttgggcatttttagtacccccttcttgatttgaagggtttaatcttgacctttttttttttttcttcgaaatagagtctcgctctgtcacttaggctggagtgcagtggcacaatctcagttcactgcaacctccacctcttgggttcaagcgattctcttgcctccgcctcccaagtagctgggattacaggtgcccaccaccatgcccagctaatttttgtatttttagtagagatggtgtttttccatgttggccatgctggtctcgaacttctgacctcaggtaatccgcccactgcagcctcccaaagtgctgggattacagatgtgagccaccatgcctggtcctgtttccgtgttattttaagaccatcttggtcatggtttactaaatgctttgtccatctgaatcactgttgcatagttgatgttgatacctgtgaggcaggccttctgctcagggcaaccttgagtatttgttgacagtgggagtggttttgtagaacaaacaatggcttatttggagagctccacacaatagattatcctctcctgtgggagccagaaagagatgagctcacagataatgggtttcttccttcctggtagttacgaataaataatagtgtgacagactcaccctctagtggttgttggtagtactgaaacaggaagaattgtctcctggtttgatttttcttactttcaattgctttctctgttcctagtggctgggcttcccaaatgtgatgttggtgaataggcttcattttgaaagagctggaggtattgtctttagaaattggaggatggaatcttacctcttaacacatttgttgagtagcagacatgaccttggaatgactgtgaaaattacttttcaagtttatacctcatcagtaccaaagccagatcctcctgtgatgtagcaggaagccctttattagtttttctctatcaatccatcttttataatttccaaaataggataaggagaagcttaaatatgaaatgtatttaaaggtcttatcctaccagttgtttcctgtgtgtaaatgcctaatttcctgtttggttaaggaactgttctcagacttctgtggcattgagtcagttgctttggttaattctgttctctgagagtttatcctgatctctacctagacaagttaataactgtcagatatcattcaaataaatgataagtagtaaggatttggttctttctttttgattagcctttcctgaatgcttgttactttctaagcctgcagacttcaaagaaaaaaatgtagttttaattaaattgcaggtgtttttaaaattattaccttttatttttactaacccattgaggaaaattgatcagtatattattcatgcaaaggagagataagatgagcacactgaaactccagttaatcctcctttgcagatgagggtaatgggaatgtccaggaagctagccataatgacttgatgtattctcttggttcttccaaaacttctcaggagctatgaagacatgattggtgaggaggtgccatcggatcaatactactgggctcctttggcccagcatgagcgaggaagtttagcaagcttggatagcctgcgcaaaggagggcctccacctcctaattggagacagccagagctgccagaggtgatcgccatgcttggattccgcttggatgctgtcaagtccaatgcagctgcatacctgcaacacttatgctaccgcaatgacaaggtgaagactgacgtgcggaagctcaagggcatcccagtactggtgggattgttagaccatcccaaaaaggaagtgcaccttggagcctgtggagctctcaagaatatctcttttggacgtgaccaggataacaagattgccataaaaaactgtgatggtgtgcctgcccttgtgcgattgcttcgaaaggctcgtgatatggaccttactgaagttattaccggtgagttctaggcctaaggaaaattgctaagtcagtgttactctctagtgatgttgagaactagagggatttccagaccttttacttttgatgaaaggttgtgaactggtggctgtgggtcaaatccatctcacagatttgtttggatcacacagcatttttgaaattttaaagaactggttgctgatgtttaaaattcagaagatttcacttaaaattccagattcttggcttctattaaaaacgtggaagagttgttaacaatggatctcttttcttccttagcagtatttggtctgaactgattggagcatgtgctctctaatttacactaatctccaacacattctattatctgaccaactacagctgtttaggaagttgtttcccaaacatggagctgtcaactgctattttttcacatgcttgtaatttcttttaattatcttcctctcttgactcaccggcttgacccatatagacatttaagcttgtggttcttgctttatttagagcagtagtttttcagattgtgggttgtgatctatttgtgtgatccgttagtgaataaaacaaaattttgtggagcataatcagcattccaagggaaaggaataaagaaaaagtagtatagaccattgtttctcagttgtgggccattttgcctgccctgccctgaggacatttggacatttgcagtgttggagatatttttggttgttataacttggaacaggggagagggagtgctactggcatctagtgagtaaaggccaggggtactggtaaacatccaacaatagacaagacagctcctcataacaaagaatcatctggccgaaaatgtcagtggtgctgaggttgaaaaactctggtatagacagatcggagagcattgagcattgcttatagttttgtttgttttttttgagatggagtctcgctctgtcacccaggctggagtgcagtggcacaatctcagctcaccgcaagctccgcctcatgggttcacgccattctcctgcctcagcctcccaagtagctgggactacaggtgcccgccaccacgcccggctaattttttgtatttttagtgttagccaggatggtcttgatctcccaaccttgtgatccgcccgccttggcctcccaaattgctgggattacaggcgtgagccaccacacccagcctgagcgttgcttatagttaaacattgtttgtttcatgatctgtatgtttattttgagctataatgtagaatatgtttcttggtgagggtcgcaaacaaagcttgaatattactataaggtatttggtcactggggaagactgagaagtgatacgatagggggattctctttgacgttcttcagacatattgtcttgaatgctcaagagccatctgatgaattgtctcttccaggaaccctgtggaatctttcatcccatgactcaatcaaaatggagattgtggaccatgcactgcatgccttgacagatgaagtgatcattcctcattctggttgggagcgggaacctaatgaagactgtaagccacgccatattgagtgggaatcggtgctcaccaacacagctggctgccttaggtaacagtagggactttgagaatatgaagatgaatttttgaggactgacttaaatttcctaaaaaaaaaaaaaaattaaaattctttagcctattctttagcctccattcctatctgtattgcatactgtaactccaacctttctatctttgttgctattctctcatgtataccacatgtacctatatcagttttcttgctgttccccacacatcctcttcacttttatgcctctttgactttgttcatctactttggtaagcttttgttcagcatctaccacatgtaaggtggtctagtcctggacttgtgtgtgtctatgtccttgccctagttatttgtatttcaagtcaggctgtgataaattcagcaaaaggggtacagagtactaggaggttagggcatgggtgaggaaggtctgttctttctgtgatgcctttctcttcttatttatctttttgtggttaaactcaagtgcctttattttattaaagttttcctgaattctttttatatcctataaatgctgctatataatctttctctctttggaatacacctctgtgtgctgtgttccattctacatatgtattatatacttccatacgagaagtatatattccatcttgaattactgcatctggtacatatcattaatccctaccccacagtgatataaacattcagaaggcagggactgttaatcaactttctctcaactgcagtaccttgcttataataggtatttactattacagtgagtagaaaaacatattcaggaatcttgtaggtgttgagggatatttaagggaggatttctggatttgagtcatcttgaagcttctggtttcccctcaggaatgtaagctcagagaggagtgaagctcgccggaaacttcgggaatgtgatggtttagttgatgccctcattttcattgttcaggctgagattgggcagaaggattcagacagcaaggtaagtgctgtcttacctttaatggctgagtgaatttcattcaccacaactatgaagtatctgtaggtcagagacctatcatctcaggctttcaagtaacattaaatatttatactgtcccctaccccttatttttgagacagagtcttgctctgttgcccagcctggggtgcagtgatgtgatctcagctcactgcaacttctgcttcctgggttcaagcgattctcatgcctcagcctcccaagtagatgggattacaggcgtgtgccaccacacccagctaatttttgtatttttagtagagacggggtttcaccatgttggcctttcaccatgttggcctggctggtctcaaactcttgacctcacgtgatccccctgcctcagcctcccaaagcattgggattacaggcgtgagccactgtgcccagccaagcccttactccttaaagtgggtattcaacttaaaacatgttttttgtttgtttgtttgtttttttgagatggagtctggctctgtcccaggctggagtacagtcccgtgatctcggctcattgcgacctctccctcctgggttcaagcaattctctgcctcatctcctgagtagctgggattacaggcacctgccaccatgcccggctaatttttgtgttttagtagagacagggtttcaccaggttggtcaggctggttttgaactcccgacctcaggtgatccacccgcctcggcctcccaaagtgctgggattacaggtgtgagccactgtgcccggcttttttttcttttttttttaaatctgtcacctatgtattttaaagctgcttagctgtcttccaaaattgtacattgtctaagtagtaagaatgatgatccaatttcagtcacacaccaaatagtggcagaagccaataagtccatagttggaccttccattagcctgaggctaccgggatttcaagaagcctggagcacttaagaggcatcctgagaagttatggattgggttatgcatttgaagatcaacattttaatacctgagtcatggaaacctgtacttgtggagaaatcacaatagacattcttttttctcattggcccttttatgtccctaagcttgtagagaactgtgtttgccttcttcggaacttatcatatcaagttcaccgggagatcccacaggcagagcgttaccaagaggcagctcccaatgttgccaacaatactgggccacatgctgccagttgctttggggccaagaagggcaaaggtgagtcttggttcctgtttcttagtctttaatgtgggatagggaaaggaaggaacactttagcttaaggtacaaaatacttggcaacagtatgggagtctgcctggttatggatgtctttttggtttgctgctttccctgtgttgtgtgcttcattcaaggtgtggtgatgggatggtggttgtgatgtgttggtggtggtggtggtggtggtggtggtatcaatgagtggggcagtggaaaatgagaactcaactaatctgggaccttcttccccatacgtcctttgcattttctgtgtttttcttttcttctctgtgcttccctgcttatttgcccatgattctgctgacatctttctcctgcatttttcttatttcatttctcttctctgctttctaccttgggtgatgcactggaagatgagtggttctccagaggtgagtggagtcttttaaggtgcttatctacttctaatttgcatgttttgattttagcttccctagtatgtccttgcctaacctttccctgtctatgcatgtaggaaagttcagttgaggaagacactgaaacaagtttagctctttggagctaatagctcacggcatgctgtttctgggcagcagtccccattatcagaactcaggacaatagcatcaacagtggtcatcctcatcttacctatctgctgcctgttttctatccttgtttctgaatagtcccctgctggaacaagttgccctcacctgccccttttcccctcgtggtgcatctgtgatcaaaaggttctgactgaaggatgaaaaatgtgccaggtggaatcttttcttttttaaactggcttaccccttttcccgccctttttcatttttgtagggaaaaaacctatagaggatccagcaaacgatacagtggatttccctaaaagaacgagtccagctcgaggtaagttatcttctcagtctccaaaggtctcataaacatagtacaaagataagatatttagtaacctaacagcagactttatgtaatacgtttattgtcctctcttttccaacttacagatttgaaatgattgtgaaagtattgggaagctgcatagtattatagcagtaacttaaaaaggactgcttgttaaggcagttattcaggttacttgaggatagaataaggtcctgatggtagtatagagcagaaatttaggaaccataaatggccactgtagtgcctgagacttaaacctcactattaaaagaggcttctttaccaagaaagatactttttaggctgggcacagtggctcatgcctgcaatcccagcactttgggaggccgaggcgggcagatcacctgagatcaggagtttgagaccagcctggccaacatggtgaaaccctgtctctactaaaaatgcaaaaattagctgggcatgatggtgggtgcctgtaatcccagctactctggaggctgaggcaggagaattgcttgaatctgggaagcggaggttgcagtgagccaagatcgcgccactgcactccagcctgggcgacagatagaaactccgtctcaaaaaaaaaaaaaaaaaaaaaaaaaagaaaagatactttttgtactttactaaaagaaatttggatctttatattcatcaatacagtgagtccaaagttcacagctctccatggatataaaaattgtaaacgtttaatctataatggacccttgtagtaatcgcagaggtgggaagaatgactgggttaagttagaaataattgatttgagatgaggaatttttaaccttgagtgctgtcaatgagctaaatggagcccctgagcgctcatggtagaaccaaaggcaaagctatgggagaggaggcaagaaggaaggaaagagaggagttgagtataatgagttgatatttgttctactcttaccatggattcattattcttaagacatggaatttggcctctaagtttgctgtagagagtgtgagagagtttagggaacctgatggtatagaagcataaatccatcaactgagagtactaaggctggactccagccagctagagcctggtttattggtactgattagcaccctctgcttctatttctcttttgtgcaggctatgagctcttatttcagccagaggtggttcggatatacatctcacttcttaaggagagcaagactcctgccatcctagaagcctcagctggagctatccagaacttgtgtgctgggcgctggacggtaccttttagaaaagggatttggagatgggaaaacttagataactagtttgctgccatttgtaatttgttccacccctttctatttgctattctagtatggtcgatacatccgctctgctctgcgtcaagagaaggctctttctgccatagctgacctcctgactaatgaacatgaacgggtggtgaaagctgcatctggagcactgagaaacctggctgtggatgctcgcaacaaagaattaattggtgaggagttgaatgctaactgttacctcaaaatttagtacagtgtttgtagtccagcaggtgcctaataatttattgaatttattgaaatgactgaagggaaggaccctcccccgcttcatagtttatgaatgcgagagttggtaagggttttagtttaatggttcttggaaagaaaacaagtgacaactcttcaaaaataaaataataattgctattatttattgagcacttactttgttactaagcgttgttaaacacttctgtgtttccatttaatcctcaccactttacaaaggtccatttttttaaataggataaggaaataactcatggaagttaagtaaattgcccagagttaatgtagctagttagtagcagaacccagttatttatttatattttaaattcataataactcttctattaaattattataatattcaagatattttcattagagtatctgaaaggactgtgtagcttatttaatatacagtatttacactttcaatgtggttgaagtagaaaagaaataaaggaataggtaggacagtaaatccatggctatttcaggtccttagcccttttgatatgataatcctataggataatgaagttgattcatgtggacagcacctacacttgatatgattaatgcagttaagtataatgtaaggctcttcatgacctgacttgatcttttctccctgcatacattctttcttactaggtaaacatgctattcctaacttggtaaagaatctgccaggaggacagcagaactcctcttggaatttctctgaggacactgtcatctctattttgaacactatcaacgaggttatcgctgagaacttggaggctgccaaaaagcttcgagagacacagggtattgagaagctggtgttgatcaacaaatcagggtgagcttaccacctaaaattacagtcaaaagaatttgagtgagtggagagttgttttcctcttttggttactaagaaaggaaatttccccttatttacgtgtaatgtgtgaagagctattgctctattatctgtcttaatgttgatccataaattgataatagattcatgtcaaacttttcttgtgtcgctatttgggatagaatacaggatttggtaaaaatttgatttaacccattttggcatttatattcttttttgtttgtttgaggcagagtctcgctctgtcacccaggctggagtgcagtggcgcagtctctgcaacctccacctcccgggttcaagtgattctcctggctcagcctcctgagtagctgggactacaggtgcgtgccaccatgcccagctaattttttgtacttttagtggagatggggtttcaccgtgttagccaagatggtctccatctcctgacctcaggtgatccacctgcctcagcctcccaaagtgctgggattacaggcaggagccactgtgccctgcccctggcatttatattcttatgttattagaggatatagggtctaagcttttttcctgattttatatccaaattccgtatggtgttactttcctccaaaggaaccgctcagaaaaagaagttcgagcagcagcacttgtattacagacaatctggggatataaggaactgcggaagccactggaaaaagaaggatggaagaaatcagactttcaggtatagtaacttttgagaccaagacttttactttttttttcttggtcccaggataatgcttctgttttctttcgtttcttccatttcaccatcatgctaaacctattttttttttctttttcggagacagagtctcactctgttgcccaggctagagtgaagtggcgcaatctcggctcactgcaacctctgcctcccgggttcaagtgattcttgtgcctcagcctccccagtagctgggactacaggcacatgccaccatgcccagctaattttttatatttttagcagagatgaggtttcaccatgttggccaggttaatcttgaactctgagcttaggcaacctgcctcggcctcccaaagtgctaggattacaggcatgagccatcacacctggcctcatgttaaatctatttttgacccatatttcttaattaggaattatttggccaggtgtggtggctcacacctgtaattccaacactttgggaggctgaggcaggtggattgcctgagcctaggagtgtgagaccagcctgggaaacatggcgaaacccatctctaccaaaaataaaaataaaagtagccaggcgtggtgttgtttgccagtagtccgagcaactcaggaggctgaggtgggaggattgcttgagcccaggaggtagaggttgcagtgagccgacatcacactgctgcactccagcctgggcaacatagctaaaccctgtctcaaaaaaaaaagaaaaaaaaaaagatttggtttactcctcaaaaggatgatgtgtctacaattcatttgttgccgacacagctcaggtatccctctatgtcataacatactttaggtgcaggtgatgatgaaggatgatggcctttttgacttttgcccaaatctaccgtagccctttgagggaatttttactattctctgaaactgtattttcttctgatagtgtcaatatttggatcctttgtaatctcctgttctggaacacaaatagaagccataatatcctagtttgtctcactgtctagggtatttattcaactcttataagttgctttttcatgattctatttgggaataggaacctagaggtttatgcccattagagcataagatagggtgaattcagtattctgtcacattgtcgcatttgtgtttgcctctaggtgaatctaaacaatgcttcccgaagccagagcagtcattcatatgatgatagtactctccctctcattgaccggaaccaaaaatcaggtgcagtatccagaaggcacaccctctccttttagccactcttgctgttctaggtggcttactaagaaataggatatatattatttctgaattagctagccttttgtgggaggggaataattttccactccaggatcctaacgcagaaatgggtaggtcttaagcattagaaatcaaaacaaaacaggtaattagcctgaatgtgattcctttatcattgcttgtgaacttaaaacactggaaagtgaactctagtctgttttgtctattttttctccttttaaatttccatttaatacttaatattgtaatagatagttactattttaaaattacaaaatataaacaatcagaaaaataacaaaaaatcacttgtttcttttatccagagaaaaccacttgtatcttttaaaacatttttatcatgtgagtaaacacatttttcctctgagatgaattatatattttgttttgtaaattttttctttttcacataaagtgtatattgtgaccattattatcttaatcacacttggctttttccttgattattggttcttaaagtgtggtctgagagtcccaagattgttacaatttgtactgatggcacagaaagcagtgatgcttcttgctggtggcttagcacaaaccagggcagtgacataaagctgaatgagtcattgtagtcttcattgccactcacataggtaaaagcagagagccattttcacttaactggagaagaaaaaacatcaggccaggtgtggtagctcatgcctgtaatcctagcactttgggaggctgaggcgggcagatcacctgaggtcaggagttcaagatcagcctggccaacatggtgaaaccccgtctctactaaaaatacaaaaattagctgggtgtggtggcagacgcctgtattcccagctactcaggaggctgaggcaggagaatcgcttgaacccaggaggcggaggttgcagtgagccgagattgcaccactgcattccagccagggcgacagagttgagactccgtatcaaaagaaaaaaaaaatcacttttattgtttttctacccttgagtatacatctttttaatattctgtgctgatgaaatagcatattaaagcatgatggttgtcttaaggaaatgtacttgtgttattgtttcagttactagttagactagccactttttaattgtttatttatttattttgagatggggtctccctatgttacccaggctggtcttgaactcctggggtcaagcgatcctcctgccttggccaagtgttaggattacatccggcgctcagccacactagccactttgtttaatggaacactgtttttacttggaaaaaaatgtgtggtagacaaagggattattcagatgtgcgcatttggcagacattttctcaaaaacgaatgcgataagcttgttgctttgaggaaaataacacagtgtttgctgcctgagctttcaagtggaaattgtagttttgaaaaacttttatttgccactgtgagcctggtaacttcccaatactgaaaagacttttctaggctgagtgtagtgtctcatgcttataatctcagtactttgggagactgaggcaggaggatcatttgagcccaggagtttgagaccagcctgagcaacataatgagaccatgtctgtacaaaaaaattagccaggcatggtggcacattcctgtagtcccaattactttgggaggctgaggcagggagatcacttgagcccaggtggtcaaggctgcagtgagctgtgattgtgctactgcattccagcctgggcaacagagcaagaccctgtctcaaaaaatacatgattaaaatgaaaaaagacttttctaatgaaataaacagtgatgttaacgaatgtgatttcaaaatattgtgtaatgctatgtgttagcattttgaatatctggataacttgaagcagtattttgcaagtgacaaatacatatgtcaaaatcgtacataggtaattgatccgttaaaagtgcaagatggaccaatggattttaactaaacagaatatgaagtgattgttaattatagattccacattactgtcaacctttaagaaactactactaattagtatactattaaagaagaataaccacaattatctgaaaagactattaaaatcatcctcttttccaactttttatctgtgtgaggctggattttcttgatatacattaactacaataacatatcacaaaagattgaatgcagaagcaggtatgagaatctaagccaaatttcaaagagatatacaaaaatgaaaaggatgttattaaagattatttatgataacatgtaagaagtttaccattaagtgaaatagatactttaaacttgtcagtatggtaacaattaatacataaaactcacaccaatgaaggttctttagatccttataatttttaagactgtaaaacggccttgagaccaaataatttgaaaactgctagtttagatggaattgttttttgatttaagagtctgtaggggccaggtgtgatggctcacacctgtaatcccagtactttgggagactgaggtgggagaatcacttgagcccaggagtttcagaccagcctgagcaacatagtgagacatcatctctacaaaaagcttaaaaattatccaggcattgtgatgcacatagttggtgctaagtagaagtgtgaatgaagggaaggaaggaggaccagagagcaattttcatgatgtgtacagattttgaagaattgtttttgacatggataactttctgacttcatacagataagaaacctgatcgggaagaaattcagatgagcaatatgggatcaaacacaaaatcactaggtaggtgattaattcctgcctaaggatgtggagtaatatttcactggctaaggagagctgtctagctctatagttttttttctaatacccttaccatttaccatcctgggagagcattggctgatcatttccattttgaaggatgtaaggaaatttaataaaatctgatccgtctactttttctacattcctacatgctcaaaggttttcagaaatctttctatgcctctcctattactacacattcaagtttgtagcccattatattcctaccccagtctccttctctggagtgaatggatacatctgtttctgcccaactattctgcttgctattctatctattcactctatagtttgattctgctcatgtaatacctcttactggtatgtccttcccttttgtctttctaaattctctttatctccaaaggcttaactcaagtcctgttttcccttgtcaggtccttcctaacgattgcagcatatttcactcgctcttcttttaattcccataaccttttcagacaaacctcttgtttagctttattatgtcatattctgggtattttatacatattgtcttccatcttagattcaagttctttttttgagacagagtctcactcgttcacctgggctggagtgcagtggcgtgattctcatacctcagcctcccgagtagctgggactacaagtgtacaccatcacacctggcttattcttatatttttagtagagatggggtttcaccatgttggctaggctgatcttgaactcctggccttaagtgatctgcccgtctcagcttcccaaagtgctgggattacaggcatgagccaccacggtcagccagattcaagttctttaagtcggggaccatcagactttaatgcctttgtggagcatttgacaagctcagttcccaacagtgatgcctaattacacctatctgtttgatatacgttttacactagaggggaatgtcatatttctgtgtacttttttttttttaaccagataacaactattccacaccaaatgagagaggagaccacaatagaacactggatcgatcgggggatctaggcgacatggagccattgaagggaacaacacccttgatggtaaattctctttatatactgctatctgtctaaggctagttctattttgaagcctatgtgttttgtgaaacacaaaaaaaagtacagagaaagatcgcatccttttctggtaggggttttcaggaaaaagtaagagttctgactcatgttgggatttcttgggccgttattctgcagtggtcaaaatgggggaagcatgtctgtaaaagtgttactgatatgactaacactaactgatctactttcaaacattacctttttcctctccctccctgtttatgaatgttttgcccttctcttactattatatcttgttttgtttgagtttacaaattttcagagtttccctagctctggcacacactcatgaggttcctgtctctactcatactaacaaattgcatgtgttcacagcaggacgaggggcaggaatctctggaggaagagttggatgtgttggttttggatgatgaggggggccaagtgtcttacccctccatggtatgtccttcagtcacccccaagattgttcttgaggaaggaggctcctgagtgccagcaacttgtcaatcacgctaatctgatcaggccagagactaagtagtctcagccacatggggctcgaggggttctgcttttgtgattattacctcttacgagtctgggacatgcagctggtgatctgattctccgttatgtgctgctttcctttctccagatttgctcaacttttttggggggggtctccttaatcccaaccccattaacattctctctttctcttttttctccacagcagaagatttagcaccactatctccgttccatctgggcttatatgtacttttattttttggtggtgaaattgactgatgattttcctttttcttcgctggactattgtgccaactgccaggctgcctcctgcccttacagccctaagtggctgccttctttccatcaactcccaacttcttcctgtgaagtttaattgtctcaacgcctccccctcccccattccctccatttttctcccaagaaacctgactcaattatttgcatattttgagaaactgctgcagattagttctttttgccagttttccctggaactcctggccttttgtggaggggagggatggagagaataggaatcttcactagaagccgtgggaagaattggaagttacatgctgtatatgcaatgtccagcagtctgataaactgacgattcttaatcaagatttttttcctgatggggaagggacttttattttcttttagagaggggaaagtgtgagctcttcccttattcctaatggctatttttgaagcaaagaaggccagcaacattggcacatgccacctggcaaaggacccttgagtaagtgaaggtctcctaaaactgggattaagaaaccttgctctcctcatctccaaggcagggaccatcaagaacctacagactccatctcttctgcaagcctcatgccaaccctgggctattgctgctgccccttaaacacaggctgtccttaacccacctctcctgccctgtgatatgtctgctgagttggcctggccatttccaagaggctgtagaaaggggagaatgtcaaggaagacttttggtagagaaggagcagaaagatgtgtttttgggaagaagaagacctctaggaggagctagtaggaatgtacatgaagcaattagtctgaaactggcttccccactcccccgtttctccttttcctatccttataggcctgtcccttgcctctgccctggattggttggcaaactaaaggacttgatgtacataactcctgtcccttttcccttacaaggtggggattgcccctggctttgcctcttctttgtgcctttggcctggggtgcatctcctcccgcccttccatgtgcctttctttgcctctgcagtctcatttctcataattttgcaaattatattttgttgctttcttacctactattggccctaaatagcagaaagaagagaagtgaccgagagaacctcagattcttcattgaggattggtatagccatgatttcagtcatagcaagcttttgctcaacagcatatgggtgggattttgcaaaaatcctattctgatgaatctcaaagtaaggctggtaagagaagtgagtggtgtgactcttactccttaggtgcccagaatttaccatcatctctgaaggagttacagggaagtggtctccccaattctcccctccctccagtattgccccctctcactttagcatatattaattagcaggttgggctagagaaatcagctgctatgcgggttgattattattattatttctaatccttttccttatttgccttctactccccttaatctaatctaaaagctctgttccatgcaactggagttccttatccctctcttccccttcccttatatattgaggctatggggtaggagaaaagtgcacaacccaccaccccctttactcgtgcattaaaatttcttatttacccttttcccccttcccatttcttcccactttcatctaccttttctggcaaaaaggagccttttgctctctgtgaccctaagagcacactgcacagggaaaattgccccatccagacctggctccactcttgatctctcttgtcctcttctgctcttttcctggtgctcttttttctcggtggggtgtgggtaatagaacagccgtgggcttttggggacctttaacttttttttctctcttttgtttataaaaaacactaaacattcaattccagagaaccaaaaatcccaccttcccaccgaacactactaaggggcttgtgttctgctccataccttttctcttttctttctgtcttgttaatgcttttaaaaacaaatgagttttttatataaataaagtttttaaagtgtgtatgtgggggggtctgtgtcatttcttcacttcaagctgttatttcttccctgctttgcatctttgttacttccttatgtatcagtgtcctttccagagcaaccagaaggaggttataccaggatttattttgagctcagccccaactctttatcaagcaacattcttgttaactatatgtgaaacattttttcttctgaagattcttaaaaattgaatgtggctgaagttgaacatgggagcttattgctaatttagagataggaaactgaagcataaagaattaatgacttactttaattactggaattcttctgcaacatttgacaaaactaaccttgaataaggcccactgtaatacgtagctctcttaaatataacacttaggactagaagattagaaactaccaatcccaactacgtaataggaaaatgtaggatcaaaaggcccatgtatataagtactgaccactgggccataatgttgcttctcaggctatatgcagtcctttagtcagaagtcaataggcctatttattaatattttacagaccatattacctggattaccagggactatctttgctgcagagatcaagggttaagatctatgggaagatacttatttttctgaggtccttatgtcctgtcatataattaaagactcaagagaatttatgtgaaatgctttctgtatgcccaaatctttagattaaaattatatagctgctcctgatgatggtcctgtcttgttttattgaactaggacttgggtatgaaaactttcatgggctagtgagaccaggaaatcaactagcttttaaagcttgatttgtgtctaacaattgtagtgttagattagaggttgaagtacaaagccaaaaagctattaagagtttactttccaaagagttttgatagccctgcttgagatgatttttatctaaatagaaaagcctggctgcttgtcagcaacactttatttccctgttatgttcttatcctttggcattgagctagatacaaaccctactcttctctcttccttctggattggtccatttgtttatctcattcaataaatatttgccaagcacctcctatatgctaagcgttgtgtcaaggttaggtttagattagagagtgaaacagatggatcttttctcatagattgcaatccatgagaatcctctatagctaagatctatgatcagacgagatcgtgtgcgttcagggtgatatggccatagacaagatctatgatcttaaaaacacttctctctgtgccatatctaaatacaatgagatgttacacagaatgatgtgtaaaggccctatctcacaagtttcttgacactgatgtactttgtgacagaggtcaaagctgggacctcacttggccacttttttttttttagacagagtcttgctctgtcactcaggggcacaatctcggctcactgcaacctcagcctcctgggttcaagcgattcttctgcctcagcctcccgagtagctgggattacaggtgtgtaccaccacgcctggctaattttgtatttttagtagagacaggatttcaccatgttggccaggctggtctcaaactcctgacctcaagtgatccacccttcttggcctcccaaagtgctggcattacaggtgtgaggcactgcgcatggccggccacttgtttttcttgctgaactaattttctttgctacaaactggaatcacctcacccaggaagaactaagaaccagtctttccatatcatttttttctcattttgtctatttttatatctgaagcaaaggttcttaatattttcatagatggaattgactagacctagccctgtatatctgagcaagttacataagaattccctgtatgcttgttgaaaatgcagagtcccatgttccatttccaaaaatcgattcagtaggtgggactgaggaatctaaaatcatggtaagtcatccaggttatcctctttttttttgtttttgtttttgtttttttttttgagacggaatttcactcttgtcacccgggctggagtgcaatgccacgatctcagctcagtgcaacctctgcctcccggattaaagcgattctcctgcctcagcctcttgatgagctgggactacaggcacccgccaccacatccagctaatacttgtatttttagtagagacggggtttcaccatgttggccaggctggtcttgaactcctgacctcaggtgatccatccacctaggcctcccaaagtgctgggattacaggcataagccaccatgcctggcccatccaggttattctgatgtatgtggtcagttaactgtgacttaagggactgatctagtgacttgcttaaggttatagcctcaaagtggaacccaggattactggcttcaactccactggcagtaatactagcatggtgaatgtagacaatatgatgtggtgatcaccattttaagagagcattcatagaggaaactttatctcaaaggaatgcattgctttcaatagagtttgagataatggtaagtgataggttggtgtgtggtatctgggtaggagaagcttctcatcctgaaaatcatatgtaggtaatgctcaggttgctgaggcaggaagctagcccttaatttggggtcctgtaggtcacagagaatcccctggaattgccgactttgacttaagtgtcacttctagctacaa

SEQ ID NO: 25123 - DNA, 81085 bp, Homo Sapiens
tctctgtaagaagcgtcatctggtaagatgatcaagaatggtgcaaagcaggatggggagtttaaaattgtttccaaatgtgggaatgtaaatgaatataaacatgtaagattttaatataccaaactgatcagattctgtgtaatttccaagtttcttttttctttcaaaactcctctgaaatctgactgtccacaaaaacttactttatagaattttatgtgatttatttactcagatattatactgacctcacatccagtagtgaaaacagattttattgtagaatctggaaagatagagggccatataggttgtattttcagttttgtttatactaacacgtgtttacaacccagtttaatttacaccctgtattgtattattgttgtcatatctctgtatgcatgtaagtataatatgtgttggcaaaggaaaattttgagtaagaagaagctctctgatctatttgattcaatatgtatttgagtgtctaacagacactgttttagacactggtgatacaacactgaacggagcaccaaatactttacagcgtctcctggagctgttgtcaagacatactttccaaggggaatatttcagaataggtgataactagtcaacgaaggaaaagtaccttagtcatctaggagagttgtacttagagtgaactgaaataaactaagctcacgaaagacagagattttttgtttggcttttgtctgttgcattcactactgtatctccagggcccaaaatagtgctcggctcataataagtattcagcaaatatatgttgttgattggagtgtttgttttgaatttctgtaatcaaacacataccttggtaaattatctttacatcttgctagttgaaaattttatctcagttgctttgtttttaatgttaccttgctttttgtttctacttgtgccatacatcaggatgctggaaaagcttattaatattgacagtcatatggttatctgatattgaaaagaatagatttggaaaggaacctaagaggtcatcttttgttcagcttcctgcctaggaaaactaagtaagatgattaggtatgtatatttaattagtcatttaaaaaaaaaccaggacaacataattgagttccctcttgagaaaatggagaaaggtacttaaccctagctataaagggactaacctggaaattttagaacttctgtgtgggaaagtggaaaaaaaaaaaaagcacaactaagctgctctttgttgatatcagaaatgggcctgtcattcattttggcattgaagcatagcctcctatctcggggcaggactgggacatttttttcctcccacaagagctggacagttattacaggttcaaaaagccccgaccagtttttcaagagtttctcctcctcttttccccctgaaactcgtggtgcttttgctctgctttcaagatgcattaagtctcctgctttgtgactgctttggagccagcagatactctgatatgtataattcaaattatgcaggtttcacgagtaagtttaatcttattttttaagttagttaaaaggcaagtgatatttagaaaaatgttaacttgtagttatttcaccctttttactttaagcatttttattgcttctcggccttttggctaagatcaagtgtgtactttaagcattttttaaaataaaaatatccttttaatttaataagaaaacaaggttctacatagaaaagccccttcatctaagacctgcacttttcaatttcttttgcgatgtctttgttgtaaacagtattcatatgtcttttgaaagccagttaactaaacagttttcttgagcatctttttagttttactgagaagtattttaaattgagcttttctgagctcgattgcttacgtctgacacagtctcaagtttccactgaatggtaacaaagactgtagaatgttgttggtactgcagtgagaggcatgcttccttagaccaggtaagagagatcagtttgtttctcactgctgggtgagtttttacagctcttattttatattctttaagcagcagcaatattaaattgataaatagccaggagcacgctgatttcaagacgtccttgcttgttgcagacagaaaaactacagggttatgtatgggggttggggtggggggggaggggaagaattagtttattactcagttacttatataaattaattaaaatgtgaaaataattctggagctcagttttcttaattcaggaactaaagcagcagttgaggaaatcagtaattttaaaggtacttcatggttattacttgtgaaagcaattcaaaggatagtttttactttcatttttttccccagtagttaataaaataagctttgcccttaactaaacattttttccacttacgaaaacttttaaattgccaacagcaaaatatacttcccaaggatccttggaaatcaacctgacacttgaaaaatatttcagcttttatagctgtttcattcctttttttccctagtacatttttcttaaaagtatttgtgctttgaaaatgtcagctgtattctaatgaagcttaggcattgtttgctcataaaggggccggtgcattccactgctttatggtttattatgaggcacagtgtgagagtgtgggtggcaccatttggtgtctgcctcttggggtagtgactgccattatgttagccttggactggcaaagaaaatatagcatacaagatgctatatgaatctggatactgtgaagaaaatcttacccctaaacaattcttaatgaccccggaatatatgacaacttgattgaattgatcatttcaattatacccttgaagtttgcattttagttacaacgtatattctattagacacgtcttattttttgatatataatagcatttagtcattctttgaagttcaataaggaagtgaatgtttctaaactatgatgtttttaatagatacagtgaaattttaaataatacatttacttaaaaaagttttaaggaacttagtgtgggtggggagcgggagtgggagagggagagggagagggagaggaggtcaggcagagagtctttcttctttcagttaggaaagccctggtgaagaaaaaaagcaacagatgtttcttctgttacaattgaggttgtttcattcaaaactcagagtagctggaatggagagaggaggtcataaatctgatttaatcagtgaataaataaaatttagtcatttaaaatttattattttatattcaggaattgaaagtcatagagtaacaaaatgagtaacatacccaatatttaaaaaaaaactttaaatattgcctgtagcctgtataattaatgaaaatgtgagaaaattaattctgttgaacttcacttaaggaaaaaattgataattaaatcatatagaccatttttttaaagcctaagccatctaaaatatagaggaaacacttagttgcaaaagtttatcactagacagtaggtacaaaatctcaaaatgaaaataaaatgagaaacatcagttacatatgttgatagatgatttcatcttctgtgagaagctgaggcttattcctaagacctttgcataagaaatatgggagtaatattttgggtttaattgaaatgatatgttgcagtttgcctctaaaaagaaagataataagcttggattggttgctaatggaaagaggagaatgtttatctgctgaaaagagtaggaatgaagagtgtggaagcattatgcgtgtaatgaaagcagtcaaaattttgaaaaacagtttttgaatttttggaattcataatgaggaaagtgaaaacctttccttttacaagtaacacaaagaagtcctatgctgttgtataatgtgcgtgtatacacattacaactttattcatttcttaagtttgctcttgaaaaatcagtgctgagcaccagctctttcacatatgaggcacttattcaatatttgccataccctacactggaaaattcgtagtaatttacagtagccaataaagtttttgagctatagtttaaaatttgcatatggattaattattatacagttttctaaataattggcctaaggagagagaaggctggaaaagatatcaacattcaagcagattattaaaaattcctcttgctgttagctaagatctgtgggcttacctgaagttatttttttgttgtttttttttgttgtttttttgtttttttgagacggaatctcgctgcaagctctgcgtcccaggttcacaccattcacctgcctcagcctccccagtagctgggactacaggcgtccaccaccacgctcagctaattttttgtatttttagtagagatggggtttcatcatgttagccaggatggtctcaatctcctgacctcgtgatctgcccacctcggcctgatggtctcgatctcccgaccttgagatccgcctacctcggcctcccagagtgctgggattatgggcgtgagccactgcgccggccagaagattttcttttcttcaaataatgatgaccaaatttagagattttgaagtttgtttgttttttgagatggagtttcgctcttgttgcccaggctggagtgcaatggtgtgatctcggctcactgcaacctctgcctcctgggttcaagcgattctccttcctcagccccccaagtagctgggattacaggcatgcgcccacacgcctggcctttgaagtttattgaatcattatttcaattaagattcagattctaaaacttatctatgtacattttgcttatcttaaggaatagcaacatgtaatggttgaggttttttctctctaaaataagtaaaacaatttacatggactttaaaatggatttacaaactatagatttgcctaaagaactttttttacaattctgatcaaagaacagaaattttgatggaatagacaggcttaaaaaaaagttggtcactccacatgtaatacataactgtgacagcatcatagattgtgattataaaaaatgtgtatcacttacaattataaatgtagacatgacaataagttacttaacaaggaaaacagtatcagcaacagcaacaaggacatagtttggactcctagcccttcaaattgagaaatgaagaccaaaatcagttgaattattttaagatgaattcccactgcctctgtatgtgtaaattatcttggaattattgaatgtgtggtcaaattatggttgagaagagcacattagttttagcatatatggagtatagaacatagagagtataattttctatattatattgttgatttatactctatgagaaaccaaaccattcaagtttgttacctggaaattggttgggagtgtctgaaggaaaaaacaaacaaaaactttcctaattcatctgccatttagaggtaattccttaattgtctttaatttctagtaaatacttccagtcataatcaatttaaatattaaattaaatctttttttttttttctttgagacagagtctcgctgttgtcgcctgggctggagtgcagtggcacaatctcagctcactgtaacctgtgcttcccgggttcaagcaattctcctgcctcagcctcccgagtagctgagattacaggcgcccgccaccaaacccggctaatttttgtatttttagtagaaacgggatttcaccatgttggccaggctggtctcgaactcctgacctcaggtgatcctctggcctcgacctcccaaagtgctgggattacaggcatgagccattgcacccggtcttaaattaaatatttaaaatgtatactgaaagaagacttcaggagtacctgaagttcttgctttatgtatgaactctttatcacaaaactgaggtcttagaggaacctgagccttacctatttattgtaacccgattcagaatacccagagaggtcaatgatttagccttttttttctgccttatatatacatatgcaactagaaataacagccaccttgaaatttctcatctctggagtggagtaagaggggagatgtgcctgatgcctatatttctctgaagagaaaaccttttacattgttgaggagcaggtagaccagtatgagtatggtgctttgagtatattatgaattaactatgttttgtgaactgatccaggaacctgtcatgtaattatgttgtttctttctaccaagtttcaagaaaccaattttcaaatgaatttttacatggtaactctaaagctggagactatcaaccggggactttggttttggcactttgctcacttgtagtgaaaatttggcaactcttggcaatttctctgacagaaaaatgaacagaccactaagtgagcacttactgtgtgccaggtagacacagtagaacttatttataaaagttctcaaaaatcttttaatgggctgggcatggtggcacatgcctgtaatcccagcacctggagaggtaggcagatcactttaactcaggagttcaagaccagcctgggcacatggcaaaatcctgtctctacaaaaaatacaaaaattaactgggcatggtggcacgcacctgtggtcccagctactcgggagaatgaggtgggaggatcccttgagcccaggtcagggctgcagtgagtggagatcatgccactgcactccggcctaggcaacagagcaagaccctgtctcaaaaaaaatttaaaaatctttaatggataaatttttaatacaaagagattttgttgacattgatgtctaactttaagatttcttgcatttcacaatgtgatttaaatgtagcttcagtaatagccctcaagtagaatatattgttgagattataatatcaataacttactgcagttttgagtgagctacttagtgcatggtattataaaacaacgatcccctcttttatttgctaaggagaagaactgctttggaactcttaattcatgggtggtccttggtccctttgaatttgtatcctaaagttttacgtttattttaagtaccccccagccaggcgtggtggttcacgcctgtaatcccagcacattgggaggccggggcaggtggatcacttgaggtcaggagttcgagaccagcctggacaacatggcgaaaccctgtctctactaaaaatacaagaaaaaaaaaaagccagatgtggtggcacacgcccataatcccagctactcaggaggctgagacaggagattcacttgaacgcgggaggcggaggttacggtgagctgagatcacgccactgcactccagcctaggtgacacaacaagactctatctcaaataaataaaaaaacttattttaaaaacccaactttttttctttttcttttctttttctttttttttttttttttttttgagacggagggagtctcactgcgttgccaggctggagtgcagtgacacgatcttggcttactgcaacctccgcctcccgggttcaagcaattctcctgcctcagcctcctgagtagctgggactacgggcgcatgccactgcgcccggctaatttttgtatttttactagagatggggtttcaccacgttggccaggctagtctcaaactcctgacttcgtaatccacccgccttggcctcccaaagtgctgggattcaggcgtgagccacctgtgcccggcccaggaacccagctttttaattcaaagtctgtctgcagtcatggtcacctcttataaatattagaaaaatatctcacttaactgtaaatttaaaaggatttatctgttacccctgtctggctaccctctcggactgtgagcttcttcatgagagtaatttccagtgaagtactcttgggtatttgagtactcataaattctgatccttgtggttgcactcagctgtcttgatcaactctagccattcagtggctgttggtatgagataaaatgtgctgctttctgtgctttctcttttactaggcctgtaaacagtgtctgtgtgccatctggtgggtgtattgactgttgtgatggtgctaacagtggtgattgaaaatgggctaaacagtgaaaaaatataacacttaagaacaagaaacagaagaaataagggtcactcagactcttttaaaatgagaatagaaataagttcagtgtactagagtccacttgcatttcgttatttccttaatttgaacaaagagtcttaccagaccataagaatcatctgaggcacttaaaaatacaaattctccacctaatttttgaatctttaggtgtccagtggagctcaggagtgtgtgttttgaataagagacacctctcttccctttgtagtgaatcttgtgatcactcatatttgggaagaactgccgggaaggattgggaggatcaagttgtttgaggacatacagtaaacttcctcaattattaatcagaagatacatttcaaaactaggaaattttagttgagcaggtggaagaaaaatgagaaattgaacaattaaaaagtttccttgactgaatatgctaacagaaaaaagatttcaaaaggacatattttaactaaagataaagaagccaatgaaaaaccagcagtatcaaacctacagatgagacaaatgtttttgggtgaacacttaaaaaattattgaaggagaagggccctgcaagtgaccttagtgatttctaagatcttttaggtttgatgaactaaatgaaaccaattataatattccagataccagagcttgaattgaggagtttgcttaagcaatgaggagatactgtttaaatcttgcaatgtggtaagatggagaagaaaaaatgtttttctcctttcaaatttaagaatttagggcattcatggttctagatacaagaaaaggagggagctagctaatcgtttttagaaagtgtcccctaagtgaaaatgttcaacaaagccaagagaacaggtttgatcttctagggaaagtatgtaggaaagactgacatataagatttattcatttagaaatatgaccatagagctataaatacacttaatattatggtcatttcaaggatcctttggaaagattctggttaggtgatccatttgggtgaatcctgaaagttctctatgttctggcagctgcagaaacattcaggcttttccttccgtgtatgtgatatgtaggaatgtgcgtgtcagattttctgtccttatctttgcacaatgggatgcctgatctccatttagaaccaaatagaaagaggaaggttccagaggtcactttaaccattatactttggagatattatgaacttttttatcttctctttgtcacccatcccaattatagtgatgttgaggtcattcagttaaaaagttttgtaatagtgattaactttgtatttaatcttagtgacttttggcgaacatggttcagtacaaatgcatcaaaataaaacataacagtggtgtaatgtgcatgtgcaggtaggtaatactagttagtaaataaagtgaaaactatttttttttttttgagacagggtgttgctttgtcacccagatgggagtgcagtggcatgaacacagctcactgcagcttcgacttcctgggttcaggagatcctcttgcctcagcctcccatatagctgggaccataagtgtgtgtcactacacctgggtaattttattatttttttgtagagatgaggccttactatgttgcccaggctggtcttgaattcctggactcaagcaatcctcctgcctcagcctcccaaagtgctggaactgtaggcatgagtcatcacacctagcctgaaaactttttttttttttttaaagaaaaaggtatatgagtatatttaaacataaaaatgaaggaagtcagagtaactgcaaagtttgtttttatttcatttacataggtgatgctgttgacctacagagcctgagttactttcttctttctttcttttcccccccgagacggagtcttgctctgttgcccaggctggagtgcaatggcaccatctcggctcaccgcaacctccacttcccgagtgcaagcaattctcctgcctcagccacccaagcagctgggattataggcacacaccaccactcctggctaattttttatatttttagtagaggcagggtttcaccatgttggtcaggctagtcttgaactcctgacctccttatccacccaccttggcctcccaaagtgctgggattacagacgtgagccaccgtccctggcccaagagttatttttgaaatacaggtgatagatatcccctgagtcatccatatcctttctccctagtctactttgttttcagtggcatatattgctttctagatggctggctaaaattagaaatacagtcttaaggttgtgaaatcatttctctttgcaaaacaaattgccccttctagaattgacctgtgacttgacctcttcagtactgtatttgaagctaattgatagtcttttacagtagttattaacagatagttaaaaggtagtacaggaaggaaggaaatgctctgacactactttctttttctgactcagcttattcttttgtggaactgttaatcatgaatgaaacaaaaccatggggaactgacatatgaagaggcagatcagtggagcagaatagaaaatcaataaattgacccaaataagtaaactcaaggttgcatttcatatcagcatggagtggattattcattaaaagtggctaactcagggggaaaaccttggatctgtcacttcttatatcagataacttccaggtgggtcaaggatttataatttaaaatgaaggctttaaaattgtataagaagatgttggggggggtgtttaatataatcttagtatacattctaactgctgataattaatttataagaacagcatatccaactggaaatataaaacctatacgataagtaaaatgcagcatgtttaaagtgcatgtataaagtacacttccagggagcaaaggtaaatttaggaaaaccctggcaattagtctcacttccttcatttttatatttaaacacacacaggcctttttaagtttgacacaaaagtcattaaaaagttacaaaattgactacattcttaaaaatgtgcaaataggccgggcgcagtggctcacgcctgtaatcccagcactttgggaggctgaggcgggcgggttacctgaggtcaggagttcaagatcagcctgggcaacacggtgaaaccccgtctctactaaaaatacaaaattagttgggcatggtgacacatgcctgtaatcccagctactcaggaggctgaggcaggagaatccattgaacctgggaggcggaggatgcggtgagccgagatcgtgccattgcagtccagcctgggcaacaagagtaaatctccgtctcaccaaaacaaaaaaaaaaaaaaaaaaaatgtgcgaagaataatatataaaagcaaacactgttcaattgggggaaatatttgcagcaagtataatagaataaacgtatttcttcaatatttaaagacgttctaccaaaaaaaaaaaaaaaaactcaccaaaaaccaataggtggacataattttcaggaaggaacatttacataacttttaaacaaaagatgctcagtgttcagccatactcataacaatatattaaaaccaaaataagaccaaaatgagttactatacttaattttaaatgtaaaagttgtcaaagaaaataaaatttaaaaacacattgcctgggtgcagtggctcacacctatagtcccactttgggaggccgaggtgggaggattgcttgagcccaggagttcaagaatagcctgggcaacatggtgagaccctgtctctacaaaaaatttaaaaattagctggatgtggtggcgtactgaggaggctgagtgggaaggatgacttgaaccctggagtttgaggctgcagtaagctgtgattgttccactgcagtccagcctgggtgacagaaggaaaccccgtctctaaaaaaataaaaaaataaaaaacagtagattaatgaggatatatgtaaatggagactttcatgcatttctaaagggagaaatacacagttgatacaagtaatgtgggtaaagaaatatgtatagtcattgcagtagtatatgtaatactaaaacttttccattactcaggagctcaataaatagactgctggagccataaaagggaatactatgtagctaataaaataaacattgaggcctggtacggtggctgacgcctgtaatcctagcactttgggaggccaaggtgggcagatcacctgaggtcaggagtttgagaccagcctggccagcatgacgagacccctgtctctactgaaagtataaaaattagccaagcgtggtgatgggtgcctgtaatcccagctcttcaggaggctgaggcaggagaatcgcctgaacccaggaggcggaggttgcagtaaaccaagatcgtgccactgcactccagcctggacgacaagagcaggactccatctcataaataaataaataaataaaatattgaggcaacactacatctacagatatggaaaggcatctgagatggatataaaagcaacgctcagactgatagaaggatatctttggctgggcgcggtggctcacgcctgtaatcccagcactttgggaggctgaggcgggtggatcacgaggtcaggcgttcgaaaccagcctgaccaacatggtgaaaccccgtctctactacaaatacaaaaattagccaggcatggtggcatgtgcctgtaatccaagctactcaggaggctgagacaggagaatcgcatgaacccggcaggcacaggttgcagtgagccaagatcatgccactgcactccagcctaggcgacagagcgagactccatctcaaaaaaaaaaaaaaaaaaaaaagaatatttttgcatatgtgtttgcatatgctgaggatatttttggaagcttatctacaaactggcaccacagctgtcactaaggaagggaatattttggtggtgattcgggatggcaggagactcagttttcactgtacactctagttttatgaatttgtatatatacttccatgtagacattcatgtacttaccaatttattcatccaacaaatattaagctctgctgtatgctagtgttggagacacctagctggagcaatgaatgagatgacaaagcccctattgttgtagaacttaacattctgagagtgacaagacagatagtaattatataagtaaatataaatatgtaatgtgtcatatagagataagtactatggtggaaaaataaagtatagtaaattaggaagtgctgatatagggtggtagatatctctgctgccgtgtcaacttagcagacttgaaggaaacgggaataagacgtaggatatctgggggaggattacaggcagaggagacttgaaggacaaaggccatgaagtagaaatttggttggcatgggttgaagaacagcaaagaggtcagtgtgaatgcagaggaatgaagtagggagagattgacaggtgacaaggtcagaaagaggactgcagatgatatagggctttgtaaaccctcattaaggactcaagctaactgagatgtgatgccagttggagagttttgaagaggactcctccatgtagtgggatcactctgactgctgtgtggaggataaatcagttgggtttcctagtataatgtaatccacttatgtaattgcaaattttctagtagcaatattttaatactatgaagggacaggtgaaatttattttaatgatggattttattgaacccaaacatttattaaaacattatacaaacatttactaaaacttaccatctggccaggtgtggtggctcatgcctgtaatcccagcacttagggatgccaaggcacatggatcgcttgaggtcaggagttcaagaccagcctggccaacatggcaaaaccccatctctactaaaaatacaaaaaaattagccaggtgtgctggtgggcacctgtagtcccagctactcgggaggctgaggcaggagaattgcttgaacccaggaggtggaggttgcagtgagctgagatcgcaccactgcactctagcctgggtgacagagtgagactgtcttaaaaaaaaaaaaaaaatgttgctgggcgtggtggttcacgcctgtaatcccagcactttgggaggccaagtgggtggatcacgagatcaggagtttgagaccagcctggccaacatagtgaaaccccatctctacaaaaattagctaggtgtggtggcaggcccctgtaattccagctactcgggaggctgaggcaggagaattgctcgaacccaggagatggaggttgcaatgagctgagatcgcaccactatactccagcctgggtgacagagcaagactccatctctaaggaaaaaataaagaagttgaaaacatcatccaacatgtaatcaatataaacattattagtcagatattttatagtttttttgtgctaagttttcaaaatctgatgcatattttatacctagagcacatctcagtttagatgctacattttcagcaattgaagtgaaatatagccctaccaaaatgataaagttgtgtttaatgggaaaatacttcatttactttagttttaaaatatgttaattaaaattaaattaatttaaaatctaggtctaaccacatttcaagtgctcagtagccacctgtgtctagtgagtgctgtattagagagcatggaaatagagttgtggggtagggtgggcagcagcatggagctgcgtcaggaacctattgcagtaattgaagccaagatgttggccgggaccagagtgttagcagaggagtaggtgagaagtggttgtattcaagctgtattttaaagatccagcttgcgggacttatgaatggattgaatgtgggatatcagagaaagtgaggtctcaacagtaatcttttcagtctgagcagttgaagaatagagttttcatttactgagatgaagaaggagatttctggatggggtgggggcagtccagagttagattttggatatgttaagtttgagatacgtgtaagacatcaaaatggagatatgagaagatagtggatatgtgaatccaaagttcaaggaatagatgtaatctggagaaatatacacgagagtcatcagtgtatttaaagccaggagacttagatgggatcatctcatgaggaagggctcacagacaagagattggaggaccaagctaaggggctcccaaatgtttagagagaaggagccaacaactaaggctgagaaggaatggccagtaggttgggaggagaaccaggagaaaatggtggcttggatatcaagtggagttagtgtttctaaagaaggtgtgattttaaaaagtgtcaagagtagatggaaggttaaagtaaattgaaggccaagaatttcagtggaattgtgggggaaaattgggaagagagggttcaaaagaaactgagatgtggaggaagtggaaacagcaaatgctggcagattttgtgagtagttttgctgtagagggcaacaaattagttggtaactggaggaccgtggatggtcaagaaaagttggttttttgtttttgagatggaagaaattatgcatgtttatgtgctgatgagaatgatctgacagagagggaaagattgtgatgatgcaggagactgacttaaaagggacagtagttgaagggatgttttttagacaagaagatgaactacctgtatttttttttaagggccagttgaggtgacagaagaagaaaagcaagaagatggtgtaatctatagttagcatcttactaattaatatgaactcgcccaagttacatttttccatcattttattaaggtatagtttacatacagtagaatcaccccttttagcctagtgttctgggacttcagcaaacacatacaccaccacagtctaggtcattttaacttatttatgctgggtgtggtggctcatgcctggaatcccagtgctttggcgaggtgggaggatcgcttgagctcaagagtttgagaccagcccgggcaatatactgagaccccctccctacaaaaaataaaaataaaaaaaaatacctgggcatggtggtgcacaccaattgttccagcttactggagagctgaggcaggaggataacttgagccaggagtttgaggctgcagtgagctgtgatagtgccactgctctccaggctgaatgacagagcaagatcctgtctcaaaacaaacaaaccaaacacttttattttgggcaataggttagcttgttctgggaagttggaccctgtatatatgggatataccattgcttctaatttaagagatttataaacccacaaaaaatatgtattatttcttatagtaagttaccagtttggttcttgtaggaggatgtgatgtaggcttgggtgaagaaggtttttcctaaagctaattcaagcaaaaaaaaattttttttcagaaagtctgtgccatgaaaaaaaagttatattagcatcatatagacaaaccacaattatgtaactggatattttttttcattttagttggacatattgaaggtgattaattgtaactggaaccccctaaagaattatagtggaaaaaaaaatatgtggtgtctagacaattctagtggaagacaaaaatatttcagttactcaataaattgaaataatatttgagccaaaatcttgtgcctgtgccaagatctggcataagtttttagttctgtttcttagccacttctctaggtgattgatctcatttagttaattgagggaattgccagaaccaaaatccaggcaacattaaaaatcgttgtttttaatacactgagtcccaggaatcagtttctggacagtgtcgagctcctattgccaaggagctatgaatttaggccatgcacttaggaaaaactgtttagactttacttctctcagcctggctggaattttggttgactgaatctttataatctatttaaaggtgtccttttgagtcaaaaacatagctgatttgatggaagtaagttttgtctaaacatgtggcttttatttctgggtattacaactattggaattctagtggaatccttttaactacttttaaagcaaatttcatttttactacttataagaatcatttctagatcttcaacttgttttagtagctatggctgattcattctctctctctttttcagaatgacagtaacttttatttttatttatttatttatttttaagatggagtctcgctctgtcacccaggctggagtgcaagtggtgcgatcttagctcatggcaacctccgcctcccgggttcaagtgattctcctgcctcagcctcctaagtagctgggattacaaatgcgtgccaccatacctggctaatttttgtatttttagtagagacggggtttcaccatgttgatcaggctggtctcaaactcctggcctcgtgatcctcctgcctcggcctcccaaagtgctgggattacaagcgtgagccaccgcgcctggcaacagtagcttttaaaattataaaacaagtgcatgcatcttcataaaatgtttttttaaataataaaatgtataaaacaaatgcttcctccatgctactcatcagtgctaaccactattaaatttgtagtttctcttggcagactttttatgaatatataaaaatatatgaaaaatatatgtatatgtagtttttcaggtaaatgtaatcgtgttctcttataataggacatttttccatggcaatacgtgcttgtatttttagggactatataatattccatcatacacatgtaccaaaagatgtttaaacacttaaattgtttgtaggtctttgcttttctccacaatgctccaatcccaggacatgtagaattgttcttatctgcctagtttattagagtatatttccaccagaggaattgctagtcagagggtatgcccattgtcaatcatgatgtcacagaagccagacattagcttgccacttaggcaacagagggtatttgttgaaatggaaaaaagctttaaaatgtgtagaattataggccgagcatggtggctcacgcctatgatcccagcactttgggaggccgaggcaggcaggtcatgaagtcaggagatcgagaccgtcctggctaacacagtgaaaccccgtctctactaaaaatacaaaaaattagccgggtgtggtggtgggcacctgtagtcccagctacttgggaggctgaggcaggagaatggcatgaacccgggaggcagagcttgcagtgagccaagctcacaccactgcactccagcctgggtgacagagcgagactctgtctcaaaaaaaaaaaaaaagaaagaaagaaagaaaaaaaagtgtagaattatttttaaagcatttatgtagaattttgtattctaacaagggtcagtttattcctctctaattaaaatcaacacattgtcagaacctccagaaaggctctacagtattcccttcactaacaaagtatgttagtcccttgagtgcagggaacagtgttacttgttcactgaatatcctaatgcttagccttagttcttgacatagaatagtaggtgccaagtcagtacttttaaaatgtgcctgttttgccacatccttaccaactcagtgcattatcagacttgttaattttttatcagtctagtatgcaaaaaggtttcctttttaaaaaagtttgttgttttttttttttccttgttttcctcacttcttttttttttttctttttttttttattatactttaagttttagggtacatgtgcaccttgtgcaggttagttacatatgtatacatgtgccatgctggtgcgctgcacccactaactcgtcatctagcattaggtatatctcccaatgctatccctcccccctccccccaccccaccacagtccccagagtatgatattccccttcctgtgtccatgtgatctcaatattcaattcccacctatgagtgagaatatgcggtgtttggttttttgttcttgcgatagtttactgagaatgatgatttccaatttcatccatgtccctacaaaggacatgaactcatcattttttatggctgcatagtattccatggtgtatatgtgccacattttcttaatccagtctatcattgttggacatttgggttggttccaagtctttgctattgtgaataatgccgcaataaacatacgtgtgcatgtgtctttatagcagcatgatttatagtcctttgggtatatacccagtaatgggatggctgggtcaaatggtatttctagttctagatccctgaggaatcgccacactgacttccacaatggttgaaccagtttacagtcccaccaacagtgtaaaagtgttcctatttctccacatcctctccagcacctgttgtttcctgactttttaatgattgccattctaactggtgtgagatggtatctcatagtggttttgatttgcatttctctgatggccagtgatgatgagcattttttcatgtgttttttggctgcataaatgtcttcttttgagaagtgtctgttcatgtccttcacccactttttgatggggttgtttgtttttttcttgtaaatttgtttgagttcattgtagattctggatattagccctttgtcagacgagtaggttgcgaaaattttctcccattttgtaggttgcctgttcactctgatggtaggtttttttttttttttttttttgagacagagtcttgctctgtcacccaggctggagttcattagcgcgatcttggctcactgcaacctctgcctcccgggttcaagcgattctcctgcctcagccccccaagtagctgggattacaggcacacgccaccatgcccagctgatttttgtatttttagtagagacggaatttcaccatgttggccaagctggtgtcgaactcttgacctcgtgatccacccaccttggcctcccaaagtgctgggattacaggtgtgagccactgcgcccggcccaaaagttagttttttaattattaaaatcaagcgtcttttcatgtgatgactggcatctgtatttcttcatataccggatttatttttatatgggagtattgcctttttcttattgatttataagagtaggttaaataaacaaaaatttttaagaatggtaatcaaatgacctgtgccttgcacatttgtttaccagcctgacatttgtcttctaagtatattaagtcttgctatagagaaagttttgatttttaaagtagtcagatccatcagtcttttcacttaagatatctgaattctgtaacatggtgaggagggcctttctcattccaggattataaaaatattattatattttttcttctaatacttctataaagttttaatttttatgtttcaatatttgatttttctgaaatttatttttgttcagtgtgaaaaattgaaatctaaaatttcttttatccaaatggatagtctcttgtctcaacattattggtttgaaatactacctttatcatgtacaaaattttcatgtataggtgaaattatttctggactgtaatttttgttttgtcaatttctttttctttttctttctttttttttttttttgagacagagtcttgctctgttgttgcccaggctggagtgcagtggcgctatcttggctgtctgcaacctccacctcctcggttcaagattctcatgcctcagcctcccaagtagctgggattacaggtgtgtaccaccatgcccggctaatttttgtatttttagtagagacagggtttcgccatgttggccaggctggtttcgaactcctgacctcaggtgatctgccctgcttggcttcccaaaatgctgggattacaggcatgagccaccgtgcccggccacattttgttttaagaaaatcagttgcacaattacaaggtagggaaactttatttgataataccagttcagtcatgttaaaagcaaaataaacaaaggacctgctgtttaaattgatttcaaactcaggatgagttatgatcttggttggaaaaataataagggttgtaattaaactgtattgcaggaagtttggcatccagattaggaaaggtaatactttcaatctttgctgatcaaacagtttttatcatttgtgcacctgttttgtgccaaggactaaactagatgctgggatacaaagctgagagacgtagcccatttataatagaattgcaagtcagtaataacaggttttatgagaagccagaagaggaatatccagaatttagaccacaggggatgggacagcttttaacaagaaggagatgcatagagcagaggctttggaggtggagctgtcggcttcactactatgggaccttgtatttaatctcaatctcaatttcttaatgtacaaaatagggtcactaataatctatttcacactgttgtctgtcctaagcatcgatgaggaaaaaatatacacacatacatacacacacataaaatgtatatatatgtgtatacttttttcctcattgatgcttaggacaacagtgtgtatgtgtgcatatatatgtgtgtgtatatatatatacactttatatgcgtatgtatatatgtacatacgtatatgtatgtatatgtaggaaacctctgaaacactctggggacataataattgctcagaaaatggtgtggaatccatccattttgaagtgctagtaggtaggagttggctcagtagagaagggccttctcagcagaaggaaaggtgtataacaaagccaggtggttgaattggggcctctctggaaatgtaaagtatttaatctggttggattgtggggtacatgtggagggagcagctgaagatgaaactgtgaaaggaggcaggggtgggatctccactgcgagcttttgtgccatgttgaggagtctgagaggcatttaggaagtgttgtggagtccttaaaaaccattattaggggagtgttcagaacagttttgccagttgaaagactggtttgttatagatgcatggagtggctaggaaagctgttagaggtaggatatctagtaagagccgtggtgctcagccctggctgcacattggaactgtctggagaacatttaatggcccgatgcccaggttcaccccagatcaattatatcagcagctctaggattggaacctaggaattggtattgttcattgttccccaggtgattccaccggacagccagtattgtgaatcactgagttagagggtaactgtattcaaaccagatatgaagttgcaaattaaacgagtgccagcagcataaagcaggggtccccaactggccaccaggtaccagtccgtggcctgttaggagctgggccacacagcaggaggtgagtggcaggcaggcaagccagtgagtgagcaaagcttcatctgtatttgcagccactccccatcactcgcatcactgcctgagctccgcctcctgtcagatcagcagcggcattagattatcataggagcacaaaccctattgtgaactgtgcatgtgagggatctaggttgcacactccttatgagaatctaatgcctgatgaactgtcactatctcccatcactcccagatgggactctctagtagcaggaaaacaagcccaaggctcccactgattccacattgtgatgatttgtataactaattcattatatactacagtgtaataataatagaaataaagtgcacaataaatgtaatattctggaatcattgcaaaaccatacctcccttcacccctgtctgtggaaaaactgtcttccacgaaaccagttcctggtgctaaaacggttggggaccactagcataaaggaactagaataaggaaataacaaatatggtggtcagttgaatgaggaggagatggagtgaagatctgaagatcatttctagattagatcactgggtggattcgatgatcgtataagagggctcagtcatatatcgagtgagaacaggaaggagaagcagatttgggtactaggacttgctgagtgggtacaagaaatagaatttgatttttatatgtggaattagggggaaaattaactctataatgccaaatgggcagaaaaactgaagggaaagggccaatggaatagttgaaaattccggagacagagtagataattgatgggtgagatccctgaagaggcagaaagtgcagagcagagatgaaagaagtcatttagggccaggcgtggtggctcacgcctgtaatccagaactttgggaggctgaggcaggcgattacccaaggtcaggagttccagatcagcctggccaacatggtgaaaccccatctttactaaaacacaaaaattagccaggcatgatggcaggtgcctggagttccagctacccaggaggctgagacgagagaaccacttgaacctgggaagcggaggttgcagtgagccaagattgtgccactgaactccagcctgggtgacagagcaagactctcaaaaaaaaagaaaaagaaaaagaagtcatttaggctgggtgccgtggctcaagcctttaatcccagcactttgggaggctaagggggagaactgcttgaagcccaggagtttgagaccaggctgggcaacatggcaagaccccatctctacaaaataaaaaagttagccaggtgtggtgatgcatgcctgtggtgtcagccactttggaggctgaggtgggaggatcacttaagccctggagtttgagcctgtagtgacctgtgattgcatcactgtcctctagcctgggtgtcagagcgagacccccatctcaaaaaaaaaaaaaaaatagtaagggaattaaagagtgtggtcaagttttggaagatgggggtcatctgaggaaggcaactaagaaggaaatgtctttgttgtcctacccttaaatgttgcttgtccccagggttttagtgttggccttctttcacatacttcatggatgatctcctttgatatattttgttacactgttaacttctgagagaaacattgataagctgaagtttgttgggggaattaagtagttgatgttatagttcagaaaataataggttggcttttccttttggggggaattttcttggtagcagtttgctatgttaatttgaaatttaaaatactgaaatcacttgaaaacacggtacagatcccactgtttctagtattaataactagttagcaccatgttttttctctagttataaaaccctaaagcattaccaatttgacagtttgaaaatatgttagcttttagtctcagtgttttatactataaagaaatctgaatagttattttacttttcatgttatgtttcatcatcaagtatattatttgttctgttatgtctattaaagatctctttctcaattctgatataaactgtgatttgcgttacatattctctaaaaattttttcttctaaaagactaactgaaagtttcgtagttaattgtcagataattggaactatttattttatagagtttcagtaaaatataaataagattagttatgcagcaaaattaattgtattccttacaacaaagcagtcattagtatgacttttcagtaaggtgtattttgttcataatatgcttcctaagataattataaattacctcaacataatgaattaggaccatgggtgtgtatatagctagaaaatggccttggtatggcagaatactaacttaatgttttgatatcatttcaggcaacatttcatttgttgcatttccagtttccaataccaactcacctacaaagattttaccaaaaaccttaggaccaataaatgtgaatgttggaccccaaatggtaagaaaattatcaaatcttagaattgaaactttgtttagccaagactaatttaaagaataattgcattaaatatatttgatcagatattccagttaaaccaggcgcggtaggtggctcactcctgtaatcccaacactttgggaggccgaggcaggtggatcacttgagcccaggagttcaagaccagcctgggcaacatggtgaaaccctgtctctacaaaaaacagctgggcactgtggcgcatgcctgaagtcccagctacttggaggactgaggcgggaggattgcttgagcccaagaggtcaaggccacagtgagccgtgtttgcaccactgcactcctgcctgggtgataaagcaagaccctgtctcaaaaagaaaaagaaaaaattatagttaatttcagttatctgagtcacttttaaaaaacgttctgtttttatctgaatgtatctggtcaagttttgagcttgagaaacattgtgtgctctttgatatttaattttcacatatttgaatctgtggattctggatgtgtagtattaagtcttttcctctttatgtgaggtttctcttgtattgtttaaattgatttgaaatgtgttatgctttatgtcttcctgcttttttctttttcttataaaataacctttactactctaaactatgtattctcacataaatggaatctgtgacccaacagttaatttacatctggagttattaatttaaaactcctttcattaaggacttttggggaaaaaacaatataccaatttattttaatctgtagcagtagaaataatgaatgaaaaatggaaaacaactgtttctctaaagacattcattaattatgctagagcatgaagtgtgtagcactttcagaagacttatttataagcaaggttgcattccactactctgaaactatgtctaaatggcctcacccaccattagtaaaagtactcaaacatttaagcaataactcttcattgccggtgttttcatcttttcatctatagagcaataaggataaattttacccataatgtacaacagcactgtggactatgttaaatgcaaagttatttagacaaagatatcttttaacatacctaatggtttcagaaagtctctaagacttcaggacacattctagacatgatattttccttggttagttgaggactgtttatcatctgcagaaatcaagctaaagatacaacacaatttactgtaactatgtgaagaatgtagtctagctccaaacctcatagagatttaagctcaaataagagccctcatttcaaggtagctcaggttatattttcagacatttgctaagcatttgcccctcctcagccactactataggtgcaaatgagataaagcacctgacttaaaaatctgcattttgaaatgtgattatataagcaccaaaattaaacatactcaaatttttatgagtcttgcccttacagtactcttctgttttgagagattattttctattattttttgtttaatgctgctataccccaatttgaatttctcctttggaagcatgtataatttttctcccattgtcagtttgaactaatgtgcattttggcccttacacagtccagttctgttaataataagtagtgatgtgtgctactaactcagttactgtaaatctcaggatcagcaaaacaaaggtcacaagaaggagaggcgatttggaactctaccttcaactgggccatcccaagtacttaatttgtccccctacttctgaggtccttttttcagttctgagttcttgggcaggaatcagaattttgtttttggtttcctaattgttgtaagattccattgctgtctcttgaatgtgtccctccaaaattcatgttgaagcttaatccctattgtggtgctattaagggatagagcctttggggaagtgattaagctatgagggcttcattctcattgaggggattagtgaccttataaaagaagttgaggctgggtgtggtgtctcacgcctgtaatcccagcactttgggaggccatggtgggcgggtcatgagatcaagagactgagaccatcctggtcaacatggtgaaacccatctctactaaaaatacaaaaattgccgggtgtggtggctcatgtctgtaatcccagcactttgggaggccaaggtgggtggatcacgaggtcaggagatcgagaccatcctggctaacacagtgaaaccccatgtctactaaaatacaaaaaattagccaagcatggtgacacacatgtagtcccagatactcgggaggctgaggcaggagaattgcttgaacccgggaggaagaagttgtagtgagcagagatcgcggcactgtactccagcctgggtgacagagcaagactccatctaaaaaaaaaaaaaagttgaagggagctctttgcccccttctgccccacttcatgtagtgaagacactacaagaaggtaccatctatgaagcagagagtgagccttctgaatttgctggtgtcttgatcctggacttcccagccaccagaactataagaaatacatttctatcatttataaattacctatgctaaggtattttgttatagcagactaagacaaaaattagtgccaagaactggggtgtggccataacaaacacctaaaactgtagaagtggctttggaactggataatgggcagaggctggaagagttcagaggaacaggctggaaaaagcctcttgagatgaatggaccattaagggtgattctggtgaggaatcagaaaaggagagctatagagaaagcctcacttttcttagagattacctccgtggtcatgaacagaatgttggcacaaatatggatggtaaaggccattataatgaggtatcagataggagtgagggacatgttattggaaactggaggaaaagccatccttgttacagagtagcaaaaggctgggcccagtggctcattcctgtaatcccaacattttgtgaggccaaggcagaaggatttcctgagcccaggagttcaagaccagcctgagcaacatagtgagacctcatctttatcaaaaaaaaaaaaaaaaaaaaacactaaaaataaaaaattagctaggccgggtgcagtggcttatacctgtaatcccagcactttgggaggccaaggctggcagatcacttgaggtcaggagttcgagaacagcctggcccacatggtgaaaccctgtctctactaaaaatacaaaaattagccggacatggtggcgggtgcctgtaatcccagctacttgggaggctgaggcaggaagatcactcgaatctgggaggctgaggttgcagtgagcagagattgcaccactgcactccagcctgggcaacagagcgagactttgtctcagacaaaaaaaaaaaaaaaaaaccaggcatggtggcacctagccactcaggagactaaggagagaggatcacttgggcccaagagtccaaggctgtagtgaccctgacagagtaagactctatctcaaaaaaataaaagaactaaacaacaaccaaaaaagtggcaagggacttcactgaattgttttcctgttttaatgttttgtggaaggaggaacttaggagccgtgaaattggatatttggtcaaagaaatctctaagcaaagtgtttagggatcaacatggcttctcttggctgtttatagtaaaatgtgagaagagagaaatgaattaaagatataatttatcatcagaagtgaagatttgggaaattctcagcttggccatgtaaagaataaaaaagcatgttttggagagaacaccaaaagagtggcctagtcaccttttgataaggagattagcgtgcatgggtggaagcttggtgttgttcatcaaaacaatggaagaataaacccatagcatttcagtgattaccggtgctgctcctcccatcacaggcccagagtgccaaggcatgggggacagaactatcaaaagaggggcttcaggcgctaatgaaaccctggcaatcccttcctggcactgtgtcaagtctgctccccgaattttggcacagtgctccttagccattccaggtgtggctccagtaggcccaagtatagtggctgctcctctagagggcacaggtggtgaaccttggcagtgtctgagtgatgccatctccagtgggtgcagagtgtacaagctgcggggtatgataacttccacctagatttcaaaagatgccctggagagccttagcagatcctggcagagaattgctacagaggtgaggccaccattgggaaccctcaccagggcaaagcttggtggagctgaggtgcgcggggttgctccctgaggccctagtctagtagagcttccagcatgcaactccagcctgggagagccacatgcagaagactcaaactctaacccaggagaactgcagcatgggctgcccccaataaagtcatgggggtgggggcccctggtaccctgggggcccaactcctgctccagtgtgtccagaaggcaggatatcaagtcgaagattattctgaagccttaaaagttaatgtttgccctgttgggttttgtattggttgggacctattatccctttcttcttttctattttctcccttttggaatgggaatgcatgttctgtgcctgtcccatcattgcattttggaaacaggttggatttcacagactcacagctggaggggaatttgcctcaggatgaattgcacctttgagtcttacccatatctgattttgggaaggagttaagacttgtgagactattggaatgaaatgaatgtattttgcctgtgaaatagacatgaattttagagggccaggaactggatgctgtggtttgaatgggttcctccaaaaattcatgttgaaacctaatccctactgtggtggtattaagaggcggggccttttgggaagtgatgaagtcatgagggcttcacccttatgagtggaattagtgcccttataaaagaggttgaagggagcaccctggaccctttctgctattaggatgcaaccagaaggcatcatctttgaagcagagaataaaccctcaccaggcactgaatctgccggcactttcattttggacctctcagcaacctccagaacagtgagcaataaatttctgtggtttgtaaattacccagttttgtactccttgcagaagactttaaagaaaattaattaattacccagtctaaggtggtttgttatggtagcctgaatggactaagacacccagttacagccatttatcgcttctcctctaactccctcatccatgatttttaaaaaagtttttgtttagttaaagaattcttggattaggctgggcgtggtggctcacgcctgtaatcccagcactttgggaggctcaggcaggcagatcacgaggtcaggagatcgagaccatcctggctaacaaggtgaaaccccgtctctactaaaagtacaaaaaattagccgggcgtggtggcaggcgcctgtagtcccagctactcaggaggctgaggcaggagaatggcatgaacccgggaggcggagcttgcagtgagctgagatcacgccactgcactccagcctaggcaacagagccagactccgtctcaaaaaaaaaaaaaaaaggaattcttgcattacaaactcacccatttgcttcttagccttctttttgtgcttgccctttgaactttacatgtcttttggaagccaaatcttaatggtagatagaaatttcaaaaggccccatgaaaagttttgtgtggttatggaaactagtttagcagtacctattttagtttgagatacttgcccttttcttacaggctgtcttatggttatatgttatagatcttaagattatttatacagttgacctttgaccaatgcaagggataagggcacagcccctgtgcagtcacaaatccatgggtagcttttgactcccccaaaatgtaactattaataccttattattgactagaagccttactataacataaataatcaaataacacattttatgttatattaatgttatttcatatgttaatatgtattgtatactgtattcttacaataaagtaacctagggaaaaatattacaaagaaaatcattaggaaaatacatttataattcattaaatggaagtggattatcataaaagtcttcatcctcgacgtcttcacgttgagcaggctgcggaggagaaagagggaggagttggtctggctgtctcaagggtggcagaagtggaagaaaatccatgtataagtggacctgcccagttcaagcccatgttgttcaagggtcaactgtataagataatctaatggctgtcttattttagaagagtaaaaactgcatgcttcttatagtgaaaaccaaaattccatcaaatagtgaaatctcttaatataccactttataattttgtaattttttttccctttagaatacatatgctgtcttggctttttttaactgtagatggcagtagcacataaaatatgttgattgagggcaggaaaatgttcagagtaatgttcaattgctatgtgattttcccagagtaactaattctattgtcagagaaaccacatgataacatttaagttaaggatgtctggatttttggtaggaggactctgaaatttaaaactccattttccttagcatatcaagtgaatattaaaagtatatttttacctccaacttcagtacttcaaattttttttcttttttgacagagtctcgctctgtcacctaggctggagagtgtagtggcacgatctcagctcactgcagcctccgcttcccaggttcaagtgattcttctgcctcagcctcctgagtagctgggattaccggcgtgcaccacaacacccagctgattttttttgtatttttggtagatatggggtttcaccatgttggccaggctggtctcgaactccctacctcaaatgggagcctacctcacctgccttaggctcccaaagtgcggggattataggagtgagccactgtgcctggcctgggatttcaaaattaaggttcagggttagaaagcatgaccggctcatcaccctataaaccaattttcttatattctgtggctgttcaagtcttaccgactttccttctgttttatttcttacgtttcactctcattatcctagtttaggaacttactgtatctcacatactcttaggccttatctttcctattcaggtgcgtcatctctctaatttgttcatgtaggaaatgtttattaaggaattgctatgtaccaggccctgtgctaagagaaaggagcagagtgttgctaatcactctccgatcagccgcagctaacaatctgacaatgagggagggaaaaaaagaaaatgtaaactagaattcactttcaaagtcattttcataaagatagccagtttttctctatgtcctctttcccttccttctctctttttttcctttctttctctttttttttttttttttttttgagatggagtctcactctgtcgcccaggctggagtgcagtggcatgatctctgcttactgtaacctctgcctcctgggttcaagtgattgtcctgcctcagccttccaggtagctgagattataggtgcccacccccacgcccagctaatttttgtatttttaggagagttagggtttcaccatattggccaggctgatcttgaactcctggcctcaaatgatccgcctgcctttgcctctcaaagtgctaggattacaggcatgagccaccatgcccagctccttttttttttctacaaagtcctgtaaatcagcaaaaccaagcatgtaggctgctaataccatatagaaatactgcagtagtaatacaatctgtttcaagggtaaattggaatgcttagaatagctttgtagacactgctgttcaaggaatagggttgaccagaggctaatcaaataactcacatttttctttataagttgtccatccaaggtcagcatgatagagaatgtgatgtagtgattggtggaaactatgctgtatttttttagtggattttatataaaccttttagcatatcaataaatgaagttactttttcccctattattttaaaaattgagtattttatcccagttagtaaatatttattgtacctttcctatgagcatcccctaccactgtgttaaaccctgcaaaggacatagtttagcaaggtactcgccacccctaaagatcctgcactgaaatgggggatgcactgaaagtggggatgtgggaccagatgtgtggagtgggaagtgcaagcatacttggaatgcaaggcagaatttgatgagaggtacagacacattgtctgtttttatgttttctcatgaggcaaacttctgagtgccttatttaatacccttggtgtattgtacataatcagaactctccagacatctgtcagtattattaacttttgtttttatttttttaaactatggaatgaacggattgaaactatttcataaacatttctaggtgctaacatcttcctagccccaagctaacatagtcaaacataaacagactctaactaaggtcttaaatacttggtaaatgaataaatgttgactagactttaataactaggtctgaactatttttatgcttcagaggttattgtttgactctttccttcaaatgcaaataaagagcttgaaatgcttattaatccttcccttcagttatgtatggagcaagttagcaatgaacttaatgattcaccctggctgcagaaacatgtttcatttggtcagggagataaaaattaattagcattttgtcttgcataaggcagtagaaatagaactatttctcttgtttgaggacttattaacaattacttgtagtccctgtagatatttttcattctcagttgggacttaaaacttactatcatgaacactttcaaaactttacaaaaatagaactatatacccagcagttgcttcaacaattatccacataggggccaatcatgtttcattaatatccccattcaccggagcatgcctcttcccctttttttacatgaaaatacttctaaagctattactaggctgctagtttttttgtattaattattataaatgtctttgggaaaaacatgttttgttttgtaaccagtgaaaattttaagacctggtaacacatataaggtacctttctaaaaaagtctttaggggttccattaatcccctttctggagtctagccttaggaaatagaaattaagggcaaggtctttgtacaaaaatgtttatcacagcattctttataatagtgaataattaaaaatgcatatatatctaatagagaataataaatccacatggtagaatgttttatggtctttaaactatcttcaaagagtatttaataacatgaatactcttttttttttttttttttttttttgaaatggagttttgctctttttgcccaggctggagtgcagtggcgtgatctcaactcactgcaacttccaccttccaggttcaagcgattctcctgcctcagcctcccatgtagctgggattacaggcgcacagcaccatacctggctaattttatatttttaatagagataggttttcaccatgttggccaggctggtcttgaactcgtgacctcaggtgatcctcccacctcggcctcccaaatgctgggtttacaggcacgagccaccgctcctggtccaatactcttttaaaaaaggataaaattgcatctatataataatccaagctggatagtatctttgtgtatactgtatgatggactgtggaagtgtgatttgctgttgccctggttctagtaaatcaagctgtactgcaattcatttcctcagtttcaaagaaagcttttcatttttctgatttttaaagcattatcagttctctacttaatccttccaaattgccatttatttgctgaaacctgcattgtgacctcatgtcagtattcaggatacttgtgctttaagatcctaggatataagtaaatcaaaggcattgcttatatttttagatgactgacattaagtgccttttaggcagcaaggtttcctcatatgtaggttagcaatcaatgttattttctgcctgtaggcttttcttaataattaagaatattatattctttgttcctaactttacagattataagcacaccacagagactaaccagttcaggaagtgttctgattgggagtccatatacccctgcaccagcaatggttactcagacacacatagcagaagctactggctgggtccctgggtaagagtgttgcaagttactatttttaaaaccttaaaaaaagtttagacatttttttcttactatcttgtcttctgttcttgttttagtttagttcttaaaaacaaatgtttttcctttaaaatcacctattttatttcactttatatcttagatataaataatctctggaataactatttttaaacagaaaaaaacagtgcaataactcataactaaaccctgtgactttttaaactctggaataggactacttttattattataatatttaactgctttggagatataaaaactatatttttatatatttttaactcacacagaaaaggagttaaatattaagtgttggctatactcagaatttcccctatgaattacttccataaagaccagaaaagggtaggaaaagaggccagataaattttttattaaatttcctcttctttttaaacgctgaacaattgaatcaatatcccttctgttactaatttgtcacttttagtacaaacttctatatgtttcatctttgcatgtaaaatacttatacctttctccactctttatcattttagtacctcatacttccataaaagaaaaataagtaagataaattactcaaaacctcattttgttaccttagacgttttgttactttagaagttatttacatggtggaatactgcattggtgattctgtcatatgtgagtttgagcaagcagatggtaagtcttagttaagtaagaatctccttgcttcaaggatattaagtgaattaataatcctggcaaagtgctttaatatgcatacatattaatatacataaatacatgcctacacacatgtacaaacacaaatacattaaagacagaagagttttgtatatgcatacttttccattatcaaatgagctgaaatgacagaattacctggaatcctatgggtgttattcaatccttatgaacattcttatgtagatcaaaggttaccctggatttctctatagccttgaaagattataacgtgaaagccaagcctgtgccagcagtgctggcccactttggaaatgaccagggtctggatgttttcagccccatttgtgctttatattggaggtggcaggattgtctggtgtttttatagtcagtatttcgcagagtgaagaaaatttttctctatcttgtttgcaagtctgcagtgttttcctctctagctagtcattgagctcttttcaacttatgattattaagttgtgataccttgttcacatgataaaattaagatttattttatgtacctatcttttgtatttgctagttttagtctttgaatatattcagtgtataattttagacaagttataataaagtattaatgaaattaaattgtatttaagtatgtattgtttttatgctatcttttttcctttttagtgatagaaaacgggctagaaaatttatagactctgatttttcagaaaggtgagtataagtctaactattttgtttggaagatttggctatatagagaggctgttggcattgccactgctctggtttaatgcgatgtttttcttcatgtaactttaacttctttcagttcttgccattatttcattctgcattgagtgccccagttcactcatagtatctgtatggtttcagtagaaattaccctgtgagcagattgactattggtagtatgtcctttagtctctcctctctttccatctggtaaatgaagagttctatcaaagtgaatactccacattaccctaacatgcccaaagtttaacaattttttcttttttcttttttttgagatgaagtcttgctctgtcacccaggctggagtgcagtggcgttatcttggctcactgcaacctctgcctcccgggttcaagcaattctcctgcctcagcctcccaaagtgctgggattacaggcatgagccaccacacccggctaagtttttcttaaaacatttataaatcataacaaacttgcttctttcttaagcaatatgttgggcataaggaaagttcatgttatcttagaatattaggacagtggcttctccattctggctgtgcatcagaatcacttgtagtctgttaagtaaaaaataaatgcctgccatgtcagaaactcctacattttctaatttgctatctctgatttgctgtgccctgagaaattagatggccaaatatgttagaattcagtctaaaatgaaagtgactaggttctgagtgagaaccatgggaatatgtataaaggatgtgtgttttcttgccctgacactagtgctgtttcagttccttggtggcttttgttgtttgcttcttggtgctaatcgttttcaacagatacaatcacttctgaggagctgctgtatcatagaaatgaaatgttctttactctctaacagaaagtcctctttccaactcaaactggtctttactggtgtttatccttcgaaagggcaacagaacaagttcttgcagaggtatttagcaatgtttaaggccttaaaatggaactatttgtcagttatgattggtggcacctctgcactgcaaacagtacaaaaaccaagattctctttattctcctttgtaagtaagaattctaaagatctataagtgagaacacataaaagtgttaggttaaatttatagtgtagccattggttcaactttctctttctacatttggttcagtggctttttttcctagcattttttttttatcattttttaaaaagttttgaatataacttttctgtaatgtatccccaccacccgtctgtcaaaccacgaagattgctacatgtatttttctttattccttgttctaaataagatttagcacagtggtgtttcatttttttctttatgctttttttttcttctttctttctttccttccttccttccttctttctttctttcttttctttctttttttttttttttgagatggagtcttcctctgtctcccaagctggagtgcaatggcttgatctcagctcactgcaacctccaccttctgggttcaagcgattctcctgtcttagcctccagagtagctgggattacagacatgcaccaccatgcccagcaggtttttgtctttgtgtagaaacagggtttcaccatgttggccaggctagtctcaaactgctgacctcaagtgatcctcctgccttggcctcccaaattgctgggattacaggcatgatccaccacgcccagcctcttttgtttttaagacagggtgtcactctgttgcccaggctggagtgcagtagcgcaatcttggctcactgcatcctctgcctcccaggctcaagtgattctcctgcctcagcctcccaagtagctgggactacaggcgtgtgcccgctaatttttgtatttgtagtagagatggggtttcaccatgtggccaggctggtctttaactcctcacctcaagtgatccacccaccttggcctcccaaagtgctgagattataggcatgagccaccacacctggccttttttttattttttacttttttgctaattaggtcaagggttaattttataaacaagactgaaatattttgttgatttaaatgttctggttgactctctttttaacaagaagtgaaacttttactatatattttatataactccttattaaaatgaaatacatttattgcaatttatacttgagatacaatactatacatttaagttgtatattacttttgtaaaccataaaaaaatttattgggaaaatgtcaaaagatggtttgtagattctagttacgtgcctggaaagaaagaaaaatacttttttattatttgggtgtaattcttttgaaacttcaaaggaaataatcaataaaatgtaacatgcttttcaaaccatagtatattagtggggtttgtttgtttgtttgttttttgagatggagtctcaccctgttgcccaggctggagtgcagtggtgtgatctcggctcgctgcaacttacgcttcctgggctcaagtgattctcctgcttcagcctcccaagtagctgggattacaggcgtgtgccaccatgcccggctaattttttgtattttcagtagagacggggtttcaccgtgttagcccaggatggttttgatctcctgaccttgcaatctgcccgcctcagcctcccaaagaattgggattacaggcatgagccaccgtgcccagcccagtccatcttaaattggaagctctctatttaaatcttaaatatataaggtttatacatttttttagaacctgagctctttcaaacaccaagaccctctctttccaaataacgtcaaaatttggccacaggatgtaaacactctataagttcataaaccaaacaaagaaaccaggaggaagcattctttatcaaaggaactaaattaagaagctaaaacctaaataagaaaataaaaccacagactgggcacggtggctcacacctgtaatctcagcactttgagaggctgaggttttttatggtgaaacttgtctctactaaaaatacaaaaattagttgggcatggtggtgggtgcctgtaatcccagctactcaggaggctgaggcaagagaatcgcttgaacccgggaggcagaggctgcagtgagccaagatcacaccactgcactccattttgggcaacagggtgagactccagcctggtcaacacagcgggactccgtctcatgtttactccctacctccctcatgctcactgctaagatcttattgaaattttagtataaaaaataattaaaggggctgggcatggtggctcacgcctgtaatcccagtactttgggaggccagggtggccatatcacttgaggtcaggagttcaagaccagcctggccaacctggtgaaaccctgtctctactgaaaatacaaaaattagtcaagcgtggtggcacatgcctgtaatcccagctattcgggaggctgaggcgcaagaattgcttgaacccaggaggcagaggttgcagtgagccaagttcgtgccactgcactccagccccggtgaccgagggagactctgtctcaataataataataataattattattattattattaaagtaaatctgtaaaagtgctgtaaaaaatgataggggtatagattttccaactagaaaatgaaagctagtgttattataatgaaaagtgaaagtagagaaatctacatcgcatattgcgtggaagaagtcagcatcagaaatggtagccattgtaccctacattgtcacagagaggctccaggcttaaagttgacctgcgtagaaagcaagaatgaattgttggaggaagtaaggagggcgattgaataaagacttttagcagctgggccagctgaaccatcccaacccttcaaatccccttgtacctcttatcccacctccatacacagagcagttgccccaaaaacatttctcccctagggctgaaacttggagaactgatcccagggaaacaactgcctgcttcagctggtttaagaattttagtatgccccagaacaggttttcctcatactggcatttgtatttgtgggaagagagagagaccagactggctgcctgcttgtctgcttagcagcaaatacaacctgaagttaagcttgttgccagcatggcccactcacatccagagaagttgtggttagccctccacaagtgggggaaccttcttaggaaaacaagcgtgcatacaagaagctcatgtaaactctatatattgaaaacttgaatccaacattcgtgaacatgaaagaacaggacatttttggaaaactatgatgaaagaaaaggaacaagatgaataaacaaaagttatgacccaagaggatgtaagataaaaaagaacaataaaataaagttgtaattatcaccctttgagaggtctgaaggttcctgagaagagataatattcatgaaagaaaaagaagatcctatggaaaagaagcaaagaagaaaaacattctatgaagtttaaaacatgattgccagccgggcgtgttggctcaggcctgtaatcccagcactttgggaggctgaggcaggcggatcagttcgagaccatcctggcccacatggtgaaaccctgtctctactaagaatacaaaatatagctgggcatggtggcgcgtgcctgtaactactcgggaggctgaggcaggagaatcgcttgaacctgggaggcagaggttgcagtgagctgagattgcaccactgcactccagcctgacgacagagtgagactccatctcaaaaaaaaaaaaaaaaaagaaaagaaaagattgctaaaaacagttcttcaagatattaaaacatgaaaacagaatttttattttaatgaaataacttggcagcagtctagtgttgctgcagagaatagctgggattgtgttatttgaagataccagaaatctactgaggcaggagaactagaggggctaaaactagatcaggaagaacctcagaaagttgagggacttccacagtagcttttagatatggggtagtttgctgtttgtgggcaggaggctgagaatctaggattttgtacaaaataaaggagaaaaatgttatgatcagttggtacagaaaaaagcacatgacttgattaaactctactcattatggtaagtggcaaactagtaatagaagggaacttagtatgttaaagacaattggcaaaaaccaacagcaggccaggcacggtggctcacgcctggcatcccagcactttgggaggccaacccaggcgattctcttgcgcccaagaattcgagactagcctgagcaacatggcaaaacaccatctctagaaaaaatacaaaacttagccaggcatggtggtatactcctgtagtcccagctatttgggaagctgaggcaggaggatcgctgagtataggaggtcaaggctgcaatgagccaagatcaggcccctgcactccagcctgggtgacagaatgagaagaatgtcattttctttttcttttcttttttttttgaggcagggtcttgctctgtcgtccaggctggagtgcagtggcacaatctcagcccactgcaaccactgcctcctgagtttaagcgattctcctgcctcagccttcggagtagctgggattacaggcacctgccatcatgcccggctaattttttttttttttttctatttttagtagagactggatttcaccatgttggccaggctggtcttgaactcctgacctcaagtgatccacccacctcggcctcccaaagtgctgggattacaggcatgaaccaccgcacccggccgagaagaatgtctttaaaacacacacacatgcacgcacgcatacacacacacacacacacacacgccaggcgcagtggctcatgcctgtaatcccaacactttgggaggctaagttgggtggatcgcctgagctcaggagttcgacaccagcctgggcaacatggtgaaacccagtctctactaaaaatacaaaacattagctgggcgtggcaggatgcacctgtagtcccagctactcaggaggctgaggcaggagaattgcctgaacctggaggcagaggctgcagtgagcagagatcacaccactgtactgcagcctgggtgacagagtgagactctggctaaaacacacacacacacacacacacacacacacacaaatctgacagcaaacattacatttagtagtgaataaaaagctttcaacttggcataagaaacaaggagaatccctagttaatcaccacctctattcagtattgtagtggaaattcttgctagtgcagtaagccaagaaacaaaatggaaagccttaataaaagaattgtaaatgaagaaataaaatggcactatttgcagatgatgtgattgtataccaagaaaaaacaaaagaatctacagacaatttatgagaaaaatgaatttagcaaggttgctggatataagggcatataaaaatgaacagaatttttttattctagcaaaaaatacaaacgggccagtaaacatgaaaaagtgcttatcagcattaatcattagaaaaatgcaaatgaaaaccacagtgcaataccactttacatccatcagaatggctacaatgaaaaggatagacagtgctaagtttggcaaggatatgaagcatctagaatgctcatacactgctggtggcaggaaaaactggtacagtcattttgggagttagcagtgtctgctgaagttgaatgtacacatacccgtaactcatcaattctgttccttgtgtatgctcaacagaaatttgtgcacacattcaccaaaaacatgtacaagaaagtttatagaaacactattagccttcaactagaaacaaaccaaatgcccatctgcagaatggatgaatgaattgcaatgtattcatacaatgaaatgaatgaaatacagtcacatgaaaagtgtgaatgaatctctcaaatagtgttgtcagatacaaaagggtacatactatatgattttaatttaaagttcaaaatagggaaaactataatagaagtcatggtaacagatattcttgaggtgttgggtttgggtggaactgtaactagaaggagacacttaacacagttggtttgcgtacttttctttatgtgttatgtacgtcaatgaaaatttgcatttaaaaactcaggaagaagttaaacactgtagccaggtaactctcaacttgtaggctgtaagtcactagacgatgggacaggactacataagaagaaaaggaaagctttcttcctcatgttgtgggctcctgtggtgtattcctagccatcttttatagactaagctcagactaaggagtggaattgctgggtcatacagttactctttgtttagcccttttgagtatggctagactgttttccaaagtggctgtaccgttttacattcccataaacaatgtatgagtattccagtttctccacgtttttgctaacacttcttgtgaaatggtacctcattaataaaaattaactcaaagcattttgatttgcattccttgtatattctagatggaaatcccttattaaatacatgatttgcagagtttttctccaatctgtgaattgacctttcattcttaatggtgtcttttgaggcacaaatgtttttaattttgatgtttaattaacttatttttttcttgtgttacttatgcttttgtgtcatatatctaaaacatctttgcctaatccaaggtcacaaagacttaacacctacgttttcttctaagagtttgataggtttagctcttacatttaggtctttgctttgagttaatttttattaaggttaatttgtcaaatgtaacccagaagcatatagaaaatctatgaagaaaaaataggtgttttttttttttttttttttttttgagacagcgtcttgctctgtctcccaggctggagtgcagtggcgcagtcatggctcactacagccttgacctcctaggcacaagcaatcctcctgcctcagcctcctgagtagctggcatatatcaccacacctgactaatttttacattttttgtagagatgaggtctcactatgttgcccagcctggtcttgaaatgctgggctcaggcgatctgcctgcctcggcctcctaaagtgctaggattatagacttgagccactgtgcttggccaaaatagggatttttgacatttatttttataacatttttacagttattttaatttttcaaacaagcctgggtttattatttaaaattatcagctaaattagaaaagtaaacttttattttaatcctcattttctaatggtgagataagcatcctgaactatttttttcaagaaaaggcatacctattctgaaggtggcagcagtagtagttaaccagatgtgacaatggaagtaacttaaagaatgaagaacaggctactctgggcacgttgcctatggggtagtcctgctccacaaggagcaatgtaaaaaaaaagaagaagaacagtaaaatgaatacaatagagtttgtattagttttgctcagaaacatgaccccctctcatattgaatttggttttgtagccataattgatgatgaaatacataatacataaactacagcatcttatttgcagaaatacactggctaataaagccatgaaatcatcaaaacttaagcatcaaagacaacaaaacataagtcagttcaaaaccaaaagaaccatggagaaataataaattgttgggcaactatcaccactatccatcttgagaactttttcatcatcccatattgaaactctgtccccatgaagcaacaacactacatttaccactcccccacaatccctctgttctactttctatgattttgactataatttgatttcatataagtggaatcatacaatatctttttattttttttttgagacggagtttcgctctgtcgccaggcgtgtacggtggcgtgatctcggctcactaaaacctctgcctcctgggttcaagcagttcttctgcctcagcctcccaagtagctgagactacaggcacgcgccaccacaccagctaatttttgtatttttagtaaacggggtttcaccacgttggccaggatggtcttgatctcttgacctcatgatccgcctacctcggcctcccaaagtgctgggattacaggtgtgagccaccacacccaacccaatatttatctttttatgtctggcttatgtcacttatgtcttcacagttcatctgtagtgtagtatgtatcagaattttattcctttttaaggatgaatgtatttcattatatgtatataccacattttatctgtttatccattcattggtgggcagttgggttgcttccacattttacctattgtgaataatggtgctatgagcatgggtgtacaaatatctgttgttcctgctttcagattcatctgggtgtatacccaaaagtgaaattactggatcatatggtaattctatgtttactttttttgagaaattgccatattgttttccacagtggctgtatcattttatatttccaccagcagtgcataatgggtgcagtttctctacatcctctccaacactttctcgttttcagtttttgtttttttaatagccattctaatgggtatgtagtggcatctcattatggttttgatttatatttctctaatgatgagtgacgttgagcatcttttcatgtactttttggctatttgtatatcttctttggataaatgactattaagtcttttgccctttttttttttttttcttgagacattctcactcccaggctggcgtgtgatggcgtgaactgcaacctttgcctcccaggttcaagtgattctcatgcctcagcctcccaagtagctaggattacagatgtgtaccaccacgtccagctaatttttgtatttttttgtggagatggagtttcaccatgttggccaggctggtctctaactcctgacctcaagtgatccacttgccttggcctcccaaagtgctgggattacaggcacgagccactgcacctggccctttgcccatttttgaattgagttgtttcgttttttgttgtaattctttatatagccttttgccttttagtgttctttaactagagacattttttgcttaactttcaaagtggcttactggattggttgcaggaccaaatctctcatctgtgtatggcaggtgttgactcttttaacctcctttgttgaattttaatgttgatgttaattgagttttggcatgatattctattaaccttccaaataataagcttaatttcttgatccagccattgttgaatagtgccctttggttttatattgcttatgaaaattctagcagctcatgaaggggataagatcacttgtagtgtaccatatgttatatgcatttcatcctcacaacttgtgagatgtgtattctgcatttttcagatgaaggactgtggatcagagttaaatcgagtaaactgctcaaaatatgtatctgatagtttactaatgttgatatttaaccaagttttcttcaagtttattatcaatttatgcactgaactgattttataaaactcttacatgtaggcttgtatctacatttcaagagtatagccatcactgttttataatagttgttaaaattgtagttgttcctacttaaggactatgtttagtttcttcctttaaatattatccaggtatgactacaaatattatccaggtatgactatagagagccaattagctaagtgattgcccgaaaccaccctatcttattgctgcctttaacaaaaagaccaagaattggatgaaaaacaaccctgcttcactcttggcttttcaaaagtatgtaactggctggcctgaaggtagtgagttatctcaattgatggttcacaatcagttgaacacagatcaaactccttgttctacactttaccccctacttgagtagggggtaaagactacttgagtagtcttttaaaaaaaaagaagaagaaaaaagcatataaccactaagttgagaaatttatttactttaagccattaaccagttcttttcctggctatataatcccatacacaacattatttctgcccaatagaaattttaaaagaaaataaatatctgaagttaattttaatatttttaatttagtccaatatatccaaaatattgtatttcagtgtgtaattaaatataaaaatcactagtgaggtattttacattcattccttatattaagtatttaaaatccagtgtgttaaacttacgacatatctcaattcacacttcccacatttcaagtattcaatagccacatgtgagttatgcctaggggtattggacagtgctgattaggaggtttaaaatgcaactcataaatttaattcatctcttcgatctcagtaaatgacccttctttctagaggtcattctactattcctctcttccttaccctccacttcagacaattttattgattttttgtcttttaaaattttgtaaatccatctttttatctcctgccctaccacagctccagtttggggattcatattctcttacctggactattgcaataccctctcagttggtctttgtgtctctgcttttgcctcataaatttcacttctactgttactaattctgattccaaaatctgctttgcagtgagaatgtctgcctaactgaaaatgtcaccattctactccactacttaataccattcaatatattttagtgatttcacattatttcaaataagtagtctgtgaggtaagataagtatgctgtcctatactatcacaagggatgcatacacaactctttgggaatgtagggaaaggagagtagatatccttttctcatattccttttaaaactgcatgtttagtatctctttctatgtacataacatagaacatgtaaattatttatcagtaaatatattcacagtcccacatcacttaatgaggggctatgttctgagaaaggcttcattaggcgatttcatcgttgtgtgaacatcatcaatgtacttacccaaacccagggtggtatagcctgctacacacttaggtacttggtatagcctattgccccgaggctataaacctgcacagcatgttactggtttgaatactataggtcattgtaacacagtgataagtatttgtgtatttaaacatacctaaacatagaaaaaagtagagtaaaaataccttgtaaaagattttttttaatgatacacctttatagtgcacttttcatgaatggagcttgcaggactggaagttgctctgggtgagtcagtgagtggtgagtgaatgtgaaggcctaggaatttactgcacactactttagactttataatcactgtatacttaggctacagtaatttattttaaaaagatttttttcttcttcaataataagttaaccttagcttactataaattttttactttataaactttttaatgttctcaaactgttttactcgtgtagtaacacttgacttaaaacacaaacaatattggccaggagcagtggttcacatctgtaatcccagcactttgggaggccaaggcggatggatcacttgaggtcaggagttcgagaccagcctgaccaacatggtgaaaccccatctctactaaaactacaaaaattagccagtcatgggggtaggcgcctgtaatgccagctactcgggaggctgaagcaggagaatcacttgaacccgggtttctcagtgagctgagatcataccactgcactccagcctaggggatagagtgagactctttctcaaaacaaacaaacaaaaaaaacacaaacatattaatgggtccaaaaatacacttagatacaatgaataatatctagtatttggtagtacaataggttgctgtagttaacaacaattgattgtatattttaagtaactagaggaatggaattggaatgttcctaatacaaagaaacaataaaggcttgagatgacggataccccaattaccctgattaatcattacacattgtacagctgtacaaaaatattttctttatatccttattccataagcttttttctgtttgttttttaatttctaattttttttttttttttttacttttgaaacttttttgttgaacactgagacgtggctgggcagggtggctcacacttataacccaacactttgggaagctgagatgggagggatcacttgaggtcaggagttcaagagcagcctgggcaacataatgagaccctgtctctacaaaaaagaaattagcgaggcatggtgacatgcacctgtaattctaactacttggaaggctgaggtggaaggatcacttgagcacaggaggtttaggctgcagtgagccatgacggcaccactgcactctagcccgggcaacagagtgagaccctgaatccaaaaaaaaaaacccaaaaacagaaaactgagacagagggccaggcgcagtggctcacgcctgtaatcccagcactttgggaggccgaggcaggcagatcacctgaggtcaggagttctggaacagcctggccaacatgatgaaaccccgtctctactaaaagtacaaaaattagccaggtgtggtggtgcacacctgtaatcccagctactcgggaggctgaggcaggagaatcgcttgaacctgggaggcggaggttgcagtgagctgagatcacaccactgcactccagcctaggggatagagcgaaactctctctccaaaaaaggaaactgagacacactatcctaggcctacaggggggtcaagatcatcaatatcactgtcctccacctccacattttgtcctactggaaggtcttcaggggcagtaacacacatggagctgtcatttcctgtgataacaatgcgttcttctggatacctcctgaaggattgcctgaggctttttacagttaactttaatttataatttgaagaagtacgctctaaagtaatgatgaaaagtatagtttagtaaatacagaaaccagtaacatagtcatttattatcattatcaagtattatgtactgtccataattgcatgtgctagacttttataggactggcagagcagtaggtttgtttgccagcatcaccacaaacatgtgagtaatgcattattactcacattaaccattacgatggttacatcactaggcaatgagaatttttcagctccattgtaatcttattggactactgttgtatatgcggcccatcattgactgaaatgtccttatgtggcaaatgactatagttttaatttcagtaaaaaactataatctacatagagtaggaaaagataagtctgttagctgtacaagggcagagtttttgtgttttttcactgacttattctcagtgtcaataacagtatccggcatagaatagtaactggtcaataaatatttgttgaataaataaatgctgtgcatagaaaaacactctaactttatactttattagacctttaaggcaaaaagtaagtttaaataaacattttctcatctctattcaatttaaatttttgacacttgaagtaaaacttaaattactgtcttcttgcattatcttacagagatttgtaaagaaagtctctaatatgtataatggagtaaaaaaaacttttttcccttctagtaaacgaagcaaaaaaggagataaaaatgggaaaggcttgagacacttttcaatgaaagtgtgtgagaaagttcaacgaaaaggtacaacatcgtacaatgaagtcgctgatgagctggtgtcagagttcaccaattcaaataaccatttggctgctgattcggtatgtaaatcatgaacctgacattgattttgatggatgatgctacttctttgtgttatctttgttatagatttgaggaatcacgactatacttgagggttttatcctttattttgggggattttttgttgttgttgagttttattttggagggaattcctttttttttgttttttaggcggaacctcactctgtcgcccaggctggagttcagtggcgcgatctcggctcactgcaacctctgcctcccaggttcaagctattcttgtgactcagcctcccgcgtagctgggattacaggcgcacaccaccattcccagccaatttttgtatttttagtagagacagtgtttcaccatgttggccaggctggtctcaaactcctgacctcaggtgatccacctgccttggccttccaaagtgctgggattacaggcgtgagccactgtacccagccttagttgttttttttgtttttttttgtttttttttaacatttaaaaaatatttggccaggcgcggtggctcacgcctgtaatcccagcactttgggagtctgaggtgggtggatcatgaggtcaggagatcgagaccatcctggctaacactgtgaaaccctgtctctactaaaaatacaaaaaattagccaggcatggtggcatgtgcctgtaatcccagctactcaggaggctgaggcaggagaattgcttgaacctgggaggcggaggttgcagtaagccaagatcgcaccactgtactccagcctgggcgacagagtgagactccgtctcaaaaagaaaaaaaaaattggtcgcctatccaataattttttattgtttctgaatcttattgtttcttcaatgtctaagtcaacaagaaaattttatttttaattggaaaaggaatacataaatatgtttataaaaaattcagttgtctggcagagtctcaaataaatggaatacagtggtgcagtttcggctcaatgaaacctctacttcccaggttcaagtgatgcttgtgcctcagcatcctgagtagctgggaccaaaaatggcaaggctctgcctctacagaaaaaaaatttatttctttatcttttttttttttttttgatatgaggtctcactatgttgcccaggctgattttgaactccttgactcaagtgatcctccagcctcagcctcccaaagtgctgggattacaggcatgagccaccatgcctgacctctacaaaaagtttttttttttaaattagcgaggtgcagtggcacaaacctgtagtcccagctactccagaggctgaggaggattgcttgagcccaggaattcaatcatgccactgcattccagcctgggcggcaaagcaagacttcgtctctttggggggaaaaaaaaaaaaaaaaaaaaaatatatatatatatatatggctatgactgtttctctagagcactgatttagccctatcctattgattctgatatattattctttagatgttctttaattttggttttaatttgttctttgacctaaggattgccttagaaagagttcttatagttccaagttttgtttgttgctttaaagttttacttttattacttaatttgtccagagaatatgatttgaactatttcccttttttttttggattacattgagattttccttgggagccattatatgtgattttctttttcttttcatgttctctaggcacttgaaaaaaaaagtctatagcattctgtttctgagtgaaagccatggttctcacaatgatctgcaagcccctttgtgagcttgcccaccattacctcactaatctcgtcttctgctatgcactgtctcatttactaccctccagccacatgtcactatgctccagctacatgttttgtccctgatcaggccattacactgctttgcctagagcagtctttgctaggtattcatatggcttctctctccctgccttgtgatcttcactcacctgtcaccacaatgaagcatttcttcttagcacttttcaatatctaaaatacatttttactaataccctatcaccaccaccttcccaggatataaacaaaggttgagtttttttctctttattcactgctttgttatttttctgataatttagaatgcttgtagtctcagttcttcagttggttacctttataacttaagttccttgagttaccacctgtagacagtatctattggttatgaagaaaaacatatgtttttttctgtcttccatttttctcttctaccatgggactcagattagatatattagtatatttgttaaaaagaataatactactactataggccgggtgcagtggctcacgcctataatcccagcactttgggaggccgaggtggacggatcacactgtcaggagttggagaccagcctggccaacatgatgaaaccctgtctgtactaaaaatacaaaaattagctgggtgtggtggtgggcgcctgtaatcccaactactcgggaggctgaggctggagaatcactggaacccagaaggtggaggttgcagtgagctgagatctcaccactgcactccagcctgggcaacagagcaagactctgtctcggaaaaatagttgtttttattactttaaataaatagattgtgctgaaccctttattattatttaatctgctttgaacaacatccatatcccttccaatatcaaaaagaggaaattggcatacctatcacattgcctcctcccagtacttgttgttacagtatcattgtttctacagggtcaagatttctttttttttttttttttgagacagagtctagctctgtcacccagactggagtgcagtggctcaatcttggctcactgcaacctccatctcccggattcaagcgattttcctgcctcatcctcctgagtagctggcattacagtcatgcgccaccacgcccagttaagttttgtattttttagtagagatggggttttgccatgttggccaggctggtcttgaactcctgacctcaggtgatccgcccaccttggcctctcaaagtggtgggattacaggcatgagccaccactcctggcccattgtcaagatttctagtatttacattcagttctataacttaaatcccccacttatttagatctagttttatatttaggtggattcagtgttctccaccatcctttattatcgttgcatttcctgaggaccttgttccacaatgtaaaccaacatggtttccttgattaagtcttactatcaaaaaatagaagaaaaaggccgggcatggtggctcacacctgtaatcctagcactttgggaggtcgaggcaggcagatcatgaggtcaggagttcaagatcagcctggccaatatggtgaaaccccgtctctactaaaaatagaaaaattagctgggcgtggtgatgtgcatctatagtgccagctacttgggaggctgaggcagaagaatcgcttgaacccgggaggtggaggttgcagtgagctgagattgcgccactgcactccagtgtgggcgagagagcgagacactgtctcaaaaaaaaaaaaaaaaaaaaaaaagaagaagaagaaaaatggtcagctgaactgaacagtgtcccttgtcatatagaggattatattttggtacaagttcctagtcccattgtagattggagacagtttgcagatcagcagtggtcaaggaacacattttgagaagcacagttttacccagaacttgaataaatgtccttgatttttttaagtctaaaatcctcccagataatgcaagggcttagaacactttacctccaatacctttttctgttaatatgtatactatttgttgtcatgtatattaagttctgtattctagactccataaggcattattattgttttatacagtgaaaattgagatttacccacatatttacttttttgggttggtcttcattctatcctacatacctaagctcccatcttagatgatatttcttctacctgaagaaatccctttagtatatttcagtgtagatctgcaggtaacatgatctttatttttaagattattttgttttatattgtttgaaagtatttttatttcatctttaattttgaaggatattttctcggaatatagaattcttttggatgtttttgtcagttggctaaataaaaaaatagaatccttccagcactttgaagttgtaatattaatttgatatattcatatcatgtgactgtatcttaacccttaagatttatcactcagtgaaaatattttttagcaggcttatgatcagaagaacattaggcgaagagtttatgatgctttaaatgtgctaatggcaatgaacataatttcaaaggaaaaaaaagaaatcaagtggattggcctgcctaccaattctgctcaggaatgtcagaatctggaggtaagtgagaaaatctgtttatgaatagctgtttgcattattttacatcacaggcattttaatttaaaaatgtaattctaatataaaatatttccaatttttcatgtataccatgtcattttttaacagactgtagaattttagaattggaaggcgccttataggtatagtctgcagtttaatttgcaaatgatgaaactgagggatataaaagttgaataacaatttgattttactgtttcttagagaagatttttatttcatcctaagttaattctgagcactctactaataaacttttggtgaaatggtatcttatttgatgagatgcttgctgtatgtatccaaaaaaaaaaaaaaaaaaggatcaagccggctgtttatttcctttattggttacacaatattctgaatatagctgtggaagtcagacttttactttgaaatagtagcaacagaatgaatagtgtttcatttgtgtctttaccagaatggatagaattttggaatgatgtatgcagaagcattttaagttctgttaactttaagcattatagaaaactcttcctaaatgagcatgttccctgacatactgtttctaaattgacttgacataattttactatcatggccataaatggagtaaactgaggttaaatatggcttctgggccaggggcggtggctcacgcctgtaatcccagcactttgggaggccgaggtgggtgtcaaaatggtaaaaccccgtctctactaaaaatacaaaaattagccagtggcagacgcctgtaatcccagctacttggaaagctgaggcaggagaatcgcttgaacctgggaggcagaggttacagtgaaccgagatggtgccattgcactccagcctaggcgacaagagcaagactccatctttaaaaaaaaaaaatatatatatatatatatatatatatatatacacatagctttgggagataattaagattggtttcctgtttttctcagtcttttctccccagcaattcagttatttggtattattatacttatggatggagagagaaaccagatattcatcagaagctatataatatttttcatatgctacagtggaaatatcctccttttcttgtttttcttccttctcatagagtggaatttgagcatcattttcatgaccagtaatattgagctgataccaaagactcattaagcaaaaaaaccctattcacatctaccttgtgcttaatcacaggttatacaaggcaaatctctgaccccaaggtactgtcattctcaccggggagaagagaaatgtaaaagagttaccgaaaatgtgattactcctaagaaagaaatgtacagattctctgcaaagagggctgagggagggctttaccaaggagataatcccagagctcaggcatgaggtgggagtagtctgccaagtggataagggtggggagggccttcaaggcagaggtgccacatgggctgagacaggcatgagaaagcttgcctggagctgggtgtggctagggaacaggcatggagaaaggaggatagatatctaagtgttaagcagtggagacctgatcctgtaaacaaagggaagcagttgataaattacaaagagaagggttgataggatgttttttaaaggatcactctgccagtgggttggaaataaaattaacaggtagggaaggaaatggaatgggggaggcggattagagatggtctgagttacggcagcggccatgagattggagaggtgttttagaggtacaatcagtgcagcttgacctggttggatgagggacaggtaaggggcctggcttgtcagagcttctgataaagggatgctcctacaacatcttttcaaatgcagaacgccacacagattttacagtgaatcttaagtaatttaaaagtaaaacgtggtggatagaggaaccatgaatggaaactgctagtatagactagactggatgtggagcaagtaagagataatctgctggagcagacaagaaaaatgtcttatttgatgattgaaagacaaaattgtaacaaatttagtttaaagatcttaattgccttttatttgtgattctagaatctggcaacacctcactagtaagtagaatgagtattcctataagctgagcagaagaggttgaacattcttcagtgttttaaagatagagaagcagcaaaggcggatagaggcagaaacagaacaaaaagcagactggacatatcaatgtcactttccttgtaagggtaaaatagagaagactctcttatgccagctgcaactggcctgtttgggtagtttgctattctctttctctcctgatttcctaggtcagataaacaactcagttttggcctggtggcatttcagcatgagtgactccatttttgtttggtctgttgagcttagtgcaggagctcagtccaaaccaatgggctcctataaattttctttttttttttgttgagttggagacttgctctgtcacccaggctggagttcagtggcgcaatcttcggctcactgcaacctccgcctcccgggttcgagcaattctcctgcctcagcctcccgagtagctgggattacaggcgcctgccaacacgcctggctaatttttttttttttttttttttttttagtagagacgaggtttcaccttattggccaggctggtctcttggccaggctggtctcgaactcctgaccttgtgatccgcccacctcggcctcccaaagtgctgggattacaggctgagccaccgcgcctggccataacttttcttaataaatgtcattggcttttgcccaaggagacagtgaggaactcaactgcaaggaagttcagaccctaatgtctgttttctctgagtagttatcagattgagaaaaaaagcagtagtttgaagctggaaaatttgtccaataagcatgtttctttttttttttttctttttgagacagggtcttgctttgttgtccaggctggagtgcagtggcatgatcttggctcactgcaatctctgcctcccaagttcaagcaattctcgtgtctcagcctcccaattagctgggactacagatgcgcgccaccacacctggcttttgtattttttgtagagatagggtttcgccatgttggccagactggtctcaaactcctgatctcaagtgattctccccccctcggcctcccaaagtgttgggattacaggcgtgagccaccacacccagcctaccatgatgtgtgagatatctgtattatcagctgtcctcattggagagtcagctaagctggaattgtaaataagatcttgccttattcttagaggagtaatataacaaagtaattaataatagagtccctgtaaccagaggatttaggttcaaatcttggctcttgccattcactagctgcgtgaccttgggtagttacttaagccctctatgcctccgttcccttcgatgcaaagtggataacaacaggacttaactcataaggtttttgtgaaggtgaattaagataatgtgtgtaaaatgcttacttttgtgttggcagatagagtgagtataaactaagtggtactattactttgattagaacttgaataataattgcaacaagtactgctaacaagtattcattaagtgtatgatttcatttttaatgacagttgccacagatctgatgttgtgtctacttgttcactccagcccctgccccctacaaagatatgatttgtctttattcatattgttaaaatgggttcagtttctctagggaaaattgttatctcagaatagggacctggaaagtgaacgatattttatagtctacctatgttcatattattttgtaaccaatgttttaaagatagagaagcagaggcggatagaacggataaagcagaagcgggcccagctgcaagaacttctcctacaggtaaagataccgagatgttttcattaccttccctgtttctccacttgctgccttttggagtcagtgtgttttctaattgtggtgcctctgagtggtgtgtggtgagcccacgccagggcagcctctctcacctcctagcttgttgccatccacgtgctctgccttaagatggtcccatctgttgccatcatctcagctccacagtagcttccctgccctgtgtgtgacttacgccaggcagcagttcactgttgacactcaggcctctctaaacataaactgtcaggggtctttttgtgtttgtttattttagcccgaatttggaatatccactagtgaagctagttaaattttaggtgcttcaagtacagtaatcaaatctgcctgtaatacttaattttatcagtaaatgacagaatggcatgaaatagttcagtaagatttttgttgttgttgttttttgagactgagtctcactctttcgccaggctggagtgcagtggtgcgatcttggctcactgtaacctctgcctcccgggttcaagccattctctgcctcagcctcccaagtagctgggattacaagtacccgccaccatgcctggctagttttttcgtatttttagtagagacggggtttcaccatcttggccaggctggtcttgaactcctgactttgtgatccacccgcctcagcctcccaaagtgctggggttacaggcatgagccaccacactgggtctgtttcagtaagatttatagaaataccaaaatttaggccggttatatatatatatatctcatatatatgagatatatatatgttatatatatatatatctcatatatatgagatatatatatatgttatatatatatatctcatatatatgagatatatatatatgttatatatatatctcatatatatgggatatatatgttatatatatatctcatatatatgagatatatatatatgttatatatatatatctcatatatatgagatatatatgttatatatatatctatatatgagatatatgttatatatatatctatatatatgagatatatgttatatatatctatatatatgagatatatatgtgttatatatatctatatatatgagatatatatgtgttatatatatctatatatatgagatatatatgtgttatatatatctatatatatgagatatatatgttatatatatctatatatatgagatatatatgtgttatatatatctatatatgagatatatatgtgttatatatatctatatatgagatatatatgttatatatatctatatatgagatatatatgtgttatatatatctatatatgagatatatatgtgttatatatatctatatatgagatatatatgtgttatatatatctatatatgagatatatatgtgttatatatatctatatatgagatatatatgttatatatatctatatatgagatatatatgttatatatatctatatatatgagatatatatatgttatatatatctatatatatgagatatatatgttatatatatctatatatgagatatatatatgttatatatatatctatatatgagatatatatgttatatatatctatatatgagatatatatgttatatatatgatatatatgttatatatatgagatatatgttatatatgagatatatgttatatatagttatatattatatatattatatgttatatatagttatatatattatatattatatatattgttatatattatatataattatatataatatataatatataaataataatgttttgtttgaagagaatattgtgcagctttaaaaaaaaaaaaagctgaaactgacagtttattcctatgctcctgcctgtagaattctaccaaacactcctccttgaactcctgtgctgccatcttcttccccccggcagcctctctgttgtccctgtccctgcacagttatctgcagtatcccctaagagctcatgccccaaaccctgtgctggggccctcctggaatttcttcaaaaccatggaacattttggagcttaatttttttggcacgttatttttaaaaacctgtttatcagcatgccaacagtcatctgcctatcagaaagaatggtgctgggcaagatcaccctcatgtgtgtaggactttcctgtctctagatgcctgatgcaaagaatgaaaccatattttttccctgcttacctctgtaccatgaacattgtttttttattttttaaagtcttgaacttcttttcctctactgtctctcaaaccaaatatttgtagaagagttccacccaggggcaacatggctgtcaacattcatagaaacaggtctctctaaacattaaagtgaaacccaaagtataactgaaatcaacttgtggtcttctggtaaacttaaaacttatttccaaaggccggatgtggtggctcacgcatgtaatcccagcactttgggaggcggagacgggcagatcacctgagttcaggagttcgagaccagcctgaccaacatggagaaaccccgtctctactaaaaatacaaaaaattagccaggcatggtggcgcatgcctgtaatctcagctacttgggaggctaaggcaggataatctcttgaacctgggaggcagaggttgcagtgagctgagatcgccccactgcaccctagcctgggcaacaagagcgaaactctgtctcaaaaaaaaaaaaaacaaaaaacttatttcctcctagcatttcagtttttttcctttcatcaaataaattaagttgtcatagaaagtaaattaagcagccaggcacagtggcttactcctgtcatcccagcacttggggaggccgaggtgggcagatcacgaggtcaggagtttgagaccagcctgacaaacatggtgaaaccccgtctctactaaaaataaaaaaattagccaggcatggtggtgcacacctgaaatctcaggtactcaggaggctgaggcaagagattcacttgaacccgggaggcggaggttgcagtgagccgagattgcaccactgcactccagcctgggcaacagagcaagactctgtcttttttttttttttttttttaataagtaatccatttgctgtggctaagctcacttgatttttttttataagctcatgtcacaactcactcatgtcacatgacacaggtaactattacctccttgctaccacctctcttttatttttggtaatgtagaagaatggagtgagtaaagcaaacctgtagataatcccaatatcctacttttatctctataattgccctttccagcccttaaaccttttccataataaacgcataggaaaatgaatgaacacacttaaagctgttcagcctctggaatagatgttaatgagtttgaaaaagaacaaaaggccaaaggaaatcaatcaaagggcaacaaataagtcagttcaaaataagtgaattatttttccttttactatccaaaataacattatatggtatatgaaatttgtgacagtgttaaaaaaaacattattatgaccaggtgcagtggctcatgtctgtaatcccagcactttgggaggccgaggtgggcagatcacaaggtcaggagttcgagaccagcctggccaatatggtaaaaccccgcctctactaaaaatgcaaaaattagccaggcatggtggcgggtgcctgtagtcccggctactcgggaggctgaagcaggaaaatcatttgaacctgggaggcggaggttgcagtgagctgagatcgtgccactgtactccagcctgggcaacagagtgagactccgtctcaaaaaaataataataaataataataataaaaacattatgtttttactgctctcttcacttgaaaaaccattgatactattaaatgtacacagcattaaatagtgaatcacaaatacataagggccattagttatcactgcttatattcccccatataccagggtcctcttgtggcactagggacagacaccaagttaggcaaagtgtaggaacagctcttgagatgtgtattctagtaaaagggaagagaagctatgcaggagtatttaagcatgtaattctttttctcagttccacagtttaatcataatttttcctcattattaaaggaattaagcaatgaattcgttttttagcaacagaaaataatgaaatgtaacctcaataatgtttggtaatgatattgatagtgctagttattgatagtgatttttggacacacttaggtctacaataaattggtgttcattattttttgtgcttttcaaagagtaaatcttccccttttggggagatagcactcagccattttaagataatagtaatcttttcttttcttttcttttttcctttcctttcctttcctttcctttccttcccctttccttccccttccccttccccttcccctcccccttccccttcccctcccttctcttcccttcttttctttcctttttttcttttctttttcttcttgagaaagggctctgttgcccaggttggaatgtagtggcacagtcatagctcactgcatcctccaactcctaggctcaagagaacttcccacttcggcctcccaaagtgctgagattacaggtgtgagctaccatgcctggccaataatagtaatcttactgaaactttagttaaggtccagaacctgaaataaacaatactgatcataagattgctaaaatgtaaaaaataaatttatcactactgggtgacaagattataacaagctaatgaaggggaatgaatggctctgacttgaggaacttttaaaacgttatctgtttcttgagcagatgaaaaacttgaactgcatacagtctttctagctgtgaaattctatcgtacatttaccttattaaaaaaagggagatcacttgtttgtttgttggttggtttttctcagacagagttttgctcttgttgcccaggctggagtgcagtggtgcaatctcggcttactgcagcctccgtctaaaagggagatcactttctttggcttttgagtaatggttataactaaaagtagcggcaagatccagtaaaaaaatttaggccttgatgtatcttataattagtgctgagcctcagttacctcatctggaaatgtctggttggggaaggctggggctggattccaaactgtgcccagaggctgctgagaagttctgtggaggtgccttagaaaccatgtggctgtgcttgagggcagagatggcagagcttaggacctggcctcactgcagccagcctcaacagcaccacttccatctgttttacatgagtttttttttgttttgttttgagacagggtctcattctgtcacccaggctggaatggagtggtatgatctctgctcacagcaaattctgcctcctggattcaaacaatcctcccacctcagcctcctgggtagctgggactataggcacataccaccatgcccagctagtttttgtattttttgtagagatagggttttgccatgttgcccaggttggccttaaactcctggactcaagcaatcaacctgctttggcctcccaaagtgttgggattacaggcgtgagccactgtgcccagcctccctcgagattttatttgaagaaacaattttgtgcctttaaaatgtttgcatatccctgggctacacatcctaaagtttgggggcatatttgaccccaaactgtcaggagtctatgttagataaatggtatcacccttgctgtgtcatttgctgaagagttccaggtgcctactggttctttcccagattgtgaggtcctgtttctatggatgatggaaaaatgtatttattgagttggatcattctttcttaaatgtttaattttttaaattaattcattagtgcaggcgggatgtctctttaaactctaattttaaactatatttaaaggtattatcttaattcttttaaattccaactcacttatgcacaattgaccatattgtttttattgatcattacagcaaatcgctttcaaaaacctggtacagagaaatcgacaaaatgagcagcaaaaccagggcccgccggctctgaactctaccattcagctgccattcataatcatcaatacaagcagaaaaacagtcatagattgcagcatctccagtgacaagtgagtggagaactagggatgggtgcagggctggccttctgttaacattttcatatcatttgcaaactcaagaaggatgcactttattagttgcacccctcaaaggctggcttccttggggcacatgaaacacctcctgaaccatgggtgcaatcttccactagtgtgcgctccaaccctcaccctctgtggtcccctgtcttgtgccaggcactgtgctgtctgtattatatgtgtgtggcagtgtctgggcccaacctatgacgtgctgcatgtatgtggtaactctgagcaagtaactgtgataagttagcccagcactgtgggtctgggacaaggtagattcattggtgattcaccgtcatagtttattacggaaatattttaggtcaacatgtggcattaaaccaattatttctttgttttgctatatcatagttatgcatgcttctgtttattaatgaatgtatgaatagacatgaaaatgcctggcacattctttgcttcctttaaattgtgtttttacattttaactaagatcaatgataatattcattatggcaaataagaagtagcacttttcaaaatatagaattaatttgtgatgtattttaccattcatgaaaaagtttctctcagtggtcttcaggctgtgaccagtaccataaaagagagttaagagtatatatagggtgcagagtgagacggatccatgtaccgcttatggctcccccacttcgctgctgcaaagctctgttttctcaagaacaaataggaatgatactgggtcccctatgacttcccagccttgtgaggattaaatgagttaatgtctataatgacttgaggtaagtgttttttaaatgttagctgctgttacaaaaggtcagcctatagtttattgttcaaatagggatttattaatgcaaaagaagactctataataattgcgtcagtaccacaggcataccccagaactgtcccagggataccagaacttcctgtctcctagggccctgacattgcccttgggcttcactgctacttgttttcccactcttcttcctggcgctcttgcgccccctgccggtctctgttgtgtccagagattccgggccactccactaagaaggcacacacacaaaagaagagttagccaggcgtggtggttcacacctgtaatcccagcactctgggaggccggaggctagtggatcacctgagatcaggagttcgagaccagcctggccaacatagtgaaaccctgtctctactaaaaatacaaaaattagccaggcttggtggcgcacgcctgtagtcccagctactagggaggccaaggcaggagaaacgcttgaacctgggaggcaggggttgcagtgaaccgagattgtgccactacactccagcctggacgacagagcaagactctgtctcgaaaaaagaaaaaagaaaaaaacagcaggaatttcaaaactatttgataattgagactatagacacaaaaagaaatagtagaggttatgaagtaaaccagaaccaataaatttttttttaagagtggattcttggccgggcgtgttggctcatgcctgtaatcccaagcactttgggaggccaaggcaggcagatcacctgtggtcaagagtttgagaccagcctgaccaacatggtgaaaccctgtggctactaaaaatacaaaaattagcgtgatgatgcacacctgtaatcccagctactcgggaggctgaggcaggagaatcacttgaacccaggaggcagaggttgcagtgacccaagattgtaccattgcactccagcctgggcagcaagagcaaaactccgtcccccccaaaaaaagagtggattctcactgttctcactgttgcccaggttggagtgcagtggctatttacaggcacgattatagctcactgcagcctcaaactcctgggctcaagcggtccccctgcctcagccttcctagtagccaggactgcaggtgcacacttccttggccaactaaagctgatccattttttaatcttctaagtttcttaacctctctgagatcatgttcctttctccacaaaaataagaattatagtatttaccttgccagtttcaaaaagttatgggtaaattaatatacaacccagcccagtggtcagtaagtggtagatatctgaattattttccacacacttgcaaattctttataaatatatgtcaaagaggaccattaacatagtctcagaaaactgagaattcaggccgggcacggtggctcacacctgtaatcccagcactttgggaggccaaggtgggtggatcataaggtcaggagttcgagaccaacctgaccaacatggtaaaacccccatttctactaaaaatacaaaaattagccaggcatggtggcacgcgcctgtactcccagctactcaggaggctgaggcaggagaatcacttgaacccaggaggtgaagtttgcattgagccgagatcgtgccactgcactccagcctgggcgacagagcaagactctgtctcaaaaaaaaaaaaaaaaaaaaaaaacaacaaaaaactgagaattctggaaaatggttagcatcttttcagataaaaaacacaaaacttagcattctagttactctctcaaattagtctcttgttttgtatggagaattataaaactatcttaggttagtctcttaagtctaaaaagaatgatgggaaaatctgggaatcattggcctagggtattgtggacactgttcccccaggctggaatctggtgaggcttccatctcttgggtggtccctgactcatgccctttccttggccttcctttgagtggagggaaggaggctctgagtagcttgtacaagcttgttatccgacgtaggtccaaaaaccctttcagttactttggtgatgcagtctttccccataattagccaagaggctttccacaatgaggattacatttacaaaacgatctgcttttaacagatgcctgaaatcatccctgtggcaggcacccacttcagatttttttttttaagttgttattgtactttaatcaaattcatatactttagattacttaaattggtattttgcttcaaattataatttttgcttctaagataatctgttattcaaattatcttagatagggtataaagttttaccctcacatgattttaatagaatttcatgaccaggtgaaacctaccattgtccccaaaccctgtccctgcagggctgaggcccatgatgaaggtgctccaggcctagcctaggagtcggaaggactgtgtcttccttcttttgcctcttgattaacgtgtgttgggctgctgggaagctgggaatccaatttgggtactttccaaacatatttggaaacgtgcttgtattacatgtgacattttttcttaaaacattttactccttagcctctcaggacaggatttggggttgttttcacttgttgaaagtcttctatttattgcttatctgaagtaggctgtagctaacatttgactcatgaaaatgaagtaagcattcaaaatgtttttttcctcaaagctaacaggccaactcggaatagggatatcgtaatattaaagtagaaaggcttttcttttgtggcaaagctgtaggcaactttgagaagtactggatttagaataaaatttctatcctctgtttgtaacagagttagggctaaagtttgtgggtttctatcatctgtcagaggaatgttgttttaattgggaaagtgttttatttgagatgtcattcccctgacagagcagaatgactcatggctctctaaatggtagcaatttctagcactatagctggatttaggcccccattctgttacttaaactatagaatacaaaactattcagacctctccagcaccaccaaaaaccctttactttgtttcctgatgcaggtttgagtatcttttcaattttgacaacacctttgagatccatgatgacatagaagtactaaagcggatgggaatgtcgtttggcctggagtcaggcaaatgctctctggaggatctgaaacttgcgaaatccctggtgccaaaggctttagaaggttatatcacaggtatgttaactgatgctttcatgtgttgtccctgattaaatgttgaatccaaacttgttaaaacctttcttatagaaaattgcaaaattttagaacatctgtgcttgtgtcgacaaactgaaacctttaacactttaggaccattttttcaaaaattagattaaatagattgtttcataacattatgaacttacatctatacaccacacattatatactattacatctaaattggctcactcagcactgaatttggctcttcagagagatcttgtaattcccagtacctagcttagagcctagttagagtaagctagtaaaagctcaatgagggagttttaaaaaatcttctcttagtgccctgtggatacttcaagggaaactttgggcaatttacaaaagaaagtaggtacatcctggccgggcgctgcagctcacacctgtaatcccagcactttgggaagccaagacgggtggatcacctgaggtcgggagttcgagaccagcctggccaacatggtgaaaccctgtctctactaaaaaaatacaaaaaattagccgggcgtgatggcacatatctgtaatcccagctactcaggaggctgaggcaggagaatcacttgaacctgggaggtggaggttgcaatgagctgagatcgccattgcactctagcctgggcaagaagagtgaaactctgtctcaaaaaaaaaaaaaaaaaaaaaaaagtaggtacatcctacttccctctaatggaaaatttagtatatctattatctgcccatacataaaaacatttgattaattgaattcagagaggaggagtggactgaaagtttaaatgtcaggggaaaaaagggcagaacggggtaaacctggattcacatttgtgtacgctgctcctctttacagtaaaacttctcaagttgaccatatttactgttccttcttcctctttccccagtcttaaattgttcttattaaatactgagtagatacaaaggttgtttacgtctgtagactctgaagggtcacagtacagtagacccccatgaatccagcacccagctgaggaaagcacattactgttccagtccactgcatgcccctgccccaggctctgtgccctttcccacccctcaaatataaccattctcttacatttcattgtcattcacttgcatttctttagagataaaccaaaatggtaaactggaaataatgtattatttagttttgcctacttctggcctctatataagtgaagtcatagtaatatactctttggtgatttgattttttttcactcgatattatgttctttagagtcatccatgtgatttaatatagatataattcatacattcttactcctgtgtaaaattccattatatgaatacatcacagcttatctgtttattttactgaaaataaactgtttgtttccgattgcttgatgttaaaatacagtgctgctttgaacattcctatacatgtatcccagtgaccacatgcaaacgtacagattgaacttgttaggtcagagttgggtacatcttcagctttactagatgataccaaaaattttcaatttgattttaccaaattacacgttccccagcagagtagaagtgttctattttcctaatcaggtgggtctgaaatgataccattgtagcttttctaaattgagattgaattcacatgccataaaatacaccatttaaaaatgtcagttcagtgatgttttggtatattcacaaggttgctaatcatcaccactatctgattccagaatattttaatttaaaaacccaaaaagaaacccaaacccattaacagtctctattcccccattctccctcagcccctggcaaccactaatctactttgtgtcactatggatttgcctattctagaaagacgctttatgtgaatggaaccctacagcatggggcattttgtggatagcttctttcacttagtgtagtgtttcaaggttcgttcatgttgtagcaccatcagtatttcattcctctttattgccaaatactattccattgtatggatggaccacattttgtttatccattcatcagttggtagatatttggactgtttccactttttggctatctcgaatgatgctgctgttaacattcttataaaagtttatgtgtaaacatatgtttttatctctaaaaacatatacctacgagtgaaattgctgggtcatatggtaactctgtgtttaacattttaaggaaataccaaactgttttccaaagctcctgtaccatttacagtccaaccagtggataagtgttccaatttctccacatccttacttacttatttagagacggagtctcactctgtcgcccaagctggagtgcggtgacgtaatttggctcactgcaacctccacctcccaggttcaagtgattctcctgcctcagcctcctgagtagctgggattacaggcaccttgccgctatgcccggttagttttggtatttttagtagagacaggatttcaccatgttggccaggctgatctggaactcttggcctgaattcacctgcctcagcctcccaaagtgttgggattatacatgtgagccaccgtgcctgccctccatatccttttctacacttgtcactatacatcttttgaattatagccatcctcacagaagtgaagtgatatctcgctgtgatttttgtggggggggtggggcagggtggtggtggaggggagagagtcttgctctccaggctggagtgcagtggcgcaatctctgctcactgcagcctcgaactcatgggctcaaacgatccacccacctcagcctcctgagtagctgggaccacagatgtgtgccaccatgcccggttaaatcttttttttttttttgatatgtttggtagagatggggttttgccatgttgtccaggctagtctcaaagttctgagctcaagcgatccacctgccttggctcccactgtgattttgatttgcatttccataatgacttctgatgttgagcatcttttcatgtgtttattgactatttgtatgtcttcctcagaaatatgtctattcacattgactttttttttgagatggagtctctctctgttacccaggctggagtgcaatggtgcagtctcagctcactgcaagctccacctcccgggttcaggcgattctcctgtctcagcctcccaagtagctggaattacaggcgcccaccaccacgcccagctaatttttgtatttttagtagagacagggtttcaccacgttggccaggctggtctcgaactcctgacctcaggtgatccacccgcttcggcctcccacagtccatcctttgctcatttttaagtagagttacttgtctttttatagagttgtaaagttatactgagtatacttgaaaacagaagcactatgttttacatgtcctataattaagatttttttcactaatttagaaatcttcctgattttcctaattcctgaaaatattacatattttgtagatacaatttgactatataggttgggtgcggtggcttacgcctgtgatcccagcactttgggaggctgaggcaggcatatcacttgaggttaggagttcaagaccaggctgaccaacatggcaaaaccccatctctactaaaaatacaaaaattagccaggcatggtgacacatgcctgtaattccagttatttgagaggctggggcaggaaaatcacttgaacctgggaggcagaggttgcagtgaacggagattgcaccactgcactccagcctgggcaacagagcgagactctgtcttttaaaaaaagaaatgaatatataagcagtgtttttgcctttgctttcttttgtttattttatttgtaagtataaccatctagaatttcacatcgctttttaaaggcattttaatactaggtctaagatacattaaatccaatgtaagcaaaaaggtagctttaattttgttttattctatgatttggtcctttgctcacaacagaagagtttgttggctgagatttggtttctgttttagttcttcggttggcaccattcatcccctgcaagggccccccgcctctccttgcccctcagcccacctgttccgtctccccacccagctttcctctctccacgctctccagcctgggtcctgctgtgtcattggaaggccagcagaatctgaataaagggcttactcaataaatcaccagaactttattttagcttactcccagtgaaaaggctcagggcgattaggcaggctctgtggttttgatctcttcgtgacctcatttgcagactgggatacagactttctggttagttcaaaggaagaaacatgtgcctctcgtgtgtaaaggggcagaatggcctgggtgggagtgtgagaaccattgtgtggatcctgtgataataggaaagaaatgtaggcttttccaattcattgtaaaaagagaatgtaatgtgttatgctcacaaacaagtaaatagctgtgttctgacagaaggtttctatagttctatatactaattaatattcagcacaagattctggctttaattttattttcttgtacagacttgtcgttatttaatgtatttaaagtctgctattcttcttagacttgaagtctcttttttttcccagctgtctcaaagaaaaaggttcataagacggttctaaaattagcatagtcatttagtttacttttttcctacgtgggaatggcctcttgtttggataccagagtttccaatctaaatcatatagtttcatttttttgtatagtaattgcaaaaagattttgattcaattaaatcatagctcattttggcagattacattttctgagtatgtgtttgggcttatagaatttctttttaggaattacttttaatgtatctaccacttattttgtaaagtggcagctgacagagactatactcattcattcagtaacttttttgtttttttgtttttttttgttttttttgagacagtcactcaggctggagtgcagtggcacgatctcagctcactgcaacctccgcctcctgggttcaagtgattctcctgcctcagtctctctagtagctgggattacaggcatgtatcaccatgcctggctaatttttgtatttttaatagagatggggctttgctatatttgccaggctggtctcgaactcctgagctcaatctgcccgccttggcctcccaaagtgctgggattacaggcatgagccaccgcgccccgccacatttagatcttacatgttccagttactgccttctttgagctaacactgtagatgggaagataaaaagtattaaaccagtaaaattacaataagaattgatcagtgttgtcataggataaatgtggtatatgtatagaaaagaagatggcaaggagatatccaaaatattttcttttctttttttcttttattttttgagatggagtttcgctcttgttgcccaggctggagtgcagtggtgcaatctcagctcactgcaacctccgcctcccgggttcaagtgattctcctgcctcagcctcccgagtagctaggattacaggcatgcaccacaacgcccagctaattttgtatttttaatagagatggggtttctccatgttggacagaactcccaacttcaggtgatccgccctccttggcctcccaaaatgctgggattataggcgtgagccaccgtgctcagcccaaactattttctgtagactaaaacagtaacgtctgtgtctgcctcattaaaaacatgactgcatgtgacctttttaaaataagagctagttgtggggtggggggaggggggagggatagcattaggagatatacctaatgctaaatgacgagttaatcggtgcagcacaccagcatggcacatgtatacatatgtaactaacctgcacattgtgcacatgtaccctaaaacttaaagtataataataataaaaaaaataaaataagagctagtttgaattagaaagcaacagacaccaggaaaaatcttgtcaggaaaaagaatagatatttgatgagtagcagcattgagttcaccagcagcaggcacctgaaaagacattgcggcgggggttttggccaaaaacatgtctgtctgccctctaagcagggtggccttcttacctcatgtatttctgatttgattttctcttttcccacttctggctttggctctcaacaccacagtccaggtcttttgtgctgagggcagaaggcattgagggtggtacactgggatgtatcccatgggctgtgctctggagggcttatctaagaaaaagagtaagaaagtgcctttgagtgttttcatttgaataccttctctccgtaagctgccttcccgtattttttttttcctgctcttatgttctagaaatttttttttcttccaagaagatgaagaaacctgggttcttgtcacagcaagagaattgtctagctgtcatgaagaataagcttagctcttgcttttctgtgctttcctcagactgtaacaacagcagccacagaacttgcaggaccgacattttttgttctcattttttcctttagatatctccacaggaccttcttggttaaatcagggactacttctgaactctacccaatcagtttcaaatttagacctgaccactggtgccaccttaccccagtcaaggtacgtatttttttcagggttagaaaggcaaaccccagagccctgactgtctgtgtaggggtgagccggggtcatgttactgccagcacaggtcctgctgagcaggtttgtggcagatctcaccaatggcacctccttcctgtttttattcctatgttttacaaaactgtttataccacattaatgagcctgtgtgtttttaattgtttgctagtgtaaaccaagggttatgcttggatgcagaagtggccttagcaactgggcagttcctggccccaaacagtcaccagtccagcagtgcggcctctcactgctccgagtcccgaggcgagaccccctgttcgttcaatgatgaagatgaggaagatgatgaggaggattcctcctccccagaataaagacaagagaaagcctacgtttcaatatgtgatgctcatgtgtgtttgtagtgtgagctcttgtttttgaaatgattgcttcagtctttgcctttgtttgcactgtgtgttcagtgaaaactagagaaacacaataagcaaatcacatgaaggctgagatgattgagatgaaagttaacatagtgtgaatgaaagtctggccaacagagcagtagatgatataacaaagaaagcatgctttctgaggagatagtggggataatccctgaagagttggcagtgtgagtgcaactcatttatcttctgtgaggtgggatttttgtgttcctcacacccatgtaattattcttagaattgagattgctacacggagcagtccttgacgatcgtgtttctgacgtttctcttccttgcctggactgcctttgacaaggcagaaatgaacatgaaaagtccccaggagaggggagctgtgtagtgagggatactgagggcagtcctgtggctgaggggcacagattgaactgctgaactagttggaggtctagatgaggtgctttacgcatcagctgccttagacagcttctagaaaggagcgagcgctacttcttaagtacttaagtgacatttagataatttatagtaaaactgaaattattattagccaatgcattggtgcatagaatttactagggctacttctggaagccaaaatagaatagcatttccatgtgcattaaatactttgccagcactgcctttgccagcatcctaaatctggagttttacaaagaaggaaactgtatctttaggttaatcaaagctatgcatttcatatagctttttcatttaaaacaagacaaagaaacaaattcctatgaccaaattgcttgcctacagttccctgcagtaattgtatgatctcacccagtgtgcaatttgtgaaaatgaaccaaatgtcattacttttgtcttaaagaaaagtctatttcaagaatatgaacagcagtgtttccttgtacatgtcaccttttttcacattttcattaatcagaatgaccttattgagcctactcctggggtcaattgcatttcaaactaatccaatatttagtgtttcacagaaacactagaaaacgttgaacactcctactgcctggatatatggtagtgcagttatgttgtttatggctcaagatgtcattagaaatactgcagtggtgtattcacagctgctccttctctgaatgaaagagtgtagggacacctgccaccatggccagaccctgactgaatttcacattaaggctttggaaaggagcaaataataatgggagaattaactccaaaactttgacctgaatcatgtggatttgtcccaagattatgctagatgcaccaagcatggcccaaattggttcttttttaaatcccatgggggaagtgcaggctccttcctgtggtgcctctttatagcctcaccaccatgctaacactgagcatggtgaggaggaggaagctttggctagctaaacatgtttaataaggccataaaaactgagaaagaaaaacattcaactttagctgaagctcctttgatacaaaagtttcattctgtcagaaataagccatagtacagactcagagatagaggcagtttctagagaactcggtcttatcgtgggttctggagcacacctctcagaccagtcaggaacactggggaggtgacagcaggtccccaggggcctgcagggaatctttcagctgcacggattgggatttccctccaaaccaaactgtcctttaaggggcagcctcctcttttactaactccaccctttctcatctctgggacccagcagggacctggagaggccaacagccactgctacctttgtagtcttcaaaatattgaactgcaggtcccaagatgcatttcaggatttaagacaggtgcactaatgataaccattccttcaccaagtagcaacattcttgccagagttcttgggaaacctgtttttttctctactctccatctctgctgctctcatgctttaaattgataaaatatgggctcaaaaaaagaaagccgccaaagactcttatccttattggtgccccatcattggccaccccagccataggtgtgtgctgttggtgggaaatggtctccttcctcagcgttgtgtttgggttactggtgaggccagctcacagagtgacatcatggtcaccagtacatgtcgctggagtaaaatcttgcctttagaaactaggttgagctgttcagaaaggtcaattctcttctgtattccccctcaacatttatctgggtctaaagctcagcactgagtcacaatttcacacaagatcaaagtgaggcagtgttaggaaaccatgggctgggtgcagtgcctctcgcctgtaatcgtagcactttgggaggccgaggcgggcacattgcttgagctcaggagttcaagaccagcctgggcaacatgacaaaaccctgtctctacaaaaatacaaaaattagctgggtgtggtggggcatgcctgtagtcctggctactcaagaggctgaggtgggaggattgcttgagcgcaggaggcggaggttgtagagccaagatcacaccactgcactccagcctgggtgacagagcaagaccctgtctcaaaaaaaaaaaaaaaaaaaatggaagttgtggtcacaatgcccaggcttctttgttatagtggcacgctgggttacttgccacacacagatcactcctcccagggctgctggcacacactgattgtggggagttcaagaggccttttccccttgagggtgtggctgtccccctttcaggcgtgtggcgtcattcatggaggaagtgctggctctacgtagcacacgcacagtggcactaggacctgcgtgcctggccctcagtgggtagggcggtgctgcctaggcacacagcagcgcttacgggccccaggtgcctactaggct

SEQ ID NO: 25124 - DNA, 4732 bp, Homo Sapiens
gtggagtgaaggtcacgccgcggcgcgattgacttctaaagagtcatgctgtgatgaaaaagcccagaagagaaggaagaggaaagcaaaggagtcagggatggctcttcctcagggacacttaacattcagggacgtggccatagaattctctcaggcggagtggaaatgcctggaccctgcacagagggctttatacaaggatgtgatgttggagaactacaggaacctggtctccctgggaatctctcttcctgacctgaatattaactccatgttggagcaaaggagggagccctggtctggtgagagtgaagtgaaaatagcaaaaaattcagatgggagggagtgcatcaaaggtgtgaacacagggagcagctatgcattgggaagcaatgcagaagacaaaccaattaaaaaacaacttggagtatcctttcacttacatctgtctgaactggagctatttccagatgaaagggtaataaatggatgtaatcaagttgaaaactttatcaaccacagttcctctgtttcctgtcttcaagaaatgtcttccagtgtcaaaacccccatttttaataggaatgattttgatgattcttcatttctcccacaagaacagaaagtacaccttagagaaaaaccttatgaatgtaatgagcatagcaaagtctttagagtatcttccagccttactaaacatcaagtaatccatactgtagagaaaccttacaaatgtaattcatgcggcaaggtctttagtcgcaattcgcaccttgcagaacattgtagaattcatactggagagaaaccttacaaatgtaatgtctgtggcaaggtttttagttacaattcaaactttgcacgacatcaaagaattcataccagagagaagccgtatgaatgtaatgaatgtggtaaagtcttcagtaataattcttaccttgcacgacatcaaagaattcatgctgaagagaaaccttacaaatgtaatgaatgtggtaaaggcttcagtcataagtcatctctagcaaatcattggagaatttatactggagagaagccttacaaatgtgatgaatgtggcaaggccttctataggattgcgctccttgtacgacatcagaaaattcatactggagagaaaccttacaaatgtaatgaatgtggaaaggtctttattcaaaattcgcacctagcacaacattggagaattcatacaggagagaaaccttacaaatgtaatgaatgtggaaaagtatttaatcaactttcaaatcttgcacgacatcgaagaattcatactggagagaagccttacaaatgtaatgaatgtggtaaagcatttagtgagtattcaggcctttcagcccatcttgtaatccacactggagagaagccttacaaatgtagtgaatgtggcaaggcattcagacacaagttatcactaaccaatcatcagagaatccatactggagaaagaccttacaaatgtaatgaatgtggcaaggtcttcaatcgaattgcacaccttgcacgacatcggaaaattcatactggagagaaaccttacaaatgtaatgagtgtggcaaggcctttagtcgcatttcatacctagcacaacattggacaattcatatgggatagaaactacaaatgcaacaaatgcgtcaaagaatttagtgtgcactcaagccttactacccatcttttattccatactgcaaagaaattttgcaaatgtaaagaatatgacaaggtcttcaaacacaagtttttctaataactcattagagaatttatactggagagacttcacaattataataaatgtgtggaaaagtcttcaaaaaaatttcacaccttgcaaaaggagatctaaaaaacacaatcagaaatgacaaaggggacattaccaccaaccccacagaaatacgaaaaaccctcaaagattactataaacacctgtatgcacacaaactagaaaacctagaaaaaattaataaattccttgaaagatataaccccccaagattgaaccaagaagaaattgcatccctgaacagaccaataatgagttccaaaatttaatcactaattaaaaatctatcaaacaaaactctggaccagacagatttatagttgaagcctacgagatgtataaagaaaagctgttaccaatcttactgaaactgttcaaaaacatggatgcagagggactcctccctatctgattctatgaggccagcatcattctaataccaaaacctgacaggcacaatgaaaaaagaaaacttcaggctggtactcctgacgaatataggtgccaaaatcctcagcaaaatactagtaaaccaaatccatctgcacatcaaaaagctaatccaacattatcaagcaggctttagtgttgggctgcaaggttggttcagtatacacaaatcaataaatgtgatttatcacatacacagaactaaaaacaaaaaccacatgaccatgatcatctctttagatgcagaaaggtttttaataaaattcaacatcccttcattttaaaaaccctcaacaaattacacattgagggaacatacttcaataagaaccatctatgctggactcacagccaaattaatactgaacaagcaaaagctggaagcattccccttgagaactggaaaatgacagggatgaccactctcaccactccgattcaacatagtactggaagtcctaagcttagtgatcaggcaagataaagatatgaaaggcatatataaataggaagaggggaagtcagtttctcttgcagaagatataattctgtatttagaaaacctgttgtctctgcccaaaggctcctagatctgataaacaacttcaaaaaagtttcaggatacaaaatctgtgtacaaaaattagttgcatttctatacaccagtaatgtccaagctatgaaccaaatcaagaatggaatcccattcacagtagccacaaaaagtataaaatacctaggaatacagccaaccaggtaagtgaaagatttctacaatgagaattacaaagcagtgcacaaagaaatcagaaacaataaaaattgaaaaatatctcatgctcatggataggaagaatcagtattgttaaaatactgcccaaagcaatttacagagccaatgctatttctatcaaactaccaatggcatttttcacagaatcagaagaaaacattctgaaatttatttggaaccagaaaagcccaacctaaatagcaaaagcaatcctaagcaaaaagagcaatgtttgaggtatcacactacccaactttaaaccatactacaaggctacagcaactaaaacagcatggtactggtataaaaaaagacacatagatcaatggaataggtaagagaacccagaaataaaggcatatacctacaaccatgtgatcctcaacaaaactgacaagcaatgaagtaagaacttcattcaataagtggtgctggcataactggctagccatatgcaggatattgaaactggacccctatccttcacgatatacaaaaatcaactcaagatggattaaagacttaaatataaaacctaaaagtattaaattcctagaagaaaacccaggaaatgccattctggacataagtgctggaaaagacttaatgatgaacaccccaaagcaattgcaacaaaaacaaaaattgacaagtgggacctaattaaactaaataacttctgcacagcaaaagaagctatttgcagactacagaatgggagaaaatgtttacaaactgcatctgacaaagatctaatccagaatctataaagaactcaaacaaatcaacaatgagaaaaacaaccccattaaaaactgggcaaaggccatgaatagacctttctcaaaagaatacatacatgtggcaataagcatatgaaaaaaatggttaatatcgctaatcattaaggaaatgcaatcaaagccacaatgagataccatctcagacctgtctgaatgggtattatcagaatgggtattattaaaaaatcaaaacatagatgctagtgaggctgcagagaaaagcaaatacttatacactgctggtgggaatgtaaattaattcagccattgtggaaagcactgcagcgatttctcaaagacataaaagcacatagcattcaacccagcatcccattactgggtgtatacctaaaggaatataatcattccaccataaagacaaacacttgtatgttcattgcagcactattctcaatagcaaagatgtggaatcaacgtaaatgcccatcagcagtagaccagataaagaaaatttggtacatatacaccatggaatactatgcagccataaaaaagaacaagactgtgtcctttacagcaacatagatggagctgaggctcttatcctaagtgaattaatgcaggaacagaaaatgaaatatcccatgttctcacttataagtgggagctaaacattgattacacatggactcaaagaagggaacagtagacacgggcttatgggtggaggttgggaagaggatgaagattgaataactgcctgttgggtactatgctgattacctggggacaaaattaactgtacaccaaactcctgcaacatgcagttgacccatgtacacatactccttgaacctaaaataaaacatgaaaaaaagcaaaaaaaaaaaaaaaaaaaa

SEQ ID NO: 25125 - DNA, 1530 bp, Homo Sapiens
atgaccgtcacctacacagcccgagtggcgaacgcccgcttcggtggcttctcccagctgctgctactgtggcgtgggagcatctacaaactcctgtggcgagagctgctctgcttccttgggttctacatggcgctgagtgctgcctaccgctttgtgctgaccgaagggcagaagcgctacttcgagaagcttgtgatttattgtgaccagtatgccagcctcatccctgtctccttcgtgcttggcttttatgtgacgctggtggtgaaccgctggtggagccagtacctatgcatgccgctgcccgacgcgctcatgtgcgtggtggcgggcaccgtgcacggacgcgacgaccgcggccgcctctaccggcgcacactcatgcgctacgcagggctctcggccgtgctcatcctgcgctccgtcagcaccgcggtgttcaagcgcttccccaccatagaccacgtggtggaggctgggtttatgacccgcgaggagcgcaagaagtttgaaaacctgaactcatcctacaacaagtactgggtgccctgcgtctggttctccaacctggcggcacaggcccgacgcgagggccgcatccgcgacaacagcgcccttaagctgctgctcgaggagctgaatgtttttcggggcaaatgtggaatgctctttcactatgactggattagcgtacccctcgtgtacacgcaggtggtgaccatcgcactgtacagctacttcctggcttgcctcattggtcgccagttcctggacccggctcagggttacaaagaccacgacctagacctgtgtgtgcccatcttcaccctcttgcagttcttcttctacgccggctggctcaaggtagctgagcagctcatcaaccccttcggagaggacgatgatgactttgagaccaactttctgatcgatagaaacttccaggtgtccatgctggcagtggacgagatgtatgatgacctggctgtgctggagaaggacttgtactgggatgcagccgaggctcgcgccccatacacagcggctactgtcttccagctgcggcagccttccttccagggctccacctttgacatcacgctggccaaagaagacatgcagttccagcggctggacggcttggatggaccgatgggaggggcgcccggcgacttcctgcagcgcctcctgccggcgggcgcgggcatggtcgcgggaggcccgctggggcggcgcctgtcctttctactccgcaagaacagctgcgtgtcggaggcgtctactggggccagctgctcatgcgcggttgtccccgaaggcgcggccccggagtgcagctgcggggacccgctgctcgaccccggcctgccggagcccgaggccccgccccctgcgggtcccgaaccgcttaccctcatccctgggcctgtcgagcccttcagcatcgtgaccatgcccgggccccggggtccggcgccaccctggctgcccagccctattggcgaggaggaggagaatctggcctga

SEQ ID NO: 25126 - DNA, 1422 bp, Homo Sapiens
atgacggtttcatacactctcaaagtggcggaggcccgcttcggaggtttctctggcctgcttctccgctggaggggaagcatctacaagctcctctacaaggaattcctcctctttggggccttgtacgctgtgcttagcatcacctaccggctgctgctgacccaggagcagaggtacgtgtatgctcaggtggcccggtactgcaaccgctcagcagacctcattcccttgtcctttgtattgggtttctatgtgactctcgtggtgaaccgctggtggtcccagtacacaagcatcccgctgccagaccagctgatgtgcgtcatctcggctagcgtgcacggcgtggaccagcggggccgcctgctgcgccgcaccctcatccgctacgcgaacctggcgtccgtgctggtgctgcgctcggtcagcacccgcgtgcttaagcgcttccccaccatggagcacgtggtggacgcaggtttcatgtcccaggaagagaggaaaaagtttgagagcctgaaatccgacttcaacaagtactgggtcccctgcgtctggttcaccaacctggcggcccaggcccggagggacgggcgaatacgtgacgatatcgctctctgtctacttttggaagagctgaacaagtaccgagccaagtgcagcatgctattccactatgactggatcagcatccccctcgtctacacccaagtggtgaccatagccgtctactctttctttgccctctccctggttggccgccagtttgtggagccagaggcaggggctgccaaacctcagaagcttctgaagccaggccaggagccagccccagccctgggagacccggacatgtacgtgcctctcaccactctgctgcagttcttcttctatgctggctggctcaaggtggctgaacagatcatcaacccatttggtgaggatgatgacgactttgagacaaatcagctcatagaccgcaacttgcaggtgtccctgctatccgtggacgaaatgtaccagaaccttccccccgctgagaaggaccagtactgggatgaggaccagccgcagccaccctacactgtggccacggcggccgagtctctgcggccctcattcctgggctccaccttcaacctgcgcatgagcgacgaccctgagcagagcctgcaggtggaggcgtcccccggatctggtcggcccgcgcccgccgcgcagaccccgttgctcggccgcttcctgggcgtaggggcgccctccccggccatcagcctccggaacttcggccgcgtgcgaggcaccccccgccccccgcatctgctgcgcttccgggcggaggagggcggcgaccccgaggccgcagcccgcatcgaggaggaatcggcggagtccggggacgaggccctggagccctga

SEQ ID NO: 25127 - DNA, 5662 bp, Homo Sapiens
agcgggttgtgactgaaacccgtcaatatggcggcgatcggccgcggccgctctctgaagaacctccgagtacgagggcggaatgacagcggcgaggagaacgtcccgctggatctgacccgagaaccttctgataacttaagagagattctccaaaatgtggccagattgcagggagtatcaaatatgagaaagctaggccatctgaataactttactaagcttctttgtgatattggccacagtgaagaaaaactgggctttcactatgaggatatcataatttgtttgcggttagctttattaaatgaagcaaaagaagtgcgagcagcagggctacgagcgcttcgatatctcatccaagactccagtattctccagaaggtgctaaaattgaaagtggactatttaatagctaggtgcattgacatacaacagagcaacgaggtagagaggacacaagcacttcgattagtcagaaagatgattactgtgaatgcttccttgtttcctagttctgtgaccaactcattaattgcagttggaaatgatggacttcaagaaagagacagaatggtccgagcatgcattgccattatctgtgaactagcacttcagaatccagaggtggtggcccttcgaggaggactaaacaccatattgaaaaatgtgattgattgccaattaagtcgaataaatgaggccctaattactacaattttgcaccttcttaatcatccaaagactcggcagtatgtgcgagctgatgtagaattagagagaattttagcaccctatactgattttcactacagacatagtccagatacagctgaaggacagctcaaagaagacagagaagcacgatttctagccagtaaaatgggaatcatagcaacattccgatcatgggcaggtattattaatttatgtaaacctggaaattctgggatccagtctctaataggagtactttgcataccaaatatggaaataaggcgaggtctacttgaagtgctttatgatatatttcgtcttcctctacctgttgtgactgaggagttcatagaagcactactcagtgtagatccagggaggttccaagacagttggaggctttcagatggctttgtggcagctgaggcaaaaactattcttcctcatcgtgccagatccaggccagacctcatggataattatttggcactgatactctctgcatttattcgtaatggacttttagagggtctagttgaagtgataacaaacagtgatgatcatatctcagttagagctaccatccttttaggagagcttttacatatggcaaacacaattcttcctcattcacatagccatcatttacactgcttgccaaccctaatgaatatggctgcatcctttgatatccccaaggaaaagagactgcgagccagtgcagccttgaactgtttaaaacgcttccatgaaatgaagaaacgaggacctaagccttatagtcttcatttagaccacattattcagaaagcaattgcaacacaccagaaacgggatcagtatctccgagttcagaaagatatatttatccttaaggatacagaggaagctcttttaattaaccttagagatagccaagtccttcaacataaagagaatcttgaatggaattggaatcttatagggaccattcttaagtggccaaatgtaaatctaagaaactataaagatgaacagttacacaggtttgtacgaagactactttatttttacaagcccagcagtaaattatatgccaacctggatctggattttgccaaggccaaacagctcacggttgtaggttgccagtttacagaatttcttcttgaatctgaagaggatgggcaaggctacttagaagatctagtaaaggatattgttcagtggctcaatgcttcatctggaatgaaacccgaaagaagtcttcaaaataatggtttattgaccacccttagtcaacactactttttatttattggaacactttcttgccaccctcatggagttaaaatgctggaaaaatgcagtgtatttcagtgtctccttaatctttgctccttgaaaaaccaagatcacttgctaaaacttactgtttctagcttggactatagcagagatggattggctagagtcatcctttccaaaattttaactgcagctactgatgcctgcagactctatgcaacaaaacatttaagggtattattgagagctaatgttgaattctttaataattggggaattgagttgttagtgacccagctacatgataaaaacaaaacgatttcctctgaagctcttgatatcctcgatgaagcatgtgaagacaaggccaatcttcatgctctcattcagatgaaaccagcgttatcccaccttggagacaagggtttgcttctcctgctgagatttctctccattccaaaaggattttcctatctgaatgaaagaggttatgtagcaaaacaattggaaaagtggcacagggaatacaactccaaatatgttgacttgattgaggaacaactcaatgaagcacttactacttaccggaagcctgttgatggtgataactatgttcgtcggagtaaccaaagattacagcgtcctcacgtctacctgcctatacacctttatggacaactagtacaccataaaacaggctgccatttgttggaagtacagaatattattacagaactctgtcgtaatgttcgtacaccagatttggataagtgggaagaaattaaaaaactgaaagcatctctttgggccttgggaaatatcggctcatcaaattggggtctcaatttgctacaggaagaaaacgtgattccagatatactaaaacttgcaaaacagtgtgaagttctttccatcagagggacctgtgtatatgtacttgggctcatagctaaaaccaaacaaggctgtgatattctaaaatgtcacaactgggatgctgtgaggcatagtcgcaaacatctgtggccagtggttccagatgatgtggaacaactctgtaatgaactttcatctatcccaagcactctaagtttgaactcggagtcaaccagctctagacataatagtgaaagtgaatctgtgccatcgagtatgttcatattggaggatgaccggtttggcagcagctctactagtacatttttccttgatatcaatgaagatacagagccaacattttatgaccgatctggacccataaaggataaaaattcattccctttctttgcttctagtaaacttgtgaagaatcgtatcttaaattcgcttactttgcctaacaaaaaacatcgtagtagcagtgatccaaaaggagggaaattatcatctgaaagtaagacaagcaacaggcgaatcagaacacttacggagcccagtgttgattttaatcatagtgatgattttacacccatatccactgtacagaaaacattacaattagagacttcatttatggggaataagcacattgaagacactggtagtacaccaagcattggagaaaatgacttaaaattcaccaagaattttggtacagagaatcacagagaaaatacaagccgagagaggttagtagtagaaagttcaacgagctcacatatgaagatacgtagccaaagtttcaatacagacactacaacaagtggcataagttcaatgagctcaagtccttcacgagagacagtaggtgtagatgctacaactatggacacagactgtggaagcatgagtactgtggtaagtactaaaactattaagacaagccactatttgacgccacagtctaaccatctgtctctctccaaatcaaattcggtgtccctggtgcctccaggttcttctcatacgcttcctagaagagcacagtcccttaaagcaccctctattgctacaattaaaagtctagcagattgtaactttagttacacaagttctagagatgcttttggctatgctacactgaaaagactacagcaacaaagaatgcatccatccttatctcactctgaagctttggcatctccagcaaaagatgtgctatttactgataccatcaccatgaaggccaacagttttgagtccagattaacaccaagcaggttcatgaaagccttaagttatgcatcattagataaagaagatttattgagtcctattaatcaaaataccctgcaacgatcttcctcagtgcggtccatggtgtccagtgccacatatgggggttcagatgattacattggtcttgctctcccggtggatataaatgatatattccaggtaaaggatattccctattttcagacaaaaaacataccaccacatgatgatcgaggtgcaagagcatttgcccatgatgcaggaggtcttccatctggaactggaggtcttgtaaaaaattcttttcacttgctacgacagcagatgagtcttacggaaataatgaattcaatccattcagatgcctctctgtttttagaaagtacagaagacactggactacaggaacatacagatgataactgcctttattgtgtctgtattgaaattctgggtttccagcccagcaaccaactgagtgcaatatgtagtcattcagactttcaagatattccatattctgattggtgtgagcagactatccataatcctttagaagtggttccctctaagttttcggggatttctggatgcagtgatggggtgtctcaagaaggctcagctagcagcaccaaaagcacagaattgttactaggtgttaaaacaattccagatgatacaccaatgtgccgtatactccttcgcaaagaagttctaagattagtcattaatttgagtagttcagtttcaactaaatgtcatgagactgggcttttaacaattaaggagaagtatcctcaaacatttgatgacatatgcctttactctgaggtttcccatttgctgtcacactgcacattcagacttccgtgtcggaggttcatacaagaattatttcaagatgtacagtttctacaaatgcatgaagaagcagaggctgtgttggcaacaccaccaaagcaacctatagttgatacatctgctgaatcctgacctcatatttatgatggatatagatacatactatatatattcatatttgtggatttcctaaaagcctcagaaaatacgactgactaggcagcaaagacaggagtatcttctgtacactgttccgcagttactggtacatgaacagttggaactgctgactttcctaaccaaaacaacttccttctctcctttgttgagccttttgaggggttcatgattcattaccacagttttaagagtttcagttaccattgtatgcaagagccaagcactgaatacctacataggttttctattttctttcattttaaaagcgtaatgacagtggaacaataatgggatatgcagaagcacccttcacaagttatttctgaatgattttagggtaaataatacagatgccttgtatgttaactaacttgtggaaagcaggaatcagtgtctctaaggctgcatcctattaccacaatggggttgtgctataactggctggtattagagagggaac

SEQ ID NO: 25128 - DNA, 24340 bp, Homo Sapiens
tatatttgcaacatatatagcaaacacttgttgtcttgttttccaatgtgttgcctcctggaagccgctgatacagaagcctgagggaacacactcccccctacgtccttctccaacacagcagagccaggaaggacccggatggaagttaggacaaagaggcccagaattggcacagataccaacagaccattcgttgaagaagaaatccaaatggccataaggtgtgtgtaaaaatgctcagttgcaccaacagctaggggaagcaagtgaaaacaatgatacgcaattttatactcatcagattgggaagaattgacaaatgtgatattatcaagtgctggctatggtgccgctaggaatgtaaactggcacatccattgaagagagtattttaggaatgactggtaacgttgaaaatgtgcatgcccctcatctgacctatgcaatatgcttacaaaaaacatttaacctgataatcatgaggaagcaataggcaaatccaaattggtgagtattctgcaagacaactggtctgggttcaagagcatcaatgtcattttaaaaaagaaaccagattaagtctggccgtggtggctcacacctgtaattccagcactttggaaggctgaggcaggtggatcatttgaactcaggagtttgagaccagactgggcaatatggtgaaacccctttccacaaaaaatacaaaaaattagccaggcatggggtggcatgtgcctgtggtcccagctactgggaggatcgctgaagcccaggaagccgaggctgcagtgagctgagattgcaccactgcactccagcctgggtgacagagtgagacctcagctcagaaaagaaagaaagaaagaaagaaagaaagaaagaaagaaagaaagaaagaaagaaaccagattaaagaactttctagattaaaggacaccaaagagccacaacaattagatgcaatgcctgattcttgttgggattctggatcggaaaaaagccaacaaattggatataaaaaccattattgggacaataggggaaatttgtatattagatagttttactgtatactagatacagtattgtgttcatgttcttgtccccgccaagactgatgagcccccagggactcagatagtcaagattctaagcaggctgtcagagccttaacaaggttctgagcccaggactgaggtaggggttacttcgggctgaggggattagcaaaggcttgtgaagtggctaaagccgtgacctggatatttcaggactcaaatccacccgcattggaattctctgggtgactgcccagcccctttggcaggacagccagccacaggccctgattgtgcaggacttcctgcctctgcaaaggcagtcgggggctgagcagggttctacccggctgggtccaggcagaagtttttcctccccacctccgggtttgtcctcatcatcggtcactcccattcacagctttaagattctggaggccaagaatttgactccccccggatccatggtctgtggataccaatgttccgactggagacggggagcccgcgagacccgggtctccagggtctgcccaaggaagttgctcatgggagcagacctctagagcaggatttgaggccaggccaaagaggttagttactgatgggggctgcataaattgggggttgtggagggacgccagctgggagggagagactggagaagggggtgtgtggagagcccaagaggaggcccagggggaggtgcgcaggcacagcctctgttgaaggagtctctctaaggctgctagggtccttcacctgtcattgtcaggcctggagagcgggctcttaaggaggccaggccacacctcaagggaagatggaggttaccggaaggtcatacctaaaattacgggcaaaaccagggagaattatgaacaggctgagttaggacttgtgtttacgttaatctgaggccttgcttggatttctttttaacctaaaccacaggcaaatattcccctttagggagagaattcgccgacatctatttaacatcccttaattgttgagagcatccactgtgtgccagacacttcggtacacacagaaagaaacccagaggagggtaagatgcccttatagggagatctttctcctcccttcctccatctctccctctctctctctctcgcttccctctctgaagacggtctagctttgggctaagtatacgtggcctcaggagtcaaatggatcaggacaactccgagctttgtcactgaccagctgggcacaggtgtgagtcatttttttttcttcaagcctcagtgtcccaatctgcaaagtgcatatgatggtaatatctacctcatagggtcaccctagggataaaatgagagaagccccataaagaacttagtgtggtatctgggctcaataaggcatcagctatttttattagccattcaacaaacattttttcctaggacccaatctgtgccatgcagagtgctaggtgctgccagggagagataaatgagacaccctcaaggattcacagtctagtttgttcatttgttgattgatttcatcaataaatatgtatcatgccctacactgagcactggagatgtcaaagtattaataaaagacactgtccctgtccgcaggttgctcacagcctggtgggagagacattgcaacacaatgtgattggtgctgtgaagagagggagcacacggtactgggagagctcagggcagggggttgatccagttccgggcagggcgatggattcacaagacattttggcaaaggtagacccagcttccgtgtttcccagctcacaggtgcactcctaccctggggcctttgtacttgctcttccctctgcctggagctttcttcccctaggatgtccccatagcttgctccttcacggctttactcaagtgtcacctccccagcaagacctttcttggccaccctgtttaaagtggccactccagcccagtgtggtggctcatgcctgtaatcccagcactttgggaggccgacgtgggtggatcacttgaggccaggagatcgagaccaatctggccaacatggtgaagccctgtccctactaaaaatacaaaaattagccaggtatgatggtgcacagctgtagtcccacctactcaggaggctgaggcaggagaattgcttgaacccaggtggcggaggttgcagtgagctgagatcgcaccgctgcgctccagcctggggcaacagagcaagatgtctcaaaaataaataaataaagtggccactcccaccatcaacagtccccgtccccatccccaaacacacacactcagcactcccaccctgctccctgctttatttttctccatttcatcgatcaccacctgacaagctgtacattttacttattcgcttgtctatttctggcttctccctccagaatgcaagctctgccatgagggtagggttctcagctgttttgctctttgctgtatccccagtgtctagaacagtgcctggcacatgatacgtgcttgctaaatagttattgaatgataagtacgttaagtttacaaagatgagtaggagttgagtaagacaagaaagggagggaataacagatgaaaagggaacagggggagggagagagagacagagaaagagagagagagattgaaattagtgagtttaaggaactaaaagccttcacatccagcttattcccaggaatgcgttaggggtggtataaggcaaggctggcgtaggttgggggccaagctgtgcgaggccatgtcctgtgaggggagacaggtgcctctgacttgggcggatgtgctatgtgctgttacagaggttaggaagattgacccaggaaaaaaggaggaagccatgaactctgctggggagctatcagggaaggtgtctcaaaagaggaggcacctcctcttaggcccagggaaaaagtttcagtgttattctagacgtgacggacattctgaaggcctgttcccacatcccctgtcttaacagacagacactgggttagaaacttttcggtgcttgcacgggtggatttcactttgcatttggtcctcgtagtgcctaacgggacctctgcccacaaaattgctcaagaaagatttgctgggttggattgggattgaggcaggtggagcggccttgaattgtagatgattcaggctcatgagcctagaaccttgggcaccatctgtgatcttgccaggcagagtgacagcctttcctagggtttctccctcctcaaaaaaagaagggacattaaccatgtggaaaaacaagtagattttaaccagttagaaaaagagagtggagagcattttaggtggaggaaaaacaacagaaacaaagacagaaaggaaggttagttcatgggagatttcttaagagtgaacagtttaatggattacatttttcaaagataaaacatgtatttgctatgaagttggtgtgtggattgccttcttagccaaagttatggtgaaagttgaacttgagcctgttattaaccaatagctgtaacatatgtataagctgcatgtgcatgctaggctgacacccagatagaactagtggtgtgtatctttacaggaagctgccaatttacagcctggctgaaacccacttggggctgcttctacttccacatttaattggttcatccatcccatcattcttttattccacaaataattatcagccaccagatatgcattaggggccgggtgcggtggctgacacctgtgaccccagcattttgggaggcagaggcaggcagatcatttgaggttgggagttcgagaccagcctggccaacatggtgaaaccccgtctctatgaaaaatacaaaaattagcccagcgtggtaatcccagctactcaagaggctgaggcaggagaatcacttgaacctgagaggcggaggttgcagtgagccgagatcacaccattgcactccagcctgggcgacagagggagactccatccaaaaaaaaaagaagatatgcattaggccctctgctacctgctaataatataacaaagaacaagatgaacatgtttcccgccctcagatgcctatattctaggggcaggcataaggcacatgagccataaacaagtaagtaaaagagagttaaagatgacggtcagtgccatgaaggggaaaaacagggtgaccttgggtaggtagtcaggggaggcctcctggagaaggtggcatttaaggcgagacctggaggataaagaatcaaggactaagtattctaggcagggggagcaggaaatgcaaaagctgttgttggaaaagctcagagagttcaagaataagtcaattcgagagcacagaatgtcagagcctgcgggcatcctggagcccatccacttctctcatgctggtcattgctcttgtaacatatctgcacacgactctggcctgcataaactgttgcagggagggggtcctacagggcagggagcacaaaataattgacagctctctccatgttacggagcaactgaagggcttatgagttttctttgtttttgaaccttggcaaaatgtaattttaaaaacattttttacaggatagaaccgaggcttcataactgacgaagctgacttcatgagctttgacagatcttgtctgcattttaagtgtttccaacacttaaagattaagttccttttcctgagaagtcgagcgggggcatatcccacccactcagtgcccacctcccatgcgacatttcttttcctaaaaagtggcaaataaaaagtgccttccggggagaggaaactcaccactcccaagacagctcattcaattcccaggacacatgagctgttagaaaaacgttcttggattgagccaaaatctgactgcttagcgcgtccgtgcctggtgggtgttggttccgcaatctggagccacatgggacagttctgattcctcctactccccacagcccttcagagatttggagacagactgggtacccccagccactttccaaacccaagtcagccccaattccctcccttctgtctcctgtgatccagacacctcctaagcctcctcacatgggggcccagggccaggcacatccctctgggtgtggcctgctaggaaccctcgttctgggcaccacagtcctgccaccaccgccaaagatgaccactgcctctgtgatgtgactagtactgggtttgggggtcacgcatgtgattgctgagctgtgttacccaccctgtccttgtgcagttcagctttgggggtctttggacagggcctattcactctcttcttatagaactcaggttatcttgttcttgatcaagatcaggataagatcaggacaagatcaagatccaacctccttagcctgacccccaagggcctttgtgacctacccagctccatctctttggccagtccttcccaccattcctgaattcctactaaacacttgaagaaagtttctgagcagtcacttgggggcatgtcccaccatcctgttaaaaataaccagtatttattgagaccttactatgtgcctaaacatctaccgtgtatcaactcagaacatagacatgagacaggtacaattatttacccaattattcatgatggtgaactaaggcacagagcagttaagaaagttgccagaggtcacacagctaataagtggtcgttccagggcatgggcaccatgcatccagcctcagtccatggtgtgcagcttgtattggcttatgagggctgaccagtgattcctccaggcagagagcaattgtgaggcagattagacttaagactgtaaggagtggttaaggactagggcagagcaaaacacataccacatctatgggggcagctacttcttggcaatggccagttgttgcctgtaggagtccagacccaggattcctagatcttttaaaaagaaactggaaatggaaatgtggaaatgtggatttctttctctttttttttttttttttttttgagacaaagtctcactctgtcccccaggatggtgtgcagtggcgcaacctcggctcactgcaacccccgccttccgggttcaagcgattctcctgcctcagcctcccaagtagctaggattacaggcactcgccaccacacccagctaatttttgtactttttagtagagacagggtttcacctcactggccaggctggtctcgaactcctgacctcaattcgggcctgcctcgggctcccaaagtgctggtattacaggcatgagccactgtgcctggcctggaaatgtggatttctgtctaggatctcttagcatttatacattggcagctaattccattttgttttttttaaagcaccgtgtagatcaagcaaagcatttcttagggctgtatggagccctgggctgaaagtttataaccaaaaatccagttccactcatcggcaattattggaacactgaaccaacttaaccaactgtaactcagctctcacttttccaccttgtttataaggaaaccacgtgacactctggttagatgtcttgtgaaaatcccaatcattatgtccttactgggtctcaacccttttttgtaaagaacacagatttgacagacagatgggtcaggtgtacgattctgggtcctccttttactaactgtgtgaccttggatgaggtacctaacatctgcccctctgtttccttgcttacacgttgggatcataatgccccatgagattttgtgaagattaaggaataccatgaatgctgaacttgccttgcacttgtagcatagcaaatgttcattaaagaccgagttcttccctcattcctttctgagccatcagccttgtaatcccctccaacaggaaatgccagagtggacagcatatcagatgagttctataacattccagagacaggtaagctccctgtggaaagaaggatcatggaagacttcccggaggaggaggacttgatgtagattttctgccaatgagctctgggtaatcctgttgcatgtgccaataaaccatttgacaaggccagggatatctcagcagcttaggttctcagggtgagggagtttccaggtttccatggctacccttggcagggctttagccctggggcgagcctgcatgtgatagacccagcaaatgacagagaacaagtgtgtttatgtgatgtttaattagttctacaaatagttcttgaggatctataatgggtcagacattgttccaggtgctaagatcagaaatggatcagaggacaattttgccctcaagaggcttccattcaattggaggtggaagtggctggggcatctttaatcaccgaagtgtgaatgattggatccattgccaagaaaggggaactgggaaagactgttttgaggggacagtgagtttagttctgaggttcccaagggttattgggatagaatatcagactctatctatcatctgtctatctatccatccatccatctctgtgtaatcatatttgacgtgtggactgggcagtggggtgagaatggagctggagccagaggagtcgtgcattcactcagcaaactcttactgagcacctactatgtgccaagtgttgggttacagaggcgaagcagacgcagagcctaccctcatggagttctcagtttactggaaagacataatcacaatatttatggtagttatgacttactgagcacctacagggtgccaggcactgtcccgggccgttctgcctgacttatctcatcgaattatcagcgttactaagtgagtctggttctatgattatcctattttacacagataaaactgagacccaaagaggagaaaaagctggttcaggtgacacagtggtcacagctgagacacagatttgaacacacgtctctcctacgttggatcttggatctgacattgtgctttctcctggttgctgtattcagtcattccttcattaagcattgtttgttgagtcaaagctagggccaaacttctctgtccgggacacccccggatgcctgcatagaaataagagctaaatccctgaactcgaatgagctcatccagagagtggctgagacagagaagggcaactccagagggcaggtcccacaaacacacctgcatttggggggccagcagagatgggatggggggattagccacaggagggcaggcggcacagtgcagccttgtgaagcccagagggagagagagtttcgagaaggaggaggtggacttcaagatgagtgccctgaaggactgaggaggtgacccccaagcttgggctatgccaggctttgggggtccctgagggcaagctcaaggatgcagcagatgccaggcagtgaagggttcagagtgggggatgacgaagggcagccttctctgtttagaaatttgacttttagagaaaaaaaagaagtagaattgtccctagaggcaagggatttttttttcttttttgtggcttggttttgtttggttgagaatggcggagcaggtgtgtgttcgtaggtgggggaagaaactggttgagaagaagaaacgaaaatacaggatggggagaggactcttccccatggctctgatcaccgccagacaccatctgtgtttacttctgtcttcacgatctgtttcccaccagccacaagggcagctctgtgaaggcacaagttctgtctcattcaccgtgggatcccagtgcctggcacgtagtagacacttcataaatatttttgatattgagttgaattcacagggttcttccgggagcccagtggttagtcctaggaagagaagggttcatgggggccttaaggaggggcttctctctgatgctaccatgacaagagagagggagagaaaaagaagtcaacacaagtagaggcaggagccaaaaatccaagtctttggcggggtacagtggctcatgcctgtcatcccagcactttgggaggcacgggtgagaggatcacttgaccccaggaattcgagactagcctgggcaacatggtgggaccccgactctataaaaaatgcacaaagaaattagccaggcatggtggtgcccactgtagtctcagctactcgagaggcagaggcaggagggaagatggcttgagcccaggaggtggaggctgcagtgagatgtgattgtgtctctgcactccagcctgggggacagagacagaccctgtctcaaaaaaaaaaaaaaaaaaaaaatccaagtcttctcaaaaaagtgtgtgtggggtggtggtgtgaagggtggaattaacagaagtagaaaatggagaatactagtagctacttatgtcctgtgagaacattctagaaggtgagctgtcattgatttattagcattactctgcctttgctatggctctaagttataaatttaagaattcatttaatcctaacaacagctctctgaggcaaatgagcttcagtcagccctgaggtgatgtggctagtggtgaggaagccaggatttgaacccaggacttggagctgatatagagcctgtgatgttacccactgggccatatacttccccaactgacattagtttatatgccttatttttatttttatgtattcatttattcattaatagagacaggggcttgctttgttgctcaggctagagtgcagtggtgcaatcacagttcactgtaacctggacctcctgggctcgggccatcctcccacctgagcctcccagggtgagccattgtgcctgacccacatgtgccttgttttatatactacattcctcaccaggagcctctgggtttggaggggctcataattctcatgttttacattaagaacagagaaatatagtgacttgcccagggtcacacagatactaagtggctgagctgggactccagcttgcatctctctaaccgcaagcctggcactttccccttccctgagagaagaactgtaggaagttagcacagagtcaggtgccaaaaaagggctaccacctggacgtggcaggcaacattctgtggtgtttctgcaggcatctcccgagtcaccccagctcaggaacaaggcagaaaaagttgggggttggcaagttaggaacaagaggaagaggacggggacaaagctgcaagtccgggagcggggctgcctgtcttctctggcagttcctgggttgaggctgagcaaaacaggataaaatctgagcaggagcccacggctgggggacttggcaaagacccagtgtggtgggtgggagggaggctgtgccctggagggggattccagggttcctgttcttagtggggaagagccctggatcgagggtggcccaagctcaactctgatcactgtccctcctgatagccacctgggcactgtgacctgcttcagaaaacagctgcttctgtggcagtaatcccagcactttgggagtgtgaggtgggtggatcacttgaggtcaggagttcgagaccagcctgaccaacatagtaaaaccccgtctctactaaaaatacaaaaattagccaggcgtagtggcatgcacctgtaatcctagatacttaggaggttgaggcaggacaattgtttgaaccagggaggcagaggctgcagtgatctgagatagggctactgtcctccagtctgagggaaagccagacttcgtctcaaaaaaacaaccaaaataaacaactgcttctgaatacacaatggaaaaaaatccccaggggttgtgccagggtgaggggaagtagggcttcctgtgtgacttaccaggaatcttggagctggcccatgcaggggtgtgggaggtgacagagaggtctttaaaaccaggtgggcccagccccggcctcttctgtgggcctgaggacggagaaaaggtctcactggtgaggaatctcatctttggggctgctttgcctgagggaggtgcagagagcagggccgagagaggggctatgagaggagacacctggcccccttggtcaggggagcagggcccgaagaggagtgaacccccatcacctctctcacagacagcaggagggctcagcagtgccttccgtgcaatgaggctccgcactgtgcgttctttccagccaggagacctgaactgggaggtcttggagctgctgcatgtggacttgggggacccgtcccttggcaacctggccacgtcctggcctccacatcttcctatgggctgtccgtctctattctctcccctctcattactgcaaccgctgccctcctctgaaattctctcgcggctatgcgcttcctctctgtggtcgtttgattaaaatagctgagtccacatcctcctcctggcgcccgctttgggctctgctgagtggatggctctccactcttcggggcagccactccatgcctctgccacctccaccatgaaactgcttttttactctttccagggtgtgggttttctccaggtatggggaggccaacagatcaagaaatgattgccattgaaaagatagcttgttatttacagctcccagaagaaggcgtgcttccacccagggccacgcaggaagtgccaggtcggcaggtcaggaggagccacgggaagcatcgcccagggcctttgctgtgatctctgggaaaggctggtggggcaggggacacagtttaggaccggtcagtttgaatcatgtcagtggaactccaggcttccctagttgtccagtttctggccctggggtgatttagggcaggagaaaccttggcttggagtgtgagagtgagggaaaggtggcccgggtgtaccaaggcactggttgtgtcagcagtgggacgtatccatacaggcctcagcatcctcaggtcttgcctcctcagaagaaagaattctcatggctgtaatcccagcactttaggaggccgaggtgggcggatcctgaggtcaggagattgagaccatcctggctaacatggtgaaacccatctctactgaaaatacaaaaaattagccaggcgtggtggcaggcacctgtaatctcagctacttgggaggctgaggcaggagaatcacttgaacctgggaggtggaggttgcagtgagccgagatggtgccactgcactccagcctggcgacagagtgagacaaaaaaaaagaattcgactgagggacataaggcagaaggagagactgaggcaagtttcacagcagaagtgaaagcttattaaaaagctttagagcagggatgaaaagaagtaaagtacacttggaagaggggccaaccaggcgacttgagagattcaggggttctgtttgacctttgacttggggttttatacatggcatacttcaggggtcttgttttccttatcccctgattcctcccttgggttggtggggtgggctgtccgcacgctcagtgacctgccagcacttgggagggagcatgcacagtgtgttgactgtagttgtacgcatgctcccttgaggcgttcttcccttaccagccgaacgtccctagcaggtcatataccagttaaatgccgccattttgcctcttcatgcacatgtgtgagcccactcacccagctcctgagatcttactggaagctgctgatcacctgcttcaggtattcctgtttattgggagactacctttccctggtgctggctgtgaccagttattattttagagagatggttaataatttcctgcccatcacctgatggttgcctgacattcctgccctgctcctgtctgaccagctacctactgtcacagttggtctgtatatgaaaggcatgctcacagaggagccatctgaggtgtctaggaattaactagcagccctggaaggagcaggctgtctctggcctccaagatgtcaaagcgtcctaaaatatagaaaatcaaaagcatgtttagtgcccagggatgctcagaggcagtggagtagagtcagtcaaggaaatagattcacagttctgggctaaacccttggggaactcacttcaattgtctgagcctcaatttccttatctgtaaaatcaacaactgttattcattgaacaagtgactgtttaaaaggacagacaccgggcctgccaaggtcattgatgggtttagagagatagaggatagtgcttggcacaccagaggtgctcagtgagtggcaggtggtgtccttgtgccacagctccagggagcagcagagaaagattggtgtggaatggtggggtctagggccatttctttggctgtttggagcccttggagcagaggctatgggtggacagaaccctcaggaatgttcttgggattcagagttgctgctggacaagggttgtcccagaggccagctgtggacagaaccttcaggaatgttcttggaattcagagttgctactggacaagggctggcctgccagcccagtagccaggagcccaggggagtctgaagcatgtttggaggccaggtcttgggaggcgccaggggttcaggtagagctctggcacaagcgaccgttcaactcagggacttgagacaacagagcactgaaggggagagccccaggcctgccgagctgtggacaaacaaggactttggatcctaggaggaaggcaatcaggcagctgccggcaaggaacctctgagaagccaaattagaatcaggtgctggcctgagacacatggaatttcctggactctaagctggcaatggctgtttttaccaaagacagattctaaggagtgaagccaagggctctggcctgagaggtagagcatgagaaggaacaaacacagacccctaaaggattcatgcctctgggaagggaggctgcgtggtgcagtgaggggtgcagaaggacgcggctcgaatccagcctccactgcttaatggctgtgtgacctctggcaaggtccctgagctttctgagcctcaactttcccagtggcaaaatgagaacagtaatacctaccctgcagcactctcgtgagcccccagggttgacttattctttaggtagacacagtgcctgggtcccaggagagtgtcttaattttataaattcttttaaaatcaagaggaaggaaatgaacataataatgaatatataataataaatccagcttggattacatttttctttatagcatcatagttgtcaaaaataattatgtgaatatagatataaagatatagcagaaagatgcctacaaaggcaaaagcgcttggggcccataagagccataatcaggccctgaaagccactggcacattgtgggagcccaggcttcactgctgagcacctcctctgggccaggcactattctcagtggtagaatagaggtgtgcatccgcccagcctctgcctgcaaagaaccatcagggtagacatccttaaaaacaggcaactacagcactgtgagctaaaaggagtatgagatgtagaatcaccggctttccttctgccctcctgctgtgggcgtcaagtgctctctgtccaggaatttttttcttccgtcttacatctttcatcaaaggccatgtctaggttatatcaagtcctgcttctccacgtatgccaccaaatctccatttaagaatcctgcccattctctggtcccttttagccattttgccaacggggtgagtatgtctggggtgtttgtggctaaaagtgcactggtggtagggacagtgtccctgcaaatgcttccattattgtccctctgcctccagggccctcagtggacctacagttttttgcctcatcttttctggctggactcatcttgtttattgcccaccatgacggggagtggaatagatggggcctggtggagagccagggtgggatctgaatgggccacgggggcattgcctgatagatctgttgtgggatgtgtttttttttccagaaccccagagatgaaaggcctcctcccactggcttggttcctggcttgtagtaagtgctggccccgtgaccttcgaatgaacttttaccccatgggagtaacagggtggtgaaaaggacaccagccattgaggtcgtagagacttgggtttgaatctcggctctgcactgactgcatagacattcagcaagagccttcatgcctccgagcctctgcttcctcatctggcatgggctaatgcagtccatgcgtaaggctgtggcagggtcctaggagatattgtacctcagctgtgtaaaggttgtggacatagaggttatgtggctggcaagtgtaggaggcagattttttccctgtatgcaaataaaataagatttacaaaatcccccaatcaatccaaataaaaatcaaaactcttatctaaatatcccaacctatgattcctgggtcattctcagctcaggcttgtccagctgggaagtgactgtatagatggctttagtcccatcctgcggccccgtgaccgtatatacaacccccgacaggctgtcctgctccttgatgtcttgctagatccctggagactccaggaggagctggaggcctggtgcaaggagagagccttgggctcactgtgaaaccctggacagggcacctcttccctccatgcctcagtttcccattagtaagatgagggaactggcttcagcgatttctaagagtcccatcctgcttttagattctctgccttatgttctaaagggtgtgaggggagggagtggtggggaagagggatgtattgccaagagagacaggaagctcctatctgcctgcttcatgcaaatacattatgaattacaccttatatgtcatggtcacttactatgtgtctgccaccgtgctcaaaatttacatagttgatcttattttaaccctcatgacaactccaagatgtagctgctaatttggggtccccgttttccaggggatgaaactgaggctctgactccattcaataccatactttgaattagtggcagagccaggatttgaacccaggtctgctcatttttcaattccaaactcttaaccagttctccatactgcttgcacctcccttcccactaatggagagaataaaaaagagacatgcaggtccctccaagccctgggtgggagaaagggtaggagatgttgggcagtgggcctaaagcagggctgggctgcctgggtgtcacctggggacatgggctatcttccaggtgtgcctgctgtgcaaggaggcttgctggacctaaaatcaatgatcgagaaggtgacagggaagaacgccctgacaaactacggcttctacggctgttactgcggctggggcggccgaggaacccccaaggatggcaccgattggtgagctgatcgctataactgccctttaggctccaggctctgcacccatgttttcttattcaattccatatcagttctggaagatgagtattaaagtaccattttacaaataagaaaactaagcctcaaagaaattagctggcaatcccaagatctcagtggcctaaggtgtcagttggtcaactgtggcgtaacaagtggtcctcaatgtagtagcttatacagcactggtcatttactttgcttatgaatctgccatttgggtagggcttgtggggatggcttgtcgcagcttcagcttggacaactgaggctggacaatccaccttccagatggctcactcctatggctggcaagtggtcagcatctcctggcctaggagcgggtcagaggcctcaattcctgtcacttaggcctctccaaggatgttcgggattcctcccagcatggtgactcttgggttgcaagagtgagtgaccccaaactgcaagaccaaaggatatggtgttttatggtcagcctcagaaatcccattgtgtcacttacactgtactcttggtcaaagcagtcacaaaggctttaagagggagggcatctagattccacctcttgatcgggaagtgctaaagttctagaagaacatgtgaaatgggagattttgctccttggaaagcatacccaactgggttaacaattctgatactgctagacatatataaaggaaagggatgattaagcaaatgaaggacagatggttggggccaagtttctcactgttggagtgggataagccagggcaggaagccagaatgatccatgtgcaaaaggactaaagttggagacatcagtatggactcctgtttagcttattgtagatacagatgtttacatgtggaagtatgcataggtagcagtatgcatagatatcatggatatattagtatcatactaatataagatgtaagtaataggagaaaatggtgtttcctctgtaagatcttctcagtttttctgtaaaccaagaatactttttatgtgcaatctgctacacctaacatacagtcatccctcggactggttccaggacccctgtgaataccaaaatctgcagatgctctagtccctgatataaaatggcacagtattttcatataacctgtgtgatcatatactttttttttttgagacggagtcttgctctgtcgcccaggctggagtgcagtggcgcaatctcggctcactgcaagctccgcctcctgggttcatgccgttctcctgcctcagtctcccaagtagcatatacgttttttttttatacacatgggcaaatagaaacattcttttgctatcagtggagagggtctaaaagaaatgacatctcagtagcaacaagcacacttaatgcctagatctagtttccaatgtcattcttcaatagaaggccccttccaagtcatatatatatatacagggttccttgaagaaatggtcaattctaggaccaaggcaggaaatatacgagatgagcctggaacttcttttagtgccaaaaagtaaggaagtgcttaaataaacgcaaacaaaacggaagcccacattgatggggatgtgacaagtggcacctgtgctgactgaaagagcccccagtggccaaccctggaacaatttagcaacaaaataaatggccccaaactccagtcttatcatgagaaaaaagaaaatcagacaaatcccaatcgtggggcatcttataaaatgtctaaccagtaccccctcaaaacagtcaagaacaaggaaagcatgaggaactgccacacccaagaggagcctaaagagacaagaccatgggccgggcgcggtggctcacgcctgtaatcccagcactttgggaggccgagacaggtggatgacctgaggtcgggagtttgagaccagcctgaccaatgtggaaaaaccccatctctactaaaaatacaaaattatctgggcatggtggcacatgcctgtaatcccagctactcaggaggctgaggcaggagaatcacttgaacctgggaggcagaggttttggtggtgagctgagatcgcgccattgcactccagcctgggcgatgagagtgaaactccgtttcaaaaaaaaaaaaaggcaagacaatgaaatgtaacatgggatccccagtgggatcctgggacagaaaaaggacattaggtaaaaactagggaactctgaatcaattatggcttttttttttttacaattagtgagataatgatgtattatttagtgaataattatcaataatgtatcaatattggttcattaattctaacatgggtctcatactaatataagatattagtaataggaggaactgggtgtttcctctgtaagatctcaattattctgtaaaccaagaaaaccttttatatgcaatctgctacacctaacatacagtcatcccttggactggttccaggatccccgtggacaccaaaatctgcagatgccctagtccctgatataaaatggcatagtatttgcatataacctatgtgattgtatccccccaaccatttttttttttctttgagacagggtctcactctggttgcccaggctggagtgcaatggtgcgatctcagctcactgcatcctagaccttctgcactcaggtgattctcccacctcagcctcctgagtagctgggactgcaggcacgtgccaccatgcctggctaattatatatacatttttaaatagagacagggtttcaccatgttgcccaggctggtctcaaactcctggacttgagcagtctgccttggcctcccaaactgctgagattataggcatgagccaccgcgcccagctgcgatcacatactttaaatcatttctaaattatttatcgtagctgatgcaacgtcagtgctatggaagttgttgttgtattgtttgggaataatgacaagaaaaaagactgtacatgtttagtatagacacaagaaaataggcctgcttacattttccatccatattggttgatccacagatgtgggacctgtgatacgagaagtttatttctggatcacataacagttcagtaggaatcacacgttggctcctcccatcttgtagttctgccatcccctatggcctcagaattctttgctgggtcatctccatccagccgaaggatggcggcagaaggacagtggagtaaactgtgggaagtttgtctgggcaggtctggaggtggagtgtattaattccacctacctcccctggccaggaccaaatcatgtggccacacctactcgcaagggaggctgggaaatgtagtctagtcgtgagaccaggaggaaaaagagggtccatgacctgctggctagaaatgaggagcaggaaattactcagtcacactaccagatcctccctgccacatcgcgtccaccaaggtggcctctgctaaagtgacatggttgaatttttgctcctattagggatggggtcaggagggcacccctcccactcgggatctaagtctcttgcacggacaggtgctgttgggcgcatgaccactgctatgggcggctggaggagaagggctgcaacattcgcacacagtcctacaaatacagattcgcgtggggcgtggtcacctgcggtaaggctggggcttcccgttcgggccattggaagagcacctgactttaagttcagctgccctagagaacagccagcctgtatcttgttgggggaggaggagttgggtgcagaactgggacgagaggagcaggattattgcagctgtatcagacccccagggtagggctgaatcatccactgggtgcaaaagtgcttgacatgcttcctttttcttgattcccccacaaaatacctgtagagtatgtttaggcttctccattttagacatcaagaaatggaagctagaaagcctgccagtgcacacagcaggattcaagctcagggcctctgagttcaaggctaaatctggggatggttctgctctatgagaatgagagttcctccagagcagcggctgcctccaccatcagactgggagtcccccagaggaaggaaggtgcttcctctatcagactgggaactccctgagggcaggagctgtctcctggactgaaacctcaccctgagcagcagctgtgccccttccatcagattctctattcccccgatttaggagccatgcctcttccatcaggctgaaagctcctcggagcaggaagtccatggggtctctgctgagactggagcatgctcttcccaccctcattctgctcttggtgtccttttgcagagcccgggcccttctgccatgtgaacctctgtgcctgtgaccggaagctcgtctactgcctcaagagaaacctacggagctacaacccacagtaccaatactttcccaacatcctctgctcctaggcctccccagcgagctcctcccagaccaagacttttgttctgtttttctacaacacagagtactgactctgcctggttcctgagagaggctcctaagtcacagacctcagtctttctcgaagcttggcggacccccagggccacactgtaccctccagcgagtcccaggagagtgactctggtcataggacttggtagggtcccagggtccctaggcctccacttctgagggcagcccctctggtgccaagagctctcctccaactcagggttggctgtgtctcttttcttctctgaagacagcgtcctggctccagttggaacactttcctgagatgcacttacttctcagcttctgcgatcagattatcatcaccaccaccctccagagaatttttacgcaagaagagccaaattgactctctaaatctggtgtatgggtattaaataaaattcattctcaaggctaataaaaaccacattggcattttcctctgctgtgggggatcgctggtgcctctttctctgccactggggcaataaacccaaagatgtctacattatctccgaaacagaagggaagattagtaaatgcagggttttctgggatgagcttcaggctttctcttgggctaattttcttacaccttggggtcctctccagtattgggtctcattcttcctcgatggggtcagggaaagataactggtgattatgccagcttcagcttccaggccagagagggtggcattcaaatcccagtgctggcttcttcagctgtgtggtcttggacccgttactgaacctctttgactttcagtctctttgagaaataaactgtcttgttccttgcaatgtaaaatgagacttctaaagcccaccttgatgctgatatggagaatgctgaggttctaggatttcacacagcaggaatttttttttaataggtgtcagctgtggggtttattttttacaaagtaaggacattaaaaaaaaccaacccgtctatcaattcataaaagaaaggatgttctgataccaagactgaaagaagaaaggatgtattccaaaacaaaggaacatccttccaagaaaggacctatggcttctttattccgacataccccaaaataactgcatgataaataggtctatatttaaaaagctctagtgtcgaatgttttcaaaataaaatttaattttatgagattaccctgaatgcaccagtgctttagaaaagtttgatttagactcggtgtctatatttgacaatgccacacagggagggacttaaatgctgaatttgctcatgaaatatttaaaatcaaagccatttcccagatccaattttgaatgggtatgtgggggaaattgaagtcttcactctaatcccattttccttcaattgtgatattctggatgacagagaagagaacccagtccagacttctcccttctcccatgggggtcaggtgggaggcagggcagtgttttgctggtaagttctgcaggagggggtgtgggcaggcccttctcattggcacatcccagctcagagtcccagcatccacacaggagcaggatgctatgaggttatgaaggcaacactacaggctggtgtgggattgagttggaaggaaccatggagaaccttcatttatctaccaagaaattgaggcccagaaagttttaggagactgtccaaaagtcacacagcacatcaacagcagaagtaggattcgatctcagatcctagctttaaactctgggctctggccactatcccacattgccttcaaccccagcccacaaaaggagcagttcagggagtcacccacattaggggttcgtcaggggaacccctggattccagctgagggccagctccatgtcttccctgctgcaactgcctcttttggattctggaggctgtccccgggtggtcagtcagtctggggctctgggcttcatcctcagtggaggagatcccattgctgtcttccaccttggctgctgtgaacagctctggggaaattatgagagcaaagggagcctcgaaacttggggaaaggcgttctcctcaattgttgcatttgctgatcccttggctggcaggagaaccatcagggaggtcatcccattttaagaaagctagtgaaacatacagaccagatcgcaatgcctccctagctagatctttatacatccttaatggacagactgccctgtacatacagatcctttactgtcatctgaattgggcttcaggcacaaatgtgagcctccaaacataagtaaaatgatctctataagcatatctacagaggggttgggcagcggggagcccccttgtagttgttaccaaactgaaaaagcctcaagtaaagcccactgatcaggatggaagggaggaggacagagctaaggtgggctgatgaggtaggaggtgtatg

SEQ ID NO: 25129 - DNA, 106328 bp, Homo Sapiens
aatgataataaaatatcagcacctcctcatacctgtgtccccctggtgtgtagcccaagccgtgtgcagggtgaagggcacacatccagggagcagtgcagccccagctccgccctgtaggagccctgtgctcagtcacccactgcagcccccaagctcctggccagtcctccctgaccagggctctttctcatgggtgcattgccaggggcaagaaagtgggagtctgtgttcctcaggacagaggagtttcagctcaagaagtgcctggctgtccagcttgacactgtcccctcccacagacctccaatgctcacggctggggcctgcctctcctctgtggtcatggctgaactcacagtgtttggggggatgagccaccttgctgctggcttctggctccccctggatggtgacgcttgggcagctcccatcttgccctctgtgcagatggggcctaatctccttactgcctccattgtccacgtggctgctgcctgcaggtccctgcacggctgctggagggagctgcttatgcacaggctgagaccaggatcccctcacttgtaccacctgccaggtccccgccctgcagcccctgcactcatggcatgttctgctgcctggaaggccgctgcctctgtcccagttccatggggatctctgctctagaggggtagcttcttccttgaaaagatgctgcttaaagtcagaggatggatggctctccttggggcatttctagctctggactgtgccacaagccctggatgtggtatgtgtatgtgtgtgtatgcatgcacttaggtatgtgtgtgtgtgcatgtgtgtgtggtatgcatgcatatatgcatgtgctattgtacgtgtgtagtgtgtataaacatgcatgcatgtatgcttgtgtatgtgtgtgcatgcataagtgtgcatggtgtgtgtgcatgtgtgtgtggtcggggcaggggcacctgcaggctgctcgtcatctgagtggaccctgttctccactcttcctcctctgcaaagcccaggcccctttcctagcttcacatgactctgcgtgcaccttcaggagaaacggagtcctgctccttctattgcacccatcaaccaggagtggggggagggggtggaggtggggaagatgatcctccctgttgctgccccatggtgggaggagagactgagcccaaaccatgttttagatgctgataggcttaagggtaacagcacaggagtttgagatgcatgcggctcaacacctaatctacatctcacttcactttctcatctggggaagtgggcttgggaccctgagcctcccgggtatcacagggtcctaatagtccctcacagaaggagcagacccagagtgagcactccccaaatgccacgccgtcccttcctcacccttggagtggagcctggtcgttctcaaagttgctgggagagtcccaggagccctggccccaaatctgcatcctacacagtgcctgggaacacagggcccattttttccttggcctctcgccagtcccagcaggccctgatgctcctctccatcctgctaggatggctctctccccctgggggcagagtgggggcaggaggtggtgggagggtggagggatgctgctcagtaaataatgcagagccggcagctctgattggcttcggggaggcagacactctgtctacataaatggcaatcacatcttctgtgcctcttaactgtcactgtggagaggagagagagaggacagagagcaagtcactcccggctgcctgtgagtactgctctttgtcctcatggctcacgcgtccagctctctggatggccgtgaccctggggtttggggtgggaggtttgccggttgattctagctgtgctgaattctcctcctgcaggaggaaggaggttcggctgacagggacagctgagcattcagtgtgtgcaggtgacacagggtttacaggaacttttcaagaaaataggcaccaacctaggtcggcttgcttttttgtgctatctgcaagcaacaggtcaggcagagaatctgaaactttggattgctttttaggccacattcctagagccatgacagcaacataactaagtgagtggaaattattttccagactggctcatgtgcatgtagagaccgtggaggccacacgatgggtgggaaagaaggaggctatgcagccccacagactcaggtttgcattcagatgcacacctccctggccgcctttccttcctcagacgtgaaggagaggagctaattaacagcatcctcccccagatcatagtaaaaaccaggtttgattttataaaggggcgggcacacaataggtgctcaataaatgagagctctattgtgaataagggaggaaagtgtgaggtcactgaaaatgctgctgagtggtctgctgcgccctccacagcctgttttcttcagtttccaagcgaaattcaggcaggtgacatgggttcttcccacaagcttgtttctctcttgaagactccaagggcgaggctccttgcgaaaatttctcattcagataagcagagtttcccctccaaaaggtgacaatcactgcacaaaagctggtcctctgttggtttgtcaagggtgccagagaaaaacactccttttgctgggggcaccggagtcctgctggcagcgtgcggtgaccccagactagaacacaggcatcctggatggctgaccacagagcaagttaaggggtgtctggatggttctgaaggaaacaaaatcaagccattctcagcagtttcttttcttcctgtcttctgggcacacgctaggtgggcgtctacacacagccagtgtgaagaaaataattaaaataaatcccccttaactccccttgccacaaattcaaagagatagcctgggggatctaattacttttgttttctgctcttcaagatgttgattattctgaaggttttactttcagacactcaacttgagtcagcagttaagtttagggaacggctctaggaaaaccacactatgcgggtattttaaaagaagtgttctgcggctgggcgcagtggctcacgcctgtaatcccaacactttgggaggctgaggcgagtggatcacctgaggtcgggagttcaagaccagcctggccaacatggtggaaccgtatctctactaaaaatacaaaaattagacaggcgtggttgtgcgtgcctatagtcccagttactcagggggctgaagcaggagaattgcttgaacccgggaggcggaggttgcagtgagctgagatcatgccattgcactgcagcctgggcaacagagcgagactctgtctccaaaaaaaaaaaaaaaagaaatgttctgatgttttgtgtttatctggtgcttgttggcatttctggaggaagacattcagggagcccagaggcacctcgtgggcatatgggacagcgatgggcacaggacctcgtagaaaaggttagaatcccactgtgttgagagacagcagagggtcctggtcttctggtttgtacagaggcaagtgtgaaagccatttctgagctgtgcgggctgagaggagctccgtgcctgctgcatgcttccctcagcctcttcgcattgctgtaaaggggatcaggctgctactttgcagagctgatgtgaagtttaggaggatataggtaaagggcttacactgctgccctgtatatggcaactattcaacatttcttctgctttggaggaggtagaggagaggcacttctcttggggcatggagggcagcagagtttgttgagcctctgcctgtttctgttgggatcagcccaggtgggtggaggcagacgtgtgtctgcgggctcagcactcccacccgaagccacattcccctgttctctcatgtgcagtgaaccaggcaggagccctggaccacactctgggttgcaggcaccaccttccccatccccagtgagagccctgtttagagtcctgtggtctcatctctggccatggtgaggacacaggcagctgacagtggaggtgtaagtggattcccaggccaaaggtgtgttaggaaaatgctggcttcagaacaccagcacccactccttcacttactggctgtgtggctgtggtcaagttaaacagcaataactctactggcctggcagtgttgtgagcgtgttcagtgagataatgtataccacgagcttatcaggagcttgagcactgctgatttgtttggtttcttggacaataggatgtggcaaccaaagttcaacagattctcaggattttttcttggaggggggcacctcaagtgcaggcttcttagcaacaccaggccccaggccagcagctgttcaatatgaggaatagggaagcattcactgtgaatgtagaagtcaatatttaccaccaaattggctcataaggactccccaaagagtgtaccaaagcatactaaatagattcacagtgcaggtgtcctgtgtttgtaatagacggtaaaccaggacatgtcatgggcactggatattatgactatgatgaaaagaagcaaccaactagaacataattcgaattgtctcaagccaatagcaaaggcagatggttatgatctcttgtgaactattaatgtgactgcaagagaaagggggaaagaattgagaaaaaataagggaaaaaatttgtaagggggggggtgatttctgaaaagtttcttctgacataactcttcaataaaatgaaaacaaaggagaaaagttaaaattacctagtagttatcatataaactttcaaaattagcaaccatgaatgaaaataataaaatttgaatgttttaaggtttaaagttaaaatgtgaatgaaggagcaaagcttacagagatggagtgtctatgctcaatgcctgatggtgggtgacatttctgtatcattccagtttttcaaaaagaaattgacaacacgcaaaaagaactgtacaactcacatgtctcaattccactggggaattaatatctttgagagacagacccaataggtgcgacctatatggtgatggtggggtggcatctactcatgacggtgctgcccataacagcaaacagctaacaggcaaagtggggatggatggtgtcataggaacacggtgaaatccccactcagcagcccttaataagtgcaaataggagcgttatgttaaggaaattctgcaccttgtaattaggcataaaggaaaaatgtcaagtgaaaaaaggatccccagtcatacacacatcctcattccaactatttgaattgtctacggtcaggactaaaatggaataatatcaatcagtttcatgtccttggcattcttttttgtctttggaagttgctcaagttatgaatttttccagccagcattaactaaggtcacagcatggttacagagatatgagtggaagtagcatctttccatgggaggaaaactgaaaaccaagacaaacttctctatggctcctttccacggataattgttggccaagaatctactttgacagagcattgtttattaaacagggaatgaataagaaacagctgcacaaagctccttcctccttcatgtcagcagaggagcaaggctttcccctgaattttgatctttgtttgttgtagaaaatttctcccttttctcttatgctacctcaggagaagaggcttctgcctgtcttttgtagcatcaataataataattgctagacacaggtttacagtccaaagtgctctctgcctgcatgagcttgcggccccattttataagtaaagaaacagactcagagactccaagacgtcagccagcagctgcatgcctcttgccgcagagctatgggctcaagctgttttctctgaatgcaaatccaccattctttctattcttcatgaggaggaggaggaggaggactgtcctgtggaattgtagtgctgaaagcttagctccacttgattgtggcagttccattttccaacgcagaccaatctcgccaaggaggccagctgggcggagtgggacttaggacccagtgcaaagtcccttacaggagttcctttctggacagaaactcccttgagatgatggatttgattcctcctgaatttgcacaggtgtggagagtgaaatgctatgcttcgagcatctactttgtaattatcttgtactctcttcatggttttgtgtggtgcctaggatgatggccatggtacagattgcaagtggagctgcaatggagtggacgtgtgtgtttctcccaacattcctatgttgaaatccttgcctgcaatgtattaggaaataggaactttgagagatgattaggtcatgaagtcagagccctcatgaatggaatgagtaaccttataaaagagaccctagagagacccatcacccctttcaccatgtgaggacatagagagaaggctatgtctatgagaaacaagcctcaccagataccaaatctgccggggccttaatcttggacttccagcctcagaactctaagaaatcattgtctgttgtttataagctgcccagtctatagtactttttatagtagcccaaagggactaagatagggggcttggccacggtctcacctccagccaagagctgcccaaaccctttctctttctggttaccatttgtaacgaacatgatctataagcaaacaagcaccgtggaagctgcggtgcccctgtggtcctcagtaggcattcgggaaatcattccttgcagccctaggagaaactggtattacaagtttctaatcctgaagttacttaagccatgctcttttcatcaactgatatgcatctggctacagctgttagagatgctctgtacctgtgtttgagtccaggacattctctcaggtgccttcaggagccagactgcaggaattcaactgtggcctcatctgactacagcaggtgtggagtcttggttcagttgtgcagcctctctgcgcctcggtcttctcatctgttaaagggagtaatagtagtcctgacaaggttcttatgaagattaaatacgagaaccaggcaaagagcttaacgtggttcttggcacatgtaagttcatatcaatgttaactattttttagaccaatgagagagtgcctatttaaacaagaacacccgggtttacataaaaatagtggtacaagtgtaagacagtcgcaagtgtgtgtgcgtatgtgtgtgtgtggtgccctggctttattgtgtcaattataagtagagacactttggcctacaggatgaaggaaacaggggttctgccttggctttgctgcaaccagcttcacacctgggacagtcctttccttctctgggtcccaggtccctcccttttaaaatgagcatagtaatagctctcaccaataaagcattaaaggagctaagatgtcagcctgtcctgggtctcgtttccaacagatctcttgtctcccccactgactccaaaccacacaagccatgcttctcaggaacccaggacacccggattgtggtagggttctgccaatgggaggtttagtgggaggctcgaaggcagaggtaccaccatccccgtgacactggctcagcctcctcctccatgcctgctgacccggcaagcctgacctggtggcagctttgcacggacagcctggatcctggttccaggagcacagtctctcccatctctccatccgagggatgggagtgcatcatattggccatagaggttacctgagcttcctcggttacctaaggtcacccagctaataagccttggagataagacgcaagccgagttctctggatccagagtccacccttctcccccgcagtgccatgctgcctcccagaacactttatgttgctttttacccatgtgaggaagtctgtgatgtttctctctctgtagttgagaaaactcatgtgctaagggcctcagtgacacagaatcttcatgactttctgaagaatgctgcgggaacctggggtcaatcatgtagaataattggctttgaggaccacagtctctgagaagagcagttgtatggaaagtaggcctgagcactaactctggctctagtccctgactgttatctcatcaaagaatctgacaaatctgtcagcgctacctaagtcttgtaagctaaaaaaacccagcagttgcaaaacagtggatttccagtttgtaaacagatgagtttgagagctgtggaagagaaatacaagtgaagataatgtgtcctagaaagggaggaaggaaggagctgaggaagccggcctcaaaagcctcaaaatgaggccacttctgcccagttaataattttattttttacttaaagaaaattaatagactttcacggcagtttcaggtataaaggaaaattggacagaaagtagagagtcctcatatttcccctctccccctgccccccacagttgccctattattaatgaaaacattttactgaacactgactctgcagcaggctctcaccccatcatctcattcatcttcccagcagcactggagggaggtatttgcatgcattcttgctttcacagaggctgagaaggagcctcagaaaggggtggaggttaaaggtaacagagtaactgaaagcagtgactcttgacctcaggtctgcctgacacttggtggtgtagctggaggccacttgtgagcggatttagattattcacgtacctcctggccactgacaaaaatgctcacgtaaagcttcttagtggcctgttgtgtaaccagagtcttaagggttaaagaaagaacttagaggatgtttttttgaggcaagtttatcagatagccattctcctgtgattaaaaagctctcatggctagaaacttctttatggtcttgcttggaagcatttctcctactgaatatttttatggtctttgaacccacagagaaaatgtccatcaagaaacaagtcaggctgggtacggtggttcacacctgtaatcccagcactttgggaggccaaggcaggcagatcatgaggtcaggagttcaagaccatcctgaccaataaggtaaaaccccatctctactaaaaatacaaaaattagccaggtgtggtgacgcacacctgtagtcccacctactcaggaggctgaggcaggagaatcgcttgaacctgggaggcggaggttgcagtgagccaagatcgttccactgcattccagcctgggcgacagagcaagactccatctcaaaaaaaaaaaaaaaaaaaagaaaagaaagaaaagaaaagaaaaaaagaaagcagctaatccagggggaaatcagccaaattagtgttgtgcctggatttataagtatatgcttgagggggatagtgagccagagcctcaggcccaaaagcttacgtgttttctgagacataaactatggctcctttttactggaatagtgtaaaaaatgtcaaccctatttttttcatcaggatggaaaaggaaagtcaagagaggctgaacaaagtctccagtatcccggtgtttgcagcaaaatcatgtcttgcgtgcatgaacaggcagtaccatggacagatccacagtgcatggttgccatccccactccgggcttgtgaggaatccactacctcacatgcacagtggcgtggatgggcttgcccatggtgctaggggcctgggctgcattctcttcagtggctgtggcagagaagtcctaagagtgaaattgcagtgcccagactgcaggacacttagtcaagtgctgaacatggagggctagatgttgggcagggactgagacaggagatggcacaggtggaagtggtcaagactcaatggtgggaggggctgtggctcctgagccatagtgtctcctgtgactcttccttgtggcaaatatgtgaggggctggtgatttgaattgtctcaaaggtagagagtagagtccaatagggtatattacagaaacaaaatgtctagaggaccaaatatcattcattcattcatcattcagcaaatacctacagtgctctctgttgtccagggcccctgactggtcctgcaaatgcaaaaataaataagttgaggaccctgcttggagaagcccaccattagcaaagggtgttattgaaatgttgcattacaacaaaataaccccacaggtcaatcaggaggtctgagggagttcaggggagtccatctcttcttgaagcgtgtggggctggagatgagctctgactgttgctgatgcaaaaagacattgagccagaagtccagggaggcagccagctcaccgtgcacaggcaatgcaccacaggggctgcatggagaatagcgcagcatggagaatagtgtggggtagagaatagtgtggagaatagtgtcgtgtgcagctgctggaacactgggcagtttatgtcaacagaagctatttcaagggcctggagaggcataagccacagcctttatcataggctaagtcttccagctaatatttacacagcttgggggcataaaatatcaaacagctacaaatgagcacaagattctctgtggcttcatgctaagagccttctaaaaaggtctttgtgggaaataatctgtgaataaataacagagaataatttaaaatataagaaccaggtcttactttacactttgactaggaatatttcttttggtgtatgtggtatgtgtctgcttgttgtgtttttttattccagagccacatgctttggcctggtgctgtgacttaaagctgatatccccagaagctgagcgtctttctgaatctttcccagctaccccttctgagtcttcagcttgctgcctcacatgtgtggccccccaggagggcaaatagatatagctagaatatttgcttcaaaaggcattgctaatagtcacacatcaggtacaagtcctgaagaaaagattatgagatttcactacataaaaattgacattctcataggtcagaatagaattataagcaaattgggtccaacaaaaatgaggaaaatgcctgcaaaacatttaacagacgtaagagtagaattattagtatattagaactctcacaattaaataggaaatatctaacaccctagtggaaaagaatgcagtgagcaagaaattcagtaaaaaagtaatccaaatggcaaagaaacacacgaaaaagctattcagtttcattagtcaaagtacaatggggccgggcgcggtggctcacgcctgtaatcctagcattttgggaggctgaggcgggtggatcacttgaggtcaggagttagagaccagcctggccaacatggtgaaaccctgtttctactaaaaatacaaaaaaaatagccgggcatggtggcatgcgcctgtaatcccacctactcaggaggtcaaggcgggagaattgcttgaacctgggaggcagaggttgcagtgagcccagatcacaccactgcactccagcctaggcgacagagtgaggccccgtctcaaaaaaaaaaaaaaaaaaagtacaacggaatcattaaggctggttaaacttaaaatggatattcaagcccagtgattgtatggtaaaatgagcattcttatacatgttttaggggaaaatttggcaatatattttcaagacactaaaaatatttatctctagaagaatttgttctaaataaattataaaataagtgttctcctttttataaatttttaatgcaaaagaaagtgtgcagaaacgtaaacaagaggttgcacattttaggattatttggaaaagctaatagctgacatttattgagtgctaatttgttaccatttatttatttagttgttacacaaagttcttcaaggtattacgggcatacctcttgtgaaaggaaaatatcttaggccctttcaagctgggaaccactcagggaaaatctgtctcccattctattcaagtcatccctttgctcacagagatagatgcatattttgattgccttctttagaaagacttatcagaaactcaaaagaatgcaactaactgtatctcacctaccgtgacctgggagcccacagcgggagggccttgctttgcactgtctcacctttctggatggaactaatgtacttctttcaaattgattgatgtctcctgtctccctaaaatgtataaaaccaagcttggccacatgtcataaggacttcctgaggctgtgtcacgggtgtgtcctcaaccttggcaaaataaactttctaaattaactgagacctgtctcaaattttcggtgttcacacctcagaaatattgcaaattcagttccaggtgaccaccataaagggagtcgcatgaattttttctctccagtgcatacaaaagttctgtttacactatactgtagtctattaagtgtgcaataacattatatataaaaagtatataccttaatttaaaaataatgtattgctaaaaatgctaacgatcatctgatccttcagcaaacataatctttttgctggtgcagggtcttgcctccatgtcgatggctgctgactggtcagggtggtagtacctgaaagttatggtagctgtggcaattccttaaaacaaagtaacaatgaagtttgctgcatcgatcaactcttcctttcatgaaggatgcctctgtagcatgtgatgctgtttgatagcattttacccccagtagaacttctttcagaattggagtcagttctcttaaatcttgctgctgctttagcaactcagtttatgtaatattctaaatcctttgctgttgtttcaacaatactcacagcctcttcaacaagaatagactctatctcaagatgtctttgctcatccatgagaagcaactaatctgtccaattttatcatgagattgcagcaattcagtcatatcttcaggctccatttaaaattctagttctctatttccaccatatctgcagtgacttcttccactgaaattttgaaacttgaagtcgtctgtgaggattggaatcaacttcttccacctcctgttaatgttgatattgtgacctctttccatgaatcacaaatgttcttttttttttttttttgagacagagtcttgctctgtcgcccaggctggagtgcagtggtgtgatcttggcttactgctgcaagctccgcctcccaggttcatgccattctgttgcctcagcctcccgagtagctgggactacaggagcccgccaccacacctggctaattttttttgtatttttagtacagatggggtttcaccgtgttagccaggatggtctcgatctcctgacctcgtgatccacccgccttggcctcccaaagtgctgggattacaggagtgagccactgcgcccggcccacaaatgttcttaatggcatctagaatagtaaattctttccaaaaggtttttaatttactttgctgaagttcatcagaggaatgactatctatggcagatgcagccttatgaaatgcatttcttaataagacttgaaagtctaaattactctttgatcaatggactgtagaatggatgtcgagttagcaggaatgaaaacattaatttccttgtacatcttgctcttgagtgaccaggtgcattgtcaatgagcagtaatatttttgaaaggaatctttccttctgagaagtctctctcaacaatagtcttcaaatattcagtaaaccatactgtaaacagatgtgctgtcatccaggctttgttgttccatttataaagcacaggaagagtagatttggcatagtttttaagggccctaggattttcagaataataagtaagcataggctgcaacttaaagtcaccagctgtgttaccccctttgagagtcagcctgtactttgaagttttgaagccgggcattgacttctcctctctggctatgaaagccctagagggcttcttgttccaatagaaggctatgatgtctatattgaaaatctatggtttaccgtagccaccttcatggattatctttgctggatcttctggataacttgctgcagcttctccactggctcttgctgtttcaccttgcacttctatgtaatggagacagcttctttccataaacctcatgaacaaaactctgctaacttcaggcattttttctgcaactttctcacctctttcagtcttcatagaattgaagacagttaagaccttactctggattacgctttggcttaaggaaatgttgtggctggtttgatcttcaattcagaccattaaaatactctccatatcagaaataaggctattttgcttagcattcatgtgctcactggagttatacttctaatttccttcaataacttttccattgctttcatagcctggataactgtttggcttcacttttgacctggctcaacttttgacatgccttcctcactcagctgaatcatttctagcttttgatttaaagtgagagacatactacctactcttcctgtcacttgaatacttagaggccattgcagtgttactaactgacctaatttcaattttgtcacatcttagagaacagggaggcccaaggaaaggaagaaagacaggcgaataatgggtcagtggttcagtcagacacaaatttattaagttgaccatcatgtgggtgtggtccatgctgtcccaaaacaattacaatagtaacatcaaagattgccgaccatagatcactataacagattaataataatgaaatggtttgaaatattacaaaagtttctgaaatgtaacacagagtcattgagtgagcacatgcttttggaaacattgtgcctatagacttgctggattcagggttgtcacaaaccttctatttgtaaaaaatgcaataaaacggggtgtacctatactattattgtcacgatttttgttgccagttaaagaaaatgaggtttagcatggcagcaatttacgctgggttgtacagctaatacatgctgttataatagctaatacatgcgattatgatagctaatacatagaatcagggtgtgactcgcagtcctttctttggctctcggtctcggagtgttggccactgggatacaccaatgcttcccactgtgtgggtgaaaattggaaataatataaatgctcaacaatagaggtacatgttgtgaatatggcacattcacattgtgaaatacttgtgagaaatcacacaatagaaaagtatttatcgggcaggtgcggtggctcatgcctgcaatcccagcactttggaaggccaaggcagacagaacacttgagatcaggagttcaagaccagcctgaccaacatggcgaaatcctgtctctactaaaaatacaaaaaaaaaattagccaggtgtctgccaccatgccctgtagtcccagctactcgggaggctgaggcaggagaatcacttgaacctgggaggcagaggttgccgtgagccaagatcgcaccactgcactctagcctgggtgacagagcaagactccgtctcaaaaaaaaacaaaaaaaaaagaaaaagaaaagtatttatcaacatgagaaatgtacttagaaattagtaaagaaaaacaggctagcaaaaagatctgcagtgtgataccatttgagttaaaaatttgagtcatattaatttgaaatacttccacttgaggtgaaaaccaagtttcactgtatgtgcaaaattaaaaaaaaacagtcacttcaaactaaaaactaatttcaaagcctgcaggccccaaggaattgtaagctggctgctttagcacatggccttgatgttttgctggtgaacaggacactccttggtcgttggcttaagaagcacaaaggtgcaacagaacttcagacagtcattgtggttgttctcatgcttgttagtttggcatttgctgttgctataatctagagtctaatcttacgtctcaatcactgccactcaagcactcactagctgagaaatgcatcctcaaacaatagctttaacatgggggctggatctaataagccttgaaatgacataaaaacttctgtaactgttcatttaacagagaacatggaagtaaaaatattagagagaatgccaatggaaggaaaagcacattctagcaggtttacctttgtcaaagtaccttgaccaaacatcagccaagctcctctggcccaagggggaagagcttagccaagtctcctccttggccttctgagcacaactttgatgtccaatcaggctcatgtgcttccacttttggtatctcatccagagttcctttttcccctccacccttgatacttacccaagttcctcttagtaattttccacccagggaccctctcacctgaccgttggctgtaagtccctatgtgcccctgttgtttttggaattgagttcagcccctccccttttgcaacattctatccctattgcagtggtcttgagtaaaatctgtcttgtcacttttaacaagtgcctggtgaacaatttttctttaccacctttaacctcacaaaaattgttaaaaatcccagcatggacaatgggaaaatagagaagtgctggaagctgatagtaaggtcatcaccattgctaataacagtgaatttagagtattcctaagcacttaactcccatgggaaaatttatcttaaatttgtcctggagccagctataaatttgaatcctatttctgcaattactggtcatgtgatcttgggcatgtcacattgcctctctgagcttccatttcctcatctacaaaactttggagtatgaaaaagatttgaaaatgcatccctatgcattttccttgtgccatcctatgcacaagacgtgccttatggagaaaatacatgtgttagagaagcttccccagacaggagttacagtgctgttggctgtgagtccatccctagcatgcaattgtctctcataaatagaaaatattctagaggctgggagcggtggctcatgcctgtaatcccagcactttgagaggccgaggctggtggatcaccagaggtcaggagtttgagaccagcctggccaatgtggtgaaaccccgcctctactaaaaatacaaaaattagctgggcatagtggtgggtgcttataatcccagctactcaggagactgaggcaggagaatcacttgaacccgggaggcagaggttgcagtgagccgagatcgtgccattgcacttcagcctgggcgacaagagcaaaactccgtttcaaaaaaataaacacataaaataaagtaaaataaaaattctagaaagacatgtgccagaattttgggttgtgggattttaggcttatctttttctttgtgttgttcactgtcctgttttgaaaatacaattgattcttattcacatattccacctatgcaaattctcctacttgctaaaattcatttgtaacccccaatgtcaataaatatcaatactcatggtgcttttgagaccactcagggacgtacatatgtgtagcgtagtggagaatgtgcttgtctgatgcgtatgttcccagctgaggctgaacaaagggacacactaccttcttgcgtcagctctcataatgtaaacatgtccttctctctgtctattcagtgccacatccttcacatttttatgtttttcttcttggtgattttgctgtttaaaatgacccccaaatgtggtgcagaagtgctgtctagccatcctatgcacaagacgtgccttatggagaaaatatatgtgttagagaagcttccccagacaggagttacagtgctgttggctgtgagtccaatgttaatgaatcaatatatattaaataaagtgtctcttaaaaacacatgaaaagtttatgtattgatttgttgacaaaaatgttgggatcacgcttcaggaaattgtatttcccctagaagaaatggttcagtattcactaattcagagtttatggccatggcaactgttgtagatagaacacagctaccagcaataatgagaattgcctgtatattacttatgcaaggagggaggagagcattagttttaaaaagcagatggtgcgtaaaggtgcagttccatctgtgacagaatcaagaggagagaagaagactaagtttgagggggtgtgctgccccaggctctgagctgaggctcgtgtgcattgtgtgactgtgccttcatgccctcctgagaggtcagcatcacagtcttcatttcccagatgaggagaggggctctaaggggcaagcttgtctctttcaaaggcaggtaagggcagaggcaggacttggaccagtgtttgtcattaaagttggaatcgatcatgaaaataaacgtgtgcttctagtctattgaaataaagcgacgttgtgttgttcccagttgaatagctggtgaagaggagaagcagcttttgcctcagtcccaaatccagtgccatttctacctcctacagacatggagggaaagcgccccttacttgggatccaagtggcctccagggcatgcagtcactgcccaggtgtccctacccacggcttgcttggtatccccgccttccagttcagaggttgcaaaatttgctcactgaatcattttctttctgcagttttcacctctgacagagcccagacaccatgaacgcaagtgaattccgaaggagagggaaggagatggtggattacgtggccaactacatggaaggcattgagggacgccaggtctaccctgacgtggagcccgggtacctgcggccgctgatccctgccgctgcccctcaggagccagacacgtttgaggacatcatcaacgacgttgagaagataatcatgcctggggtaagtgtgtatccaaggtcagaaaacaggagggctagaactcacatagcacctacttggctctgagcaattcacatactttgtttcaaggaatccctatggcagtcaggttggagagaaattttgtcatttctattttacaactgaggaaactgaggctcagagaggttaggtggtccacctcaggtcacacaggtagtacacgatgaagtcaggattaaaatccaaatccaagggcagtgaggctctttcccccaggtcccctgagactcagtccctgcccagagacactcggtacatagagcgtgtcctcatatacattaggaagcaagacactggtggctgctttcaaataagtcaattgccccaaataaagcacacttccaccatccttgggtttagcaataggtaattagcatatgtggaagaaacgttttctttagtttatttgagagtgggcagtgtggtgctgcccaccaaggcagccctttttctctgaagccagtaggcctggggtacacagagggcagaaatcagcgggactggctgctgtctccgatactcactcacagggcagcagagttggagctcagagaaacttcccttcagctttacgcttccacagtagattttctctgccaaggagttcacctaaaagcctgttggttaaagtggctctggcctagtcagggtctgggtgggagttgcagcccggccagtttctagatcacgaatgtttatgaggatggccaaacctgcccttccatgcaacaatgtgcagagtccaggcagggaaaatctccgtgggctccactggttgatcactgccgcgacccagcacgtctgtggttgtaaggcctatgagcaacgacatgtgattttcatagaagaggggtctgggaccatcaagacccactccctcaatgtagacagaatgccaaggccctgtgaaggcataaggtcagacaaggttacagtccactgatcatgggttgagactaggcctcaggccctggacctcagggactggtttctcagtagctgagcgcctctctcaccacactgctcacatttcttcttccaggggattctcacttggcatttatgctttgagcaaagaacaggattcaggttcttctagaaattgtgcaagtacactaagctgttcagcataaaaccctttgggagaggtgtggctaaatgtcaggcagtggggagtacaggagagtaagggaggatttgaagtctttctgcttccttctatgggggcattcactgcgcagagctgagctgggaaatgcacaggcgttgggcaaggtccctgggtgggagctgcagcccacgaactgctggctgtgtgatcgcaggaaaccaggtgagctctcgagccgtgagcggagcaagtgcaggcccagccatctcaaaagttgctgtgaatatcagcggagagtgaagcaaaagagcacacatctgtccctaatcaagaatcgcttctgtccttttccagcccaaaggccacaggaaggggagagagacaaaggcacatgggccctccaggtgcggaggggctagtcagccacagggctgctcttaaactctcctgggccccgggcgctttgtctttgtcggctccttcctccctagaaatatggaaaattatgctttacaaatgcattggcataaagatgaatatattaacatcgattttttttctttaacctgaaagttcactgttttttcctcctgattacagaagaaatttaagcattttttcagcccctaacagtgtcgtgggcctggacctgctgtgctgaaggcatcacagcctgtgcagctcctctcggcctctcagcctcatcaccaacctcccacacctgagcccccaagcctagactgtgttagctccctctctccaccactccccaagccctggcagacttggggtggccgtggttgttaaataaaccttactgaacactcctagttcttggtgagctctctcagttggctgccttcacaatcagagggggttgctcatgctacatcttagacaacatatatttaacgatgagtgctattgagaaataaatgtttgcatctcttctcagattgtaagagatatcttacagatatcttagcttggactgctatatcaaaggacgtagactgggggcttaaacaacattgatttctcacagttctagagacaggaagtctgagatcaagatattaggttcaggtgagggctctcttcctggtttacagacagccgtcttcccagtgtgtactcacgtaaccaagaggtagccagctctctgccttttcttatgagggcactaatcccactgttggggggcactaatcttattaaggggaccccaccctcatgccctaatcacctcccaaagacgctgtcccttaatgccatcactttgggggttaggatttcgacgcgaatggtgtgcagatactcacattcagagcagagcagccaagcccgatagagcatatcctctgctgctgggattctgagccagacctggaggaagcatcagagcacgtgctttcattttatctgaagggatgacagggcccagggaggtgcagtcagttgtctggggtaacccagcaaatcagggttcctgctggacttgcagtccaggggtgctcccaacaccatgctattcccacaggcaggatggacatggagcaccagcaggggacaatgcggaacagggcaatgtctctcagaaaccagtgcgtggtcacagcctgagaggggtctgaatggcaatttctataccttctccatgcacaggggctgagggttgtcctgagggctttaggactttattctgttccttcagggcaggtactgcattggcaggaacaaattaaagacccaaagactaggctacacctgctccttctctgtcctcccctgatcgtcctcccagactccaagatgtttgaggctggccccttgttaccattgctaaatgttccctgcctgggtgtccaccacaacccttgcctcctggatcctgaaaccccctgtccccaagtataccacctggagctgtcactaccccttatggatctcctccctggcccacatgagcttttcctctgtgcctcacccagggagtggcaggtgttcaccttatgggctggagaaaggtgggatgcccctagccagggcaaatggcaaggggcagtggccaggctgagggacagcagaggtgagacatctgtggggtgatccagctgcttggctggagggaaggcctcagctcctctagaagagccaggggcagcgggaagaccagatgcatgtttgtggcttgactgaagaaacctcgaaaatccagagcttggtttttttttttgtttgtttgtttgtttttaatggagactttattttttagagtagttttaggaaaactaagcttttggcacaaagagatcagccttggggcagcgccttcactgacgagagcaccggagcaagaacttgaagcacagtgtggttttttgagacttcttttgttatggaaaatgataaggattttccactttattttggagatagaacttttccttctgagctagcaaatacattccagtgtcaaaaagggagctggtttaaagggagtggggacagtaaggtgatgtgtaaatgctccgaaataatggaggaaggtaatgggatggctgacatttggggaactgcactcacctaactctgggtctggctgcatctggcagctgggagccatgggggtacctgggtcccccgctctcttgaggcctggctttcctcactcctcagcagctgctctgtcctcccatgcaggtgacgcactggcacagcccctacttcttcgcctacttccccactgccagctcgtacccggccatgcttgcggacatgctgtgcggggccattggctgcatcggcttctcctgggtgagggtccggatgcacctcgggaaggggtcctggctgtggtgggatcccggggtggggacacggtacctatgcacaagggacctgagcagatggcggtgctgtctgtgggcagacgggctactgttgcagggaggagaaaggattcagcccagagagagtgcctctgagaaagtagcgattgagaacagagaaagtctcaacaactcaaagcccattctgcacaggctgtgttggaagcacttggtatgaactaacatcatggtctggggcccagagtttctgcagctcgaacctgggaatctgcatttctccaagcagctcagagaatttctatatcctccaaagcttgagaaccgcgactgcccctgtctcattccttctgttctccaccagggctgctgcccggggagaggctccaaccagcctatcagatgtgtccagagccttggagcaggggggtctctggaaaagggcctagctcctgcctgcaaaccaccagtcccaccctatctggaggtaaaatgcctaaaaaagtccctactcagaagaacggtaggcagggctggctctgcccgtgactctgtgctccaggcacagattacaggaaagatgcattcctcccaaatgcagagagcttggaggtagagctgcctgctgatggccagtgtccgagggctgctgcaccctggggagttcctcaaaagccaggggctgtccttggcctttggggtccagagcactcaccttgtctgtggcttggagccaggtggacttgtgggcatcggtctatgtggcatgctgtgatgtgtaaaggagctgtcaattaggaatttgcagcactgagccacagggcccagctgagccacctctgcttcaccagcctggcacttgctcttctctgggctggggcactggaagttgccgggtgagcaggcatcatgggccctacaggcagggctgaagagcccacagatgggctcttcagtgtctgtgctgctcctctgccaggcactggggcctccctctctgctgggcagggctggcctgggctgagcataccctctcctaaagagcattttctatcactggatattgcagcagatttcatttagctctgctggtccaaatccattctgtcccacagaggtacttggcatccatctctatctgctcattctgggacagtctgattgccctcaggccttgaagggagtgcctcactatctctcaggctgcgttgcctgatacctcatccctagcagagagcataggctcctggtagagctgggcttggccaggctcaggtagaacccagcaggatggggctgaccagaagggagaatgcactcttctcacttagatcttactggtgacgcatcgggatgttgctgtgcacatctaggcacgagaacatcttggaccccttatgttggagacttttatgaaggtggagactcaatccacctttggatggggctcaagaccagcctgttcagagagaggggagagttcatagagaaaagtcactgggagtttaaaagacaagatcaatggcttctcgggatgcccagagggtgacagctgcccagcgcccactttctcattcccttcatttgtgactacggaggaaagtccaccagtgggctttctggacccttctgtgagtgaacaaatgaatatcctagcaagcccgcagagcccatgcagtgaggctcagtggagtaaggttcattatggtggcccgtatgttccttcccaaccgctctccttgcatgattctaggtcaaacagccttcaggcctttgaatcacatctgagattgggtgattttaatctgggctttagtggaaggttaaatccccttgttactgctgacccccaaattctgcaatgcctggccctcggttaatcccttcccttcccccacgacaggcggcaagcccagcatgcacagagctggagactgtgatgatggactggctcgggaagatgctggaactaccaaaggcatttttgaatgagaaagctggagaagggggaggagtgatccaggtaaggtgggagctgtgagggccacttttgggatgcatgggctctgcacaggactgtagccgcaggtggggaaagaggcactcatgcttcttgttagttcctcaaatttctcctggagaataaacaaaaccgagctcttgggaaaatgctggctttgggattggcaggatctggattaggatcccagtgctgtctttcactcgcttccccagggcagggcactcagttccccaggcccctagctatggtaggtagcacagccgctatctcacagcaggtgcgtggaagtaacaactacagcaactatcgtttgtgtggggttccccatcgccggccactgtgcctaagcattttccaggcattaactcatttaattctcacaacaacactgtgcattttagtacccctttttacaagtgaagaaacattttaatagccctttttacaggagaggaaactagggtccagaacattaggtagcttgccccatggcttccagctacagactctgtgtggctcagagcccgtgatattcctcggaggacagcacaggtggcagatgtgaccaggcttcagaggctataaatactatttgtctttgaaccaatcatttacttaaagatgctgctgcttctatgcagcaactgaattcattttcttcatgtaacatgtatctattgagagtgactgtgtgtcagagcttacaccagggaacaagatagacaaaagacaatcatgatggaatttctattccactggggttgcaggacaaatggcactgggatgacttggacttgatgcattaaaaaaaaaaaaaaaaaacaacttcctagcatggaatatgaactatattgaacccagtactctcccttaatcatttttctcatgtcaagtagatgatagtctcattaggaaagcattgttaactttgggaaaaaggggcttccttttcagatattgtctttcacaaggctctgagaattggtgaaggcccattcagtggatgaggacagtgaggcacacactggagaacacctttgtgcagagcacatggccagtgtggccacgcgaaactagcaagcaagtctctccacttccagtcctgagaatgagcaacaagactgataattttatgtatttgtttctattgatgttgtgacaaattttgtggctcaaaataagacaaactgattatcttacagttctgtacatcagaagtctgacctgggtcttactgggctaaaaccaaagttgacaccttggaggctccaggggtgaatctgcttccttgcctcttctgacttctagaggcttccaaaattccttggctcacagccccatttccattttcaaagccagctgtgtcccatctttctgacctttcttttgtaaaccccaaatatctgagatgggtctcagtcaacttagtttattttgccaaagttaaggatgcgtgcctgtgatacagcctcaagagatcctgactacatgtgcccaaggtggttgggcacagcttggttgtatacattttagggggacatgagatgtaagatgtacattggtttggtctggaaaggtgggacaattcaaagcagggagggggctttcaggtcataggtagataagagacaattggttgcattcttttgagtttctgattagcctttccaaaggaggccatcagatgtgcagctatctcagtgggcagaggggtgactttgagttctgtctgtccttcatccaaaaggaaattccttatgagggaggcatgtagctttttatcttagtagctatctcttttaggaatagaatgggaggcaggtttggcctaagcagttcccagcttgacttttccctttggcttagtgatttgggggtcccaagatttattttcctttcacactttcctggtcgcatctccttgtgaccacatataagatcggaaagtgggtctccacttttaaggacacatatgattggattgggtccatccaggcaatctgagataatctctcaagtcaagtttcttaacttaatcacatcagcaaagtcaccttttccctggaagggaaacagtcacagattctggggaccaagacctgaaatctctgggaatgagggtgcattaatgtgcctaccacatccagtgtgcttcagagtcatggagggaacttgcttgtaatgcctattcctagactctgggccaaaaaatgtgaacgctaattcatccggatgacacccagattcctgaataggccacatgccgggactgatgactgccttctccatgacccacaggccctgtggccaggctcagagtcatccctccacgtgctcctccttcgcattctttggttatctctttttccatcagacataagtgatattaaatggggagctgaggaaaatgaaatgtcaggcatagtggctcacgcctgtaatcccagcactttgtgaggccaaggcaggcagatcacctgaggtcaggagtctgagaccagcctggccaacatggtgaaaccctgtctctactaaaaatacaaaaattatccaggtgtggtggcgggcacctataatcccagctacttgggaggagaattgcttgaacctgggaggcagaggttgccgtgagccaagaccttgccattgcactccagcctggttgacgagagggaaactccatcaagaaaaaaaaaaaagaaagaaaagaaaacgtcagctatgttgtaagcaaagcttcaatacgttgctgtgaaccataccattctacgtagcagcaacaatgactcagcaatgattcagcaaatgaatcatgcttcagtcccagcacaattttcttctggtcagtgagtatgcagctggagaagcctccttggccaagatcacagcaaggataggctgtcacaggtgcccttccagcgaggggagggagctactgcacactgtccgcagccagtgctctgtcagctgcactttgccttggtgagggccagatggctttctggcctctggaacatcagtcctgattctccaggggacagagggcagcagcactcagcgacccagtgggacagctgcgtgcctgcagagggcgtggttttgattccaggcaagggcatgcatggtctaaccctttacaagaggcctcgatgttggtggccgacttactttttcttttagttttatacacgggacaaggtctacttttccatttcttttccatttgttcctctcattttttttttttattttgtcttgtttttagacgaagtctcattcttgtcgcccaggctggagtgcagtggcacgatctcagctcactgcaaccactgcctcccggttcaagccattctcctgcctcagcttcccaagaagctgggattacaaggcacccatcaccatgcctggataatttttgtatttgtagtagagacagggttttgccattttgcccaggctggtctcaaactcctgacctcaggtgatccacccacctcggcctcccaaagtgctaggattacaggtgtgagctgtaggagatcggtcagagtggtgggagaaactatagggaaaaggagcaggccttctgaaaggtcagaaggctctgcaaagctccatggcagaatagctgaaggcagctgttctataaccctgaggcagaggataaggagtaggtacaagggagtgtaggggaatttatcttggtcaagcttgtttgttagaagttgtccaggaactgacctcggaacatccttgcacgtgacattccctgaaaggggaacaataaatgttaattatctacaggttgtgtttgctccaggttttcagcattgtgcttgcactcaataaaagcaagctgctccagcttctcagggctgctctctggccactagagccaggcagtcacttagctgctcttacactgcatacctgtgtctgagcactcatttcctccatcggccagggtctgcaggacagatccagcagtgagccactgcacccagactgttcccctcattttgaccctccctagcatttggtgagccctgctgattcaagactcagctctgtgcagtgtggagatttttcttctactgtatgttagttattgtgggccacgtcactctttttcagggacttcaattttccacagattgggtacctcttccatgatttctctcttcctttcgatatttcccttttttgttatcttctatattttaggaagcttttcatggttttctccacatgattatgtgattatggacctggtgtggtggctcacgcctgtaatcccaacactttgggaggccaaggcgggtggatcatttgaggtaggagtttaagaccagcctggccaacatggtgaaatcccatctctactaaaaatacaaaacttagctggacatggtggcatgtgcctgtaatcccagctactcaggaggttgaggcaggagaatcatttgaacccaggaggtggatgttgaggtgagctgagatcatgccactgcactccagtcggggtgacagagtgagaccctgtctcaaaaaaaaaaaaaaaagtcccctttccacctagatactggacattcatggtaaaaatgaaaagacacaggagctttcttgtcatattccctgtgttatttcagtatctacatgtgaatatatgtatacagacaaaattgaaatgatactacgcatatggattttctgcatggtgctttccttatcattttattgtgagcatttcccactatttaaatattgtttgaaaaaagtattactccatgattttctatgatgcatcacaatctatataaatatataaataatacctaagatatttgtgttgcatcaaattttccattcttataaaaaaaattttggaggacaccctttaggatgaagtgcaacaatcttccaagatgatcaccttcctcctaggactctcctggctgtattcatgtttaacattcatgctccccactaaatccaaatggaacaaaacaaaaattgaagcatttctaggtcattgcatcttataacaaaaacaatttcatattcaattttttcagcagatgattcctctaattatatactcctcaaaaaaatcttatcaatccctcataatataagctgtgtctattataataagagctacttttcattgaatagcaattatgagcttggctatgttttagcctatgtcttgtgctttgtgttattgtcttcatcctcaaagtatttatgaagattgattggattatggacaatctttttcatggatgaggatattgagtcccagaaagttagtagaacatgcatagcagcaaaagtgaattaaagccaaggctagtaggaaagacaaccagagttatgactgttacaccagctcatccctgaccataggcttgggttggtgtccagagatgtgcatgctactatgggctgcattttcgtttcattaaagacaacctcatttttgagagaccatacaagtctttagcatttgggtaggaatattcctggcatctctcagcccccgctttaacacaatcttcctgtgagcccaatccactcagtttttttctggatgaaaggaagaaatgggatctgtgtttgccaccggaagctcacccttctcagcagacaaggctgattgtctgtaattggtgaggccccaaagagcacaggagcctggtgacagcctgtgagccagcctgcattattgatcccctcagagctgtaatcacagctgtgggcgtcagcgcagtgatgcgtgtctgagtcaaatggcaaactgttgttgtgaggctggacaaatgtggtctgggaaaatggtctcttaattgggttttaaagttcttgtggaagaaaagacaattttttgcttcgaaaaaaactgaagatgaaaggacatttctgctcacggcatcagcagccagaagcgtcagaccttaccagcatcccctcctacctcctgagcaggcttgccatggcaacctttgtctgctgctatcgcacagagccatcgttcctgctctgtaccacatgtcaccctccccgtgcttctctccgcgaagatctgctgccagcaaagtgcagagagctccacctgacatcatgcttgaggccaccaggccaccctggtggcatcggggtggtgtggttctagatgtgctactgacgatttgctccttcaggcttttaaaacatcattttgttgacttaagaaggtgaattttctcttaggacatgaactaagctcccccatccccccccagagaaaagccataatgagttgtcatggtgattcaggtgattcatggtgactcatttcattagaatgttcagagaatgaacacctgcgttccaacgcttcaagcagagggtagaatttagccggggaagctgcagtcacgcctgcttgtcaagcatcagaacagggaattgtgccttccaccaggcttttcatgttacatttccaatgagaatgggtgggacatgacaaacaaaatgtgtgtgggggcagatagggggacaggaggaaatcagggacaggaatgatggggtacataggagaagtgtaagtaaggtacaatgcctgctctcagggagcctgggtttcctgggatggctgatttagctttgccagccaaaattggtttctccccttctctctcctctggccaaggtttgtaaacctggcctaaaacaatgtctaaaatcattgctcatgaaaatatagcctgaaggaaataaagtacccattttagatgctgaattaagagacgcatatatctgtatatttgaacccatccattagtgctacagaaacatgaataaatgtatttatctttcaatattactgtcccaccaaaggatgtgggttggctcaaaagaataagtaaaagtagtgtcaaggcaaagtcaaaatgagaaatcagggtcaatgaagagagcatcaaatgttaagaagagaggttagcatttctacttaattattttattatatatttctctgtaaaaacctatcatgttataaactttttcagagtcaacaagaacctaccttcttttatttgccctttctaatgtcctttcatactggtcggtagatgggtttcttctacgacttacttaagagggaaggtgctcgctgcccctacctttctaggcccatggcaccctaaaaagcgcaggcgtgggctcactcctaaccgtgccctacctagctgctgatttggggcaagttagtgaacctctctgcacatctgtttccccacctgaagatgataaaacacaaaaatgggattatttttacaacttaaatgggataacatagcaggccctgaatccattagtttgccaggggttccctaacaaaataccactgactgggtggatcgaagaagaatttcttttctcacagtcccgaaggctgcaagtccaaaatcaaagtgtccacagggttggttctcctggggcctctctcctgggcttgcagatggccaccttctccctgtgtcctcacatggtcttccctctgtgcacccacatgtctgggggccacatttccccttctttttatttatttatttttttgagactgggtctcactctgtcgcccaggctggagtgcagtgttgtaattgcggctcactgcaacctccgcctcccaggctcaagtcatcctcccacctcagcctctcgagtagctgggactaccaggcacgccaccatgcctggctaatttttgtatttttatagatacagggtttcggtatgttgcccaggctggtctcgaactccggggctcaagtgatcgaccctcctctgcctcccaaagtgctgggattataggcaaatttcatattatcagaaacatgtcagattggattagagcccagccatgtgaccccattttcttctaattacctctctaaaaagcctatctccaaatatggtcacatctgaggtcctgggggttagggcttcaacacatgaatttttggggacacaattcagcccgtgtcattaggaatcaaaagaaaccctttaaggcatctcttagtctcaaggaaaatgcacccctattttataaacaaatgcaaatcgctctgtccgagtgaatatgaacgcagagtcaggcttgcatgctggtgccctgggccgttctcctctgatagagacaggagcagtcgtcctaggccaggctgggggcagtccatgaggagaagctctcacaatacctggcgcagggaagtggtcagaaatgttagctgctgctgttacacaaaatagacccaccaatggcaaactcataccaacagctgaagtggtggtctcaggtgtcaaaaatattagttttctcctaagcaaaggagagtgaattttgccatttcagactcatattttaagaaaactatggacacaaaacaatatgtcttccaatagtgtaggtaccaatgccttcgctatgtttgggatttcatttggaccttctcttgaatttagggaagtgccagtgaagccaccctggtggccctgctggccgctcggaccaaagtgatccatcggctgcaggcagcgtccccagagctcacacaggccgctatcatggagaagctggtggcttactcatccgatcaggtgagtgtgttgtgggggtatcagccaagacttcaagacccgaatgtttggttttatgtcaaattcaaaccaaaccaaacagcatccttccaaatctaagaacagttcctcaggtatcactaaatagagacctgaactacagggaaggggtggattcttgggtgggaactggatagatcaagttaagaaggaaataaatgtgtggagacatcaccgcgactggctctgtcaccttttctaccagtgcggacttctgttgtgattatctggccttctgagcaccattgcagagaaactagatatggggatcaaagtcctcggccctaactgcagctttgttattctgtgatctcaggcccctgggtagcgtcaagcaggagacagtggcggtgggggctgcagggcaaaaggtggccggctttcatgagaattgcctttcctgagaatctctgagacaggatggatctgccacagtggtgatgcctcctggctggtttctttcctccaggtactgtttactgagcctggccaccaagctccccaaggctccacagtcaggggcagggcacagatttgagcctaggatttctaagtccacctctgggatctactttccagggtctcgccacttatccttgagttcaaacaaatgaaaaacttcataaatattgacccagcactttacccttgttagtgcctgatactttaaacttaaaagcaagattccacaggaacagaaacaactccaggaaaaaaggggtctcatgaaggtgcaggggagagggagcagtcaggagcagttctgcctcctgtgccgttaagagggaccttgtgtttgcaatgttggctgctctctgccgatccagggcctggtaataactgcatgcacacacctgtacaaatccaactctgctgtcttctttccaggcacactcctcagtggaaagagctgggttaattggtggagtgaaattaaaagccatcccctcagatggcaacttcgccatgcgtgcgtctgccctgcaggaagccctggagagagacaaagcggctggcctgattcctttctttgtaagttcggcagcacttgtggctcctggccaataaggtgaaactccgtctctactaaaaatacaaaaaaaaattagccgggcatggtggcgcattcttgtaatcccagctactcgggaagctgaggcaggagaatggcgtgaacccgggaggcggaggttgcagtgagccgagatcgcgccgctgcactccagcctgtgtgacagagcaagactctgtctcaaaaaaaattaatctttgagaaacgctttttacctccatttttttttttgttttgtcaattcaagtcaattccacagtgtaatgtggaagaactgacatggctcaaagttagcacgcagagcaaggtgacagccaagacattttgaaggatgcaaaaagagtctgccagtggatcaaggtgtacctgccatcttatcccaaaagtcttatctttctccgttgcgttcatctccacaggccatacaggtttgttcctatatgtgtttactgcttccttcttcccaacagaatgtgcggggaggtaaggtccatttgaatccctgccttatccctagctcctgaaacagtgcctggcactgaacagaagctcgataaatatttgtcaaacaaataaagatttggaagaaagatcattcaggtagaaagaaagatctcccttaaaattcccacaaacaatttcagtacaatttgaatagattctatttaaataaggtgaatttctttgaacctatagtgtcaatattaagactcagaatactctgtctagggaaaaataaatctgtcaaaacacactcttttaggtttcaggaatgaaaacaatgcaggaaacatcacttaaaatgttaagattgtattttacaaaaatttcaaaactcatgaaataaaaagacaaatgctggcaagaaccacttatagcatatgtcgtaaagtaaatcttaaaaagaaggcttacatatcagtaagcaaaaaggcaacattccagtgggaaaacatgcgaaatatatgaagtcagtttcatatataaccacaaaaaactaagaacacaaaaccgattctgatcctctaataaccaaagaaatgcaaattagttgccgagagaggtatgttaaaaatctcacactatgagtgtagatatgtctatttccacttttatatctgttaaattgtgtacatattttgaagcatattaatttggtgcatacacatttagaattgtcatatctccctggtgaatgatcgtttatcactaggagatgccctttatatctctagtaatgcattttgtcctgcagcctactttgtctgacattgctataattacatatgttttctattggctaatgtttgcatgatatagacattttccattctactttcaacctccctgttcatttatatttaagatgtatcctgtgaaagcagcattgattgttgctattttaaaaatttgtttttaaaatccagtgtgacgattgatatttattttgttcatttacactcaaggtagttattgatacatttaaatgttatctgctgtctatttgttttttatttggctcaactattatatgattgcttttctctatgttcttgcctcttcttggattaattatttcatattattccattttcttatctctgcattttcttatttccattcggcatcttttcttttagtctgtagaattccctttagaaatttttagtgtgaatttgatataatgaattatctcagttttgttaatctgaaagtgtctttactgtgccttcacttttggaagatattttttctgggtatagaattctagagtgtttggtagctagttttatttttggtactttgtataagtccattgaattctttcttccatgatttctgttgagatgtcagttgtaattttaatgttgtgatgatgaagaacatacaaaaatatgacatttccttctgtgccgccaatggaggtgctgcttgctttttgtctttgttttactgtgatacaaggataattttctttttatttactcttcttggatttcacagaacttcctgaatctgtaatttggtgtctctcctcggttttggaaaattctaacctattatcttcccaaagtttgcctctcctcatttcctctctcctcccattctgggactctgattatgtatatgttaaatctttctgcagactgccatatatctcttatgcccttttacatgtctcactttctttttttttttaatctccatgcttcatcaacttatttacaatttaccaattaatctctttagctatgcctagctgataaatatgtcatgctcataattctaaacattaaaaaattttaacttattttattttattttatttttttgagacagagtctcactctatcacccaggttggagtgcagtgatgcaatcttggctcactgcaacatctgcctcccaggttcaagtaagtctcctacctcagcctcccaagtagctgggattacaggtgtgtaccaccacgcctggctaatttttgtatttctagtggagacggggtctcatcatgttggccaagctggtctcgaacccctgactgcaggtgatctgcctgcctcggccttccaaagtgctgggattacaggagtgagccactgtgcctggccaactttttattttgaaataatcgtagattcatagaaaattacaaagttagcacaaagaaattctgcgtactaacccttcacccaatttcccctaattgttccaacttttataactatagtaccatatcaaagacaggagactgacactggttcattgtgtgtgtataggtctatgtcatttatcacaagtgttgattcatgcagccaccatgccaatgagaatactgaaatcctctagcaccacaaaggtctgcctctgctactccctgatagtcactctcaccttcctgatctcctaccatcatcaacccttggcaatcactgatatgttttctacctctacactcttgtcattttgagaatgttatataaatggaattatacaatatgtgacatttcaagatcagcttttctcactcagcataatggccttgagatccatccaagttgttgcatgtatcaatagtatgttccttttcgttgctgcaccacagagatttggtaccatgttatctatactacagtttgtttacccattcacctgttgaggggcattgtagttgtttccatattttggctattacaaataatgcatccaggaacattaatgtataggtgtttgggtggacatatactttcatttctctgggataaatgcctaagagtgcaattaagggtcctatggtagttgttacatttaatttttttaacaaagaaactgacaaggtattttccagagtgactgtattattttacatttccattatcaatgcttgagaaaatcaggctctttatacatccttaccagcatttggtattgtcactattttttattttatccattttgatagatatgcattaatatgttatcatggtcctaatttgcagttccctgataactaatgaacatcttttcatgtgcttattcactatctatatgtcctcgtcaatgacatgtgtctttatgtcttttgcccattttctaattggatgatggattgattttttaaatgaataagcttaattttgttagagttgttttaggcttacagaaaaataagtaggaagaacatataccttcttatatcccaaccttcatttcccccattattagcatcctgcagtagtgtgatacatttattaaaattgattcaccaatacataacatccataatttaccttaggggtcactatttctattgaattttctatatgttttaacaagtgtataatgacaagtatctaccatttcagtgttacacagaatagtttcactgccataaaaatcccctgtgctccacctgtttatccctctctccctccacttgaaccactggcagccactaatctttttggctgtctccatcatttgttcttttttagaatgtcatacagatagaatcatacaatatgtagccttttcagattgacttatttcactaacatgtatttaagtttcctccatgtctttttgtactagtttatttctttttattgttgaatgctgttttctgatatgaacacgccacaattcatttatgcatttatctattgaaggacatcttgtttgcttccaagttttgacagttattaatgaagtgctataagcatttgtgtgcaggtttttgtgtgtacataagttttcaactcatttgggtaaataccaaggatcacaattgctggatcgtatggtaagagtgtgcttaaagttttataaggaaaggctgaactgtgtttcaaagagactgtaccattttgcattcccacaatgaatgttagtgtaggttttccaatatctttgtcagctgttaatttttttcagtgttttttattttatccattctaatagatgtgtagtggtatcttattgttattttacttgaaaattctgtaataacatatgatgttgagcattatttcatgtgcttatttgctacatgaacatcttctttggtaagatgtctgttcaggtcttttgcccactttttaattggattgtttcattattattgagttttaagagttctttgtgtattttgggtagcaaacctttatcaagatatatgttttgccaatgttttctgccagtctttagcttgtcatttcatcctttaaacaatgtcttttgcagagcagaagttttaattacaatgaagtccagattatcaattacttctttcatggatcatgtttttggtgtggtctccaaaaattcatcatcaatcctaaggtcatctaggttttctcctatattatcttctcggaaatttatagttttgtactttaaaacattaaaatagatgtaggtctatgatctattttcagttaatttttgtgaaaggtgtaaggtctatgtctagattcattttttgcatgtagatgttgatatggtttggctctgtgtcccaacccgaatccatgtggaattgtaatcctcagtgttaggggaaggacctggtggaaggtgattggatcatggggatggatttctcccttgctgttctcatgatagtgagtgaattctcatgagatccggctgtttaaacagtgtgtagcacctctccctttgctctctcttgctggcaatatgaagatgtgcttgcttccccttcaccttctgccatgattgtaagtttccggaggcccccccagccatgcttcctgtatagccagtggaactatgaaccaatagttcctttctttgtaatggaacaataaacctcctttctttataaattacccagtctcaggaagttctttatagcaatgtgagaatggactaatgcagatgttcagttgttccagcaccttttgttgaatactacacttcctccattgaattgcttttgttcctttgtcaaagatcagttgacttcatttgtgcggatctatttctgttcaactcatttatttgtctcttcctttgccaataccatattgtcttgatttatagctttctactaagtcttgaatttgggtagtgtcatgtcagatctcaaacactgttgtttaatattatgttgactattctaggtcctttgcctcttcatataagcattagaatcagtttagcaaaatgcacaaaataactttctgggactttatataggattgcattgaatttacgcattttgttgaaataactgacatcttgatgatattgagacttcctatccatgtatgtgaaatatgcctacatttatttagatcttttaaaaaattttcttcattagagtattgtagttttcctcatataaagctcattcttttttttttctttttactttttttggtgctaatgggaatggtttttattttattttcaaatttcatttttttaattgctggatgataagaaaacaattaacttttatctaatattatcattttatcctacagcttgccataattgtttacttagttctgggagagttttgtttttgtttattctttgggatttctacacagataaccatgtcatctgcaaagatactttttttctttccttccaatctgtatatctcttatttcctcttcttgtcttattgcattagctgaaactctcagtacaatgttgataggagtagtaagaacagacatccttgcctcattcctgatcttcgtaggaaaacatctagtttttcatcatcaagtatgatgttaagagtaggtttttcattcatcaagtatgatgttaagagtagatgtcattcatcaagttgaggatgttctgctcgaatcctagtttgctaggagtttttattatgaacaagtgttgaattttgtcaaacacttttctgtatctatttacataatcatgagattcttgtccttcagcctgttgaaatgatagattatattaatttatttttctatgttgaatcagccttccatcctggaatagatctcacttggttctgatatataattttttttacattgttggattcaatttgctaatattttgttgagaatttttgcatctctatttatgagagatattgttctatagttttccttcttgcaatgtctttgtaatactggtctcatagaatgagtcagaaagtattccttttgcttctattttctgtaagtaatccttacttccttaaatgtttggcagaactcagcagtgaattcaattggcatggtttctttgttttagaaggtttttaattattgatctaattttaaaatagatgtagcaccattgaggttatctctttctctttgtctgagttttggcaaattgtatccttcaaaaagttggtctattttatttaggtttttgaatttgtggccttggaatccattttgtttctttattatctttttaatgtccataggattagtaatgatggttctactttcctttctgatattagcaatgtgtgtcttttttcttaacctgtataaatgtttgaaaatttatttatcatttcaaagagtcagcttttttctttatttcctatttccaatttcattgatttctgctctaattcttattatttcttttcttttcttctgcttacattgcatttatttatttatttatttatttatttatttatttatttattttctgagacagagtcttactctgttgcctaggctggaatgcagtggcacaacctccacctcccaggttcaagcaattctcctgcctcagcctcttgagtatctgggactacaggcatgcatcaccatacccagctaatttttgtatttttagtagagatgggatttcaccatgttggtcaggctggccttgaactcctgacctcaggtgatccgcctgcctcggcctcccaaagtgctgggattacaggcatgagccactgcacctggccacattgcatttaaattgcctttttttctaggttattaaggtggaagcttagattatagattttagatttcccttcttttctaatgtactcattcagttctgtaaatttccctttaagtactgtttcactgcatcccacaaattttgatgagttttattgtcattttcattgaagtacttttaaatttttcttgagacttctcctttgaccttaaaatgtgttgtttgatctctaagagttttcgggtcttccagctatctttttattattgatttctaatttaattccaatgcagtctgagagcatactttgtataatgtccattattttaaatttgttgagatgtattttatggcttggaatgtggtatatcttggtgaatgttgattgtgagcgtgagaaagaaaatatattctgctgtcattggatgaaatattttacaaatattgatttgatccagttaattgatggtacttttccattcaattatatccttacctattttctgactgctggacctgtccatttctgacaaaggggtgacaaagtctccaactataagagtgagtttatctgtttctccttagagttctatcactaataatatagtaactgtgaaaagtagattctcgcccatcttcaggatttactggtttttgtttgtttgtttgtttgttttggttttgattgttgtagactacctctgtgctgaaaattggccttaggtgtaaactttttttcccccataagttattagggtacaggtggtatttggttacatgagtaaattcctttagtggtgatttgtgagattttggtgcacccataaactgagcagtatacactgcaccacatttgtagtcttttattcctcacccccgctcccactcttccccccaagtccccaaagcccattgtatcattctcatgcctttgtgtcttcatagcttagctcccacatatcagtgagaacctacaatgtttggttttccattcctgagctacttcacttagaatgtgtccaatcttatccaggtcactgcgaatgctgttaattcattactttttatggctgagtagtattccattgtatgtatatataccacagtttctttatttattcgttgattgatgggcatttggttggttccacgattttgcaattgtgaattgtgctgctttaaacatgcatgtgcaagtatctctttctaataatgacttattttcctctgggtagatacccagtagtgggattgctggatcaaatggtagttctacttttagttcttttaggaatctccacacagatttccatagtggctatactagtttacattcctaccagcagtgtagaagtgttcctggatcaccacatccatgccaacatctaatgtttttgattttttgattatggctattcttgcaggagtaaggtggtattgcattgtggttttgatttgcatttccctgattattagtgatgttgagcattttttttatatgtttgttggccatttgtatatcttcttttgagaattgtctattcatgtccttagcccagtttttgatgggattgtttgtttatcgtgttactgatttgtttgagttcattgtagattctagatattagtcctttgtcagatgtatagattgtgaagatttcctcccactctgtgggttgtctgtttaccctgctgactgttccttttgccatgcaaatgctctttagtttaattaggtcccagccatttatctctgtttttattgcatttgcttttgggttcttgttcatgaaatccttgcctaagccaatgtctacaagggtttttccaatgttatcttctagaatttttatagtttcaggtcttaggtttaagtcctcaatccatcttgagttgatttttgtataaggtgagagatgaggatgcggtttcattctcctacatgtggctagccaattatcccagcaacattagttgaaaagggtgtcctttcccccactttatgtttttgtttgctttgttgaagatcagttggttgtaagtattggatttatttctgggttctctattctgttccattggtctatgtgcctatttttataccagtaccatgctgttctggtgactatggccttatagtatagtttgaaatcaggtagtgtgatgcctccagatttgttctttttgcttagtcttgctttgactatgctggctcttttttggtttcatatgaattttagaattgtttttttctatttctgtgaagaatgatggtggtattttgatggggattgcattgcatttgtagattgcttttggtagtatggtcattttcacaatattgattctacccattaatgagcatggaatgtgtttccatttgtttgtgtcatctatgatttctttttttttttttttgagatggagtctcgctctgtcacccagggtggagtgcagtggcatgatcttggctcactgcaaccttcacatttccaggttcatgccattctcctgcctcagcctcctgagtagctgggactacaggcacttgccaccacgcctggctaatttttttgtattttttagtagagatggggtttcaccatgttcgccagcatcttcttgatctcctgaacttgtgatccgcccatctcagcctcccaaagtgctgggattacaagtgtgagccaccaggcccggccccatctatgatttctttcagcaatgttttgtagttctcctggtagaggtcttcaactccttggttaggtatattcctaaggtttttttttttttttttttttagctattataaaagtgttcttgatttgattctcagtttggttgctgttggtgtatagaagagctactgacttgtgtacattaatcttgtatccagaaactttgctgaattcttttatcagttttaggagctttctggaggagtctttaggattttcaaggcaagcaatcatattggcagcaaacagtgacaatctgacttcctctttactgatttggatgccctttatttctttctcttgtctgattgctgtggctaggatttccagtactatgttgtaaagaagtggtgagagtgggtaaccttgtcatgttccagttctcagagggaatgctttcaacttttccccattcagtattatgttggctgtgggtttgctgtagatggattttattatattaaggtatgtccctttatgccaattttgctgaaagttttaatcataaaggaatactgggttttgtcagatgctttttctgcatctgcatctattgagatgatcatgtgatttttgtttttaattctctttctgtggtgtatcacatttatttacttgtatacattaaaccatccctgcatccctggtatgaaacccacttgatcatggtggattatctttatgatatatttttggatttggttagctattattttgttaaggattttagcatttatgttcatcaaggatatctgtctgtagttttcttttttggttatgtcctttcctggttttggtgttagggtgattctgacttcatagaatgaattagggagggtttttctttatcttctgtaatagtgtcaaaaggattggtaccaattctttgaatgtctggtagaattctgctgtgaatctgtctcgtcttggactttttttgttggtaatttttaaattaccacttcaatctcactgcttgttgttggtctgttgagggtatctaattcttcctgatttaagctaggagggttgtatttttccaggaatttctccatgtcttaagggttttctagtttatgtgcataaatgtgctcatagtagccttgaatgatcttttgtatttcagtggtgttacttgtaatatctcctgtttcgtttcttagtgaggttatttggattctctgtcttcttttcttggttaatcttgctaatggtctatcaattttatttaacttttcaaagaaatcagctttttgtttcatttatcttttgtattttttttttgtttcaatttcatttagttctgctctgatcttggttatttcctttcttctgctgagtttgggtttcatttttttcttgtttctctagttccttgaggtgtgtccttagaatgtcagtttgtgctctttcagtcttttcaatgaggtgtttagggctataaattttcctcttagcatcccctttgctgtatcccagaggttttggtaggttgtgtcgttactgttgttctgtttgaagaatttttaaatttccatcttgattttgtttttgagccagtgctcattcaggtgcagtttatttaatttccatgtatttgcatggttttgaaagttcctcttggagataatttccagttttattccactgtggtctgagagagtgcctgatataatttcagttttcttaagtttattgatgtttgttttatggcctattatatggtctatcttggagaaagttccatgcgctgttgaacggaatgtgtattctgtggttgttggatgaaatattctgtatatacctgttaagtccatttgttccaggatatagtttaaatccattgtttctttgttgactttctgtcttgatgacctgtctagtgctgtcagtggagtactaaagtctcccactattattgtgttgctgtctatctcatttcttaggtctagtagtaattgtttgatcaatttgggaactctagtaataggcacatatatatgtaggattacaatattttcctgttggacaatgccttttaccattatataacgtccctctttgtctcttacaactgctgttgccttaaagtttgttttgtctgatataagaatagctacccctgcttacttttggtgtccatttgcatgaaatgcctttttccaccccttaagtttatgtgagtccttatgcgttaggtgaatctcctgaaggcagcagatggttggtgagttattatccattctgtggatctgtatcttttaggtggagcatttaggtcatttacattcaattttggtattgaaatatgaggtacccttgcattcatcatgctctttgttgcctgtgtactttttttgtttgtttgttttttgtttttgctttttaacttgtatttttgctttataggtcctgtgtcatttatgctttaaagaggttctattttgatgtgtttccaggatttgttttaagatttagagctccttttagcagttcttgtagtggtggcttggtaatggtgaattctctcagcatttgtttgtctgaaaaggactgtatctttccttcatatatgatgcttagttcagctggatacaaaattcttggctgacaattgttttgtttgaggaggctgaagatagggtcccaatcccttctggcttgtagggtttctgctgagaaatctgctgttaatctgataggttttctttgtaggtaacctggtgcttctgtctcacagcttttaagattctttctttcatcttaactttggataatctgatgtgcctaggtgaagatctttttgccatgaatttcctaagggttgtttgtgcttcttgtatttggatggctgggtctctagccaggtcggggaaattttcctcaattactcccccaaatatgttttccaaccttttagaattctcttcttcctcgggaacactgattattcttaggttcaacataatcccagacttcttggaggctttgttcatattttcttattcttttttctttatctttgttggattgcgttaattcaaagaccttgtcttcgagctctgaatttctttcttctacttgttcaattctattgctgagactttccagagcatttcacatttctaaaagtgtgtccaaagtttcaagctctgaatttctttcttctacttgttcaattctattgctgagactttccagagcattccacatttctaaaagtgtgtccaaagtttcctgaagttttgattgctttttctttatgcatctatttccttgaatatttctcctcttacttcttgtattgttttgtggattttcttgcattgggctctgcctttctctggtgcttccccgattagcttaataactaaccttctgaattatttttcaggtaaatcagggattttttcttggtttggatccattgctggtgaactagtgtgatttttttggggggtgttgaaaagccatgtgttgtcatattaccggggttggtttcctggttctttctcatttgtgtaggctctgtcagggggaatatctagggctgaagactgttgttcagattcttttgtcccacagggtgttcccttgatgtagtactctcccctttttcctatggatgtggcttcctgtgagctgaactgcagtgattgttgtctcttttctgggtctggccacccaggcagtctacccagctctgggctggtaccaggggttatctgcacagagtccttcagtgtgaactatttatgggtctctcagccatggataccagcacctgttctggtggaggtgagttggggagggggtgcaatggactccgtgagggttcttagcgttggtggtttaatgctctgattttgtgctggttggccttctgcaggaggtagtgctttccagagagcatcagctgtagtagtatggagagggcccagtggtgggcagggccctacaactcccaagattatatgccctttgtctttcgctactagggtgggtagggaccgaccaccaggcgggggtggggctaggcatgtctgggctcaggctttccttgggtgggtcttgctgcggctgctgtgggggatgggggtgagagtcctaggtcactggagttgtgtacctaggaggattatggctgcctctgctgagtcatgcaggttgtcagagaagtagggaaagccagcagtcacagccctcacccagctcccacacaaaccgaagggcctgtctccctcccaccgtgcccctgccaagagccccaagtctgtttctgggcatgggcgagaggggcttaaaaacttgccccaggctacctacttcccagctatgaaagaaaagggcttggtttttcccctccctctggagcctgcacaccggatttgcaccgtccccgagttctggccaggaggcttctcatccgttcgaactgttacaatgttcagctggagatttccttctccctgtgaagttttacccactgctcctctggctgccttcccaatggatccctgtggtgccagcaggaatgacctgcttgggaacccagtgagttcccagtgcctttctgctgcttcctctacccctgtattttgctcgactgtctaaattgactcagatccaggtaaagtcggaaacttctcccgcaacagaccttcactttctctagtgggggtgtgtgttcaggagaggagggtctccctttcccgcttctgcagctggggcactcacagtacttagggtgcctcctgagacctgcaggagcatttcacttccttcacagagtctgtgggtcctctcgggattgctggtttgttcttgcagtcaacctggagctaaaattcacaaatgtgagcctccacacgctgctctgtccagtgctgcaatctcaatctagtcctgcctcccatatgccatgatgattggccttaggtataaatgtaaggttctttcagttattttctgagcctgtgtcttttctgggtatgtgtgatgactttctaatttcccctacataggtgttagtctttgaatatccaagtcttcacactgtctgtatccttaaaaagggaaaagaggaaaataaggggggaaaaaggcactggccctttttatcccccagaagtcacttcagttggataaggtgggtcttgcagcaatgggcagggtgtacaacaatggccaccacctctttgcacctgtgactgggatcagtaatcaacaatcaacaatcaaagtgcagactcccaatatttggaggacagttccctttttctcactttggctcttgcaagctctgtgcaagctgctccagggacacatgctcagctatgtgccatgggcctgggggtggtggatgggtaggtactactgtactagagctaaaattgaccaaaattaactgtattttcctgtccaacccttatattgaagttgcaagccttcaatagaccccagagtttcaaaataattgcatcaaacagattctgccagtaggtaaaagttttgtttagctgggagacagatttcctggtgcttcctactccttcatctcctctttaccctatatctgtaatgctcttttttatccctgacaattttctttaacaattttcttgatccactttgtctaaaattaatatagctattccagctttattttcattggtgttagcatggtatatttttctacatcgctatacctttaatctgtatcttgacatttaaagtgcatttcttatacagaaaatatagttgggtcttgttttcttacccattctgacagtctgtgtgctttattttatttttaattattttaattttaattttttatttcaataggcttttgtggaataggtggtgtttggttttgtggataagttttttagtggtgatttatgagattttggtgcacccattacccttttcaattagtgcatttagaccattgatatttaaaataattattgatgtagttggataaatatctacaatatttattaccttttcctatttgctgctcttattctttgtttcatttttggtcttctattctttgccttctcttgttttaactgagcattttatagaattccatcttttcttctctcttagtatgtgaatcaattttttttctttttctttttttctttttgagatggagtctcgctctgtcgcccaggctggagtgcagtggcgcgatcttggctcactgcaacctctgcctcccagattcaagcaattctcctgccccagcctcccaagtagctgggactacaggcgtgtgccaccatgcctggctaatttttttgtatttttagtagagacacggtttcaccgtgttagccgggatggcctcaatctcctgaccttgtgatctgcctgcctcggcctcccaaagtgttggccaggctagtctcgaaatcctgacctcaagtgatccatctgccttggcctcccaaagtgttggggttacaagcatgagccaccatgcctagtcagattttctttctttacatcaaatattacaagcatttttttcaggtcattatatatattatataaaagtataattttgttaaaaaaagtcgcatagtactctattatatctctatctttcccagctatctctctcatatatacatatatgtacacacatacatataacataaataaatataaatgtaatttatttaataggaattcacatatatgtacatatatgtatgtatttgtattttatgtattcataaaattcatattttatgaactcctattaaataaattatatattattttgtgtgtgtgtgtgtgtgtgtgtgtgtgtgtgtatagatatatcctaatatcctagcaataagctagtgttaaacagttgagtttttttttttttttttttttttgagacagagtctcgctctttcgcccaggccggagtgcagtggcgctatctcggctcactgcaaactccacctcccaggttcatgccatcctcctgcctcagcctcctgagtagctgggactacaggcgcccaccaccgcgcccagctaattttttgtatttttagtagagacggggttttaccgtgttagccaggatggtctcgatctcctgacctcgtgatccgcccgccttggcctcccaaagtgctgtgattacaggcgtgagccaccgtgccctgccatcttacttacatttttttttttttttttttgagatggagtctcactctgtcacccaggctggagtgcagtgatgtgatctcagctcactgcaaccactgctacttaggttcaagtgattctcctgcctcagcctcccaaatagctagaattacagatgtgcaccaccacacctggctaatttttgtatttttggtagagatgaggtttcaccatgttggtcagactggtcttaaactcctgacctcaagtgatctgccagccttggcctcccaaagtgctgggattataggcataagccacagcacccggcctacttacattctttcttgtagtaattggtgcacttaaaaattttattcatttacttatttacttatctataatagcttatgtaaacaaagtaaataagtaagatacataagtggccaggtgcggtggctcacacctgtaatctcagcactttgggaggccaaggtgggcggatcatgaggtcaggagatcgagaccatcctggctaacacggtgaaaccccttctctactgaaaatacaaaaacaaaattagccgggcatggtggcagtcacctgtagtcccagctacttgggaagctgagatgagagaatggcctgaaccccgggaggcggagcttgcagtgagctgagatggcaccacttcactccagcctgggcagcagagtgagactccgtctcaaaaaaaaaaagatacgtaagtatcttatataagtaagataagtaaatgagaaaatttacttatcagaatttcttgggaatgatttatagccctgaaattacttaatgaaagagatgggttttttttccccaagactttgatacatactctcacattctacttcaaaaacattgtaccaatttataccaaaagtttctttataaagagttattaaacataaaagtcatgttaaaatagtgacttctactgaaagaaatgtaatggtgaaattgctggaagtgccaagtaatacaggcactaagaaatgactcattcattcattcattcattcatttgctaagaggaagtaatttacgattttcttaggagtttatttactagagtgtctgtgggtgaaattcagattccactgggcaaatgaggaaatgaaaaatgtgggaatggattcctttataaagaagtttgcctgtgaaggaaagaagagtaaatagtgccattgctggagcaagttgggccgagggagatgtgctgagagagagatttatctgtgcatgtgaaggagctggtggaggaggcagaagcacgaaagagaagactacacatttcattaagagaaacaaaatcaaattttattttctttgaggaagatggaaggaccaaattaatatgcctctgttggaattttgccctaaagaccaaaattccagaacattctgctgatagaagccacagatgtgggccaattgtaggtatcggatcagagaggagaatcacttttttgccgtagactgccccatgcaccggcaccgtaccagccctggaggtgtgtggcgagccatggtccctttcctcatggcatggttcttggtggggaagacaggtatgttcccatctccacgccatttgatgagaacaatgcatatatacatgggtagagggcgcaaataaacttcctagaggggatttggaaagcctgttgctgagagagaacacaggagctgtgtcaggggatatccaggcaggtacttctgggcatggtgcctttcttgttggagggaagagggctgcagcgtacagagatcagaaaagcacaggacattccaggaaatgcaccttgtttgttgtctttaactggcagccaaaggattgtaaagctggagagagtctgggccctcataggagaggggttggagcctgagccttgtctcactgcccagctgtgcccttgtggttataactgggcatgtgcataatgactatatgcgtccttctgggatgtagccacatggtcttcattatattctcaaaggggctgtagatcccttaaaattgaagacttgctgctgagggcaaggggcacatttggcagggtttgaaccagaaaagctgaatcattgcccttccatgaacaggcttggggcttgtaataaagtttccccttgtttctcaggacagcttgcttccctaatgagccagcttgataaggtcgggccacagagggcgatgcctgcgaggcacttacgtgagcacagagggctagtcgaaggggcaaggatgcagaagagaaggttgtgctgggctctgccactgcaggaagactgtgggctctttgagatggaggcctgaactgtcccctacccctccttccccctgcacaaatgtgattatgcctctgcagagcgcctggaatcaggttagcgtcattgagcaatgctgagctggagtaatcagagcctggagcggagcaggtgctggctttaaagtggcttctgagaattaggacaggctgacttgtagctcagccccacgtagacaagccacttagaacactgtccttgcagcccccaggcctcctccttaccacagcaaagtgcttgggtttgttggaggggcctctggcatggcccaggtgctgagctcgttaactgatgttcagggactggtgtcccaggggtcctgtttgcccagcatgtggcaggacaacaagagctaaccaagcctggggtcacatttggtctgctcctgcctatctgggtgtcctgggacaattacccacctcttggagcctcacataagtcaactgtaaagtgggaatcacgagcatatctaactcataaggtggtggcaattaaatatcatataggaaaggctgtcagcattaggcctgctgcagagttagccgcaaagaacatcacccctattctcaacctaggccactgccaggacaaggccgggttttattgtttctgcaaagatgtttcatactcagaacaaaaaaaatcagtaattacataagaatctaagaataaaggtttatgttaaccaaaatcttaagagaaatgcagtattactgtttggtgaacatcactctagatactcttctatgcacacattaatagagagaaaataattttaataagggcacatttaataaatttttaataatagaagttattggctgggcatggtggctctccccagtaatcccaacactttgggagaccgaggtgggtgaatcacctgaggtcagaagttagagaccagcctagccaacatggtgaaaccccgtctctactaaaaatacaaaaaattagctggatgtggtgcctgtaatcccagctactcgggagactgaggcaggagaatcacttgaacccaggaggtggaggttgcagtgagctgagatcgcaccactgcactccagcctcgacaaaaagagtgaaactccatctcaaaaaaaaaaagttattgcatttagtttagtgtttaactgaagaaagtcagatgaaacagaaggaattgctaaactagagatatgtcatttctaagatatgactctgggagttgagaaaataagtttcaagcaatattaatattgttaagtcattctttttcgctattctcttaaggataaagataaggcattctaagactctcatgctctacaaactgagtagccaggtgtcttagacaaagtgctttaacattcaattatatgtcaagatgaaattgcaaatagcagagaaaaacaacacactgacttcaattcccactaaatgacttatcttgccaaaatgaaacaaatgcggagaattattgatgcttgacatgaggaggggacatccagaggttaagaaaggatgctgacagcaccaggagaaacattgaggtatgcaagatgttagcccgttggcacctgatagaccgggcaggtctgtaagtgcaatacgttgctttgtaggtaagaaaaataaagcccagccaggtgccaatgtgacatggagttgggcctccagcccaggtctctgtgccccacatacatggtttaactatctgtattcactgtgcctttttactatctgtgcttctgatgctgtgacacctttgggtcttgctgaccctggagggactgcccttctcagggagaggggtttcctagagctcttaaaggactcacttgcaagttcacctttcttttcttttcttttttattataagttctagggtacatgtgcacaacgtgcaggtttgtacatatgtatacatgtgccaggttggtgtgctgcacccattaactcgtcatttacattaggtgtatctcctaatgctatccctccccactcctgccaccccatgacaggccccggtgtgtggaactcaaacaaatttgtaaaaaaaaagcaaattcacctttgaaatgcaaaatcatcagtacagagctcctaccccagcatctcctctgtggggctctcacactctgggctactatcctcctgccctgaccactcaagggctaggtaccagacatctagggacagccactgctccaaatgtgacctggagcagaccaaatgcgaccccagagcccactgaaattattcaaaccagccgatcctaatcctgctcacccttgccctgcctggttcttcctgtggaaaccacaacacaggcccttgccgctgtttttcccccacccctctgctgcccaactgatcctcgtgcttccccatgtccccctccccttggggactgtgaggaacaagctgtttttaatggcagtcatctcctgacttgttgggctcaccatcctgaacaagaagaaagcctacatttaaacagactgcccctcctgcgcctgagggtagccccttgggggactgactcccttgggcatagctcagtgacacagagagcccttccagagtccagccaggacctgttttgggcccacgccccggggtttggcatggaaaactctggtccctgagcaggcatcgctctgtctgagaagtaccttgtccagcccagccacctgtgagaggagcagggcaaagctggtgagacgaaccttctgcaggctgactctgtgctacctgggcatgaacactttgtctctctctaaaaggaaaagttggtttccaggtgaaatgcgaggcagtcataggtgaaatggagccacaaaggtctcgaactggggttctcacatacgagtttctgacctctctatctttatcctcaggacacatggcattgctaagactttacagggggctcaataaaggtcacacaaatttaattctattccacactcttgtcgcatctgcaaagaaatttcattatctagactgcatgacatccataaatcaattaggccctttggttttgtaaacataatgtgcgttttgatcctttggagagagctgtttcaattcagcaataggtttcagcatctatgcaatgtccagcaaagtgcaaatgctcagcccaacacaaaacaatgagacagggtccctggctttgggagcatcatgggtctggagggagagacagacatgtgtgtggggacaacacagtcaggctgtgccagtgcgatcgtggcaccacaaggtcctcagagctcgggagaggccgcagtgactcctagcccgtattttctgggttgtgtgactgacagcactcaatgctttctcagaacatcccttttaaaattattttcaatgtcagcagtgttttctcatgacctcctgaggatttaattaatctttgggaacagtatcattcagaaagagaaaggcagcggattaaagctggtaaatgatactcttgctcaaaatcctagtgtgactcttaactgatgccaaagtctgttctgaaagaagcattccatgagtgccttgggcagtctgggccctgctggagggagactcatctctactgcgcttgctctgctctgtgcattgcacatgtgtgtatgcacacacacacgtgcacacacacagacacacacacacccccccaaactaggaaaaaatcccaggcttctgctccatagtagtaactatgttcttacattctctatatatgtatatatatacacacacatatatatatagaaaataaaatatatacacttgtgtatattttaattataacttaattataaatttaattagattataattaaattaaaatgtatatatggaatataagaacatagttacactaatgttacatagaacgttaattaaaatttaacaaaaatatacacacatacatatatatgtatatttaataaagtagaatatagtatatgtatatttactaaagtagaatataggtatcattgtccaggtggtagattgcttcatgtctgccccaaggcaccctggaaaatcttttgcaacttcccggtttctaacctcagagcttagttttctgtctgcaaatctgtttctcttaacctgttatgatgctttcacccaaagattcaatgtgcatccatgggcttacgtttccatgtagcagacattcattgggatctcggctcatggccccaggttggaccatggggcagcagttgcttgtgtggaggttacagcggtgactggcacctggggaataaaaggctgtctgctttttaccctctagatggttgccaccctggggaccacaacatgctgctcctttgacaatctcttagaagtcggtcctatctgtaagtatccgattccattttctttttggaaaatgttctctgtacacggggaatttagcaaaccttcctcgttgatctctttcttgtcgttaacttcatattgtgatggtttgcccagctcttctcgtatttgcaataacacaaacctcattagcttgaactccacaaactcagaatttgggctaattggaaaagaactgagcttagttctaccaacacactatttgtaagaaaaaaaatccgagcaatatagaagttatgtaaaattgcaggttatgttggccctgttgaggagaataaactcttcaaaatcttagagtaaccaccttcatatgtgggtcgtgcatacacctgatatgagaattgtccacacttgaatttaattctttggtatatccctttttcacctttttttggaattactgaatgcagttaagaaaattgctgaaggtagtttagcaaatcaacacaatgaaactggatttcgccaaggaataatctgtgcttcagatgttttcctggtcactctcacctcctcccttcctcattcagagatcctaggttttctcattgagactaggatgctgtgttttcaaaaggtgaatgtgaatgagcagctctgtttctagagtttcacctttgacatgtagctctgggaactcagcaggccttgaagctgcttctgtggacagaagaaccctcgtagggcagggacactggctcagggggctccccctttctctgtccctctaggatgggaatgttctgaccgctcggctgtgagtggagctgcccaagtggggccttcagatcacatacctgtggcctgtgccagatcccacaacagctaccagggaattggcttcctccttagtctgcacaagccaagcacagttctcacctctcctaacccaagagtcacccatagtccatactcagaggagtggaccctcctctcctgggcgttggcctcccttcttggggtcagcagctggggaaggccggtgctgaaggtgcaggtgcctttgtgtgagctagacatgaaattggtgacaaggaagctagggtgcagcccaggatccacccctgaatcttacattctgagcttcatttatgctgtctgtaaagtgaagagaaaaaccccacttgtgctcataaaataacaagatttccccacacgattattcagaggataaattaatgcagggaaaatgcaccatcccaaaggtagagtgcattgctgcacagcaaggaatgcagtgctgggaactactgggaggtgggtggcatagacttacccgctctcacagggtttatgctccaccgtttatgctctgtggcacacagctgtaagaacaactggcgggaagtggtcgtgcacagccccgggctggggagaagggatagaactggctgactcaggactgcagccacagcattggcctcatcagctgcaaaccttcatcagctcagccaagcaacttggagtcctctgactcagatgtcaggctaagaactgaatgtcctggccagtagctggctgatgtaattccctagggctatcggatttaaagggccgaggtcttctgctggatagagcccacatggcctgctgtcccctgggccaagtgtgggctgcccgctggaccatggagatgacagccagcgtgtgtcacctgccagtcacagtcccctggatggatccagctcaggccttcctgctatctggggccccctcttctttgtagaggctggaggctgtgcacagagcttgatttatgatttgtttggtttgaaacactgaggttgcttttggggttgtgcagaaggagctgacatgggtgaatgccaaaaccctttcatccattggcagaatgcataggggaggtcagttttgacaattcctttttttttctttatttttgagatggagtcttgctctgtggcccaggctggagtggcacaatctcagctcactgcaacatctgcctcctgggttcaagtgattctcctgcctcagctttctgagtagctgggatcacaggcacatgccatcatgcctggctaatttttgtatttttattagagatggggtttcaccatattggccaggctggtctcagactcctgacctcagatgatatgcccgcctcagcctcccagtgtgatggaattacaggcgtaacccactgtgtccggccaacatttccatttttattgatggtgttatattactaactgttggtggtaccttaacaattaagtcagcacccttttacctactttccctctcctgctaccattttcctatcaccagatatttagcattctccaactccaagcgggactgttctgagatcctgagctgaccttattctatatatgattagaataatctaacataattcagataagttattcacccaccatcatttgacaaagaaaacaaatcagaagatggttttcttccaattgctgccttaggaaagacattttctttttattgcatttgaaatgatttgccagtgagggtattcagattggtctgcttggatggatcagttgtctggcaggttttactgagaagatggaatacaaaaagtggatagttgaagtcagttaggttgccgatggggaagtggggaaactgaggacgagggtatgggctgagttggggaggccatctcaaggtgtgaggaagggaatagcacagggcaggcagccaaagctgcatcctgaggtgccagcataactgagagaggacgtgcagctggaggggcagccaggcctgccgcaagttcctgggaagtctcagaaggaaagagtcactgacagcaggaagctggaggggtgtgagcctgtcccatccctccccactgaggcagccttgcctcagggctaggtgtgcccctggtgcatgcaacttctcaagctctggccgagggtctctgtgtctgcctggttcctagatgggccgtgctatgcagtgtgtgctgttagtggatcacatatgagatgcagaatgcagaatgcagaggcatgcccacagctccatgcatccccatggaaaccagagaagcccttcagagtccacttcctttaggggtctgtaagttcccttctgcaggagttgtaggccaactgcaagcttagagagaacacagtcctccacaaagctgataaaagacataaggcgtttcaaagctttgactcagtttaatcatcaggatgaaagccctcagttggattaaggtcaagtgtgtcctgcggacacggatatccaccccagggcatgggaggccaaaggtcacagagcagtgtggacctgaaccgaggcttaggggctcatcacttcccccagaatcagtctcacctggtgcttgcataaccccagatggatgcagcagtgagccaggaagagcacaaggccttaggatttgcagagtttctccctgaggagtcactcagtaatcatgggatgtccatgcctgtagctcagatcagcggtaaggttgagaaaaacctcagatcacatcataagataggtgtaaatttgaagcttgctgtagtctgaacgtttgtgtcccccgcaaagcccatttgctgaaattctaacctaaggtgatggtattggaggtggggccttccagtggtaatgaggtcagcacagtggagccctcctgattggaactgtgactaattagtgcccctgagagtctcacgcctcattgcacaatgagcaccatggatggtgagtgaacggtgaatccatggatccctacaaatgcatatgctgaccctgacacctaccccacggtaccctgacactggtatccaccctgtgaggtgagggtggctcgcgccctctctgtggtccttcacccttcaactcttactctcctgggtgcctagggctgagaggcagcaaccatggaagccacatttatttctcccctactcagtgctggggtcctggcaagcacattgtaaatattcccttgctcatcccttgggcctatgggtactatttcatctccatcttcctgggaggagagtgaggcttggagaagtagatagggccccttggctggggagcaactggaagcaggagttgagcccagatctgtcaaaattgagggagcatgctacatctgtggctctcccagctcctgaatgaggcagcccctgcccacaaggctgctatgcatggttggaaaacagaaccctgttcatgaagaaagcaggggatggtctaagatggtgtaaagtaaagaacttcacctggtggtggggatggagtggggcaggtagaggtcagcgtggactgtgtgcagacctccccttggatgatgtttgggggaggacttgagaatggattagcaaagggaaccaggaagggaattccaggtgggtggaaagggtggtgtcactggagagaaatgcaggtgagtaacatgaggctgtcacacgatggtcccttggagttacacttagccgccagggtcaggagagaaaaccaagtggtgcagtggcttccattttccctggtgtgtctggggccagcagcacacacactgccctcagctttagaccctttgaatgagggggccttttggggattcagccattagttcagcaaatactgttggcatgctctacccaagaaggtgctcagacagggcgaggtcagctggcaggctccgtggtgaggcatccatctggggactcacaagttgattctgaactttaggcaacaaggaagacatatggctgcacgttgatgcagcctacgcaggcagtgcattcatctgccctgagttccggcaccttctgaatggagtggaggtaggtgcacccttcgctctccctaaggctgttttcacagtgctctgttattgacctctcccttcatgaggagctgacgtccaatctcttgctattgaggtttgtttcagccaattatgtttgaaccaattccgacttcctcagaataggggctgagagccttccccagccatacagcctgtcctcctgaaatactcctgacacttacagttccatttcaatctacacaaatcccaaacagaaagaataaatgttagcttataaaactgtgggaaagtaggaacaaaataaaatcttaatgaacttaaactcaaaagagtaatttaaaataccaacccgcaattccatacaatctggttcaatatgacagtcatgttctgcccatacatctgaacatgatattcactttaaccaatattgaacgagaagctaccaatgcatttaaatgcccctaggcagtcttctggaaattgtaaagcatgatctttaatgctaagtgaaatgcctgcttcttttgagaagtagcaatcaaaattattgaccagcactccgcttctccaaaaagcaacagaatgtaaattggtacagacttaacacaaaaaaatgaccttattgatatactgtggtgtgttatttcagactcaagcgggatttcattgttggtggtggctcatagggtaggaagtctcttctccccaagaactcagctttgaatgccatagagggtcctgagaggcagtctttggcagtgtttccaagagaaggaggtagcaaagcaggggagctgtggcactggccaagaaagaaatgctttctgccaaggggcaggaggtgtcgtgagacctcacccatgtgtgatggcagatgaagggcacagtcctctgcattagactccttggtttgaatcctagatttatccttaagactagctgtgtacccttgggcgagttagatatcctccctatcctccagaaaatagatttcataagaatacatccggtgtgggattgtcgccaggagtagatgagttaatcatgttttaagggcttaaaaacagtgcctggcagacagtaaatactgaaattgcattaggtgcttttgtgattttctactacgtcttagaaaaactttcccttgacagcttcctctgcttgcatgtcaggtttgctaatcactattctaattacaactttgaattctcataatgctgtaataccagaaaagagggtaccagaggtatagaatacaaatgtccccatctttggaaagaataatcctcttactactaatcaatgaagtagtattctggtttatgtctgcatcacaatcattcactcattcattcaataattacttgttgagtacttaatacaacctaggacttacatgatggatccttgggggtaaatggagcttccaaagacctatgtacgcactggagagagggtatagtatatgagaagttctcataatgtgatgccagtacccagctgatatagttcattgccggtagctagtttggtgcgtgtttggtgctgggaaacgaagagtaaatctctgtatcatataaatgcatggcatgatggagataatctccattatttgaaacatctgtcctgggacagtttcaagggaggaagggctaagcagtcctctgggatttatgtgccctccccacggctggcctgagcttgatgctcttttctaactctgggtatcaggtttagggttcgtgatcttttcctaccactgctcttcttttccccaagaactgacaacttgaggtttcatctttcatagaagggtgcctcattgtcagaccaccacagcaatgggctttccagccagatcctatcagcaacagacaggatttcatgctgtacaatgagtcactgccatttttcttgcattattgctcccgactctttccatgcccagctgagggctgtgcgtctcagtggggcagataaggaggctgcaatatcctgttgtggccctgcccttggagataagagcctttctctccggttggcaggaggaaaatatcactgctgggtaatgagagaagtttaaacagatcagccccataggagggaactcataagactcctagcaaacagagctcctctttaaccttttgtctccttttatcaacaaatgaaacttgctgtaatttcctgtccttttctcaaaattacttttattaaaacctagaaggaaatgaacctgggtctccagagcagtggaaagttgtcatccaccaaccaaatgcctcccaggacgccccccaggtccctcaagcttctgctgcctcctcggtgcacatccctgaaaccaagtagacaggaggtgccctagggccttgggaagactgaaaagtttcccagtaggagagtcggccagactggcgcctcactgcaacagccacctttatttcggtatcaattatgaatccagccgcatggccaaatccctggccattaaggtggaccctgttcctgttcaccagtcaggtgataaaccaggacatgcatttgaaaaagaaagcaccatttatgacagctcagggaaaatgcagagtgtcctcctctgccactcttggtggtttaaacctcttattttctccttgaaaataaggtagcccctaacactgatgcatgcagccagagccggttgttcacagtttttacccaggatcttccagctacgggagcctgtagctgttaggaatacaatgaactttaaaaataaaggagctggtcggggtgcagtggctcacacctgtaatcccagtactttgggaggctgaggcaagaggacggcttaagcccaagagttcgagatcagcctgggcaacgtaatgagacacactgtctctacaaacaaaattttaaaaattagctgtgtgtggtggcacacgcctgtagtcccagctacttaggaagctaaggcaggaggatcacttgagcttgggaggttgaggctgcagtgagctgtgttcatgtccagcctgggcaacaaagtaagaccctgtcgctcaaaaaaaaaaaaagagagagaagcatttaggtaaatgaggagaattgttgatatgttacagcaatgctggcaaaagaacccatcaattaaatgaaaactgggtttacccctatctactgtagattagtaataaaatttcctctttcccactgtttatcatgacacgtgtagtctgagaactttgctagctcagcaagtggaaggaacttcaagcatgaagtatttcacaggccaaatcagtacaattcctgtacgttgtgcttgtgaaggacaattctgatttttccaaatattccagtaatttaaaatataatatggatacattttatgtcacattagattatgtaaatttgaaaatgcttttcatttgggaatataaacttttaattttaaaattcttgttccattttatgagagtataatctagatatagcaaaacatacaaatcaactctaaatacatatacccacccccatgtacttaccacccagatcaagagtagaacaattccagcactccagaagactcccctaacccactacaagttactactcccctgggcaaccctacctggcccctaccactgtggattagttgtgccataaacttttattatcatgtatggggtcttctttataattaaacatttataaagaaaatgttttctttttcttactcttgttctttggcagtttgcagattcattcaactttaatccccacaaatggctattggtgaattttgactgttctgccatgtggtaagtttccctgctcacagatgtcagttgcctgtccgaggtgacagtgaaagaagctggcagggaagatgccagagccaaaggggtgcaatagtcacttagctcactgcttgctgccttttctgaacccttgatggaattattgctaattcttagcctcactggaaacttttatctagggaatatcattgcaacatactggcataagaaatgagaagcctaaaaaggacaattttttatttgatttatccagcattgacagaaaacaaatgcaagtacacacttctaattcagtagcttgtgttttcattcttagattcgtaaccagtcttagtgtaatgctaagttttagcaatctgagtccaaatgcttaaaagtatttgctaaggccgggcacagtggctcacacctgtaatcccagccctttgggaggccgaggtgggtggatcacctgaggtccggagttcaagaccagcctggccaacatggtaaaaccccgtgtctactaaaaatacaaaaaattagctgggtgtggtagtgcatgcctgtaatcccagctactcaggaggctgaggcaggagaatcgcttgaacctgggaggcagaggttgcagtgagccgagatcatgccactgcaatccagccttggcgacaagactctgtctcaaaaaaaaaagtattcgcgaaagaaaaataatagtaaccatgtttcctaagaatttccctggaaattcttttcttcctctcttttttttttttcgagacagtgtctcactctgtcgcccaggttggagtgcagtggtgcgatcttggctcaaaatcttttctttctttctttcttttttttgagacagtgtctcattctgtcgcccaggctggagtgcagtggtgcaatcttggctcactgcaagctccgcttcccaggttcacgccattctcgtgcctcagcctcccgagtagctgggacaacaggcgcctaccacgcccggctaattttttgtatttttagtagagacgaggtttcaccgtgttaggcaggatggtctcgatctcctgacctcatgatccaccctcctcggcctcccaaaatgctgggattacaggcgtaagccacggtgcctggccggaaattcttaataacagcatgataataccttggtgatatttagaataagaaaaagaactaaagcattaaagtgggtgatattacaccacctacacaatgtttaaagaaataatgatgatgggcagtgatacagggacactagaaactagtttctctaaagttttaaagtaagaagttgattgattgatcatagggccaggaggatttgcatgaattttgtacagtatgcaaaactgcaaaattttccaaatattcagaaggctttgcaaaattgttcagtatgtaattaagtgaataacttttcactttcctcctaagcatgaggaaagcagcttttatacaaaacaactaatgtcagctctcaaggttaccaaaatacccgtttgaccttttcctgtttttttttttaaggctaaccacatttctagtcctttacttgtatacaaatcaaattattttttgtcagtctttttccccaaacttctgctatataattttaaaaccagttggtatgtgggcatttcagacttaattttgtctgaaataagtatttatgaaagacatggccgttatgaatgtgagtattcttttgtattcttgtggttgtgtttttctgtttcacccaaggtggaacacagtgaggacagtttgcaccgtgtgccagaggtccctttattcgaggggtaattttgattgaaatgtaaatccgctctgctgaggtttttggtcagtggggaaaatcctctaaggtggctggagttcggaaggaccaggcagagcatccacaggctctggcgggaacaagtggctctccctacatgcttttgttttgcaaggggcaggcgtcctcagatgccttccacaaaggaagccctagaaccacccttgagcagggcagggctgatgggctgtccggaggaggggttctcgtgcgccctgaggccgtcctcaatgcctggatagaacagtgatatcagcaaggctgtttagtgactgcggataggtacatccaggctcccttctaagtccctaacctctcgtagctctctggacccccacgacagccctgtgttgagggacacagacattgccacgctctctttacagatgaggaaactgaagcggtcagggaccagaaatattttgggtccctaatcttggaggcaaatattgacacacgataagaaggagtgtaatgaatgcggcgtcctgccctcaggtccagacaaccagtgcgtatgttaaggctgaagaaaacctgcttagtcagtgcggtggtgagaaggagttgagcctttcgggacgtggagtgcctgccgcagagctgatgccccgaggctgccgcagacgctgcagagctgatgccagcaagttggcggctgtgcgctcatctctcccggacaactcttccccggcgctcggggttcagttcagccaccagcctgtgaggggaaatttgacaaagtggaggtgatgtagggaagagacacaggacacacagggatgaggccaggccatttggaaaaggccatttggaaaatttccttgtagaaggaattaaacgtaagccctaagacacaagagaggcctgcggtgtctggaagtctgccacaagagaagggtgatggggttagttcccatcctctggagtgggcgacagtggtggggcagggtggttgcaatacttgaggaacctcttaccttcctatgggcttgaaaggctacaaaatatgtttttaaattgcaatagagaatgtgctctttctctcctgagccggtgcgttctcgacagaacaagagtcaaagaatttggtgagatgctgtgtacctggaaaaatcagatctctccaaaacccaaggttttgtcccatgacactataaaaatggcatgaatgttgatagatgaaatctgatctttgaaagatttgtgttttaacacagaaattgctgatctttactgtttgggggcactgtgcctgcattagttggctagggctggcttaacaaagtgccatggacaagcggcttaaacaagagatgatttatctcagtcctagaggccagaggtctgagataaagccatcagcaggctggtttcttctgaggcttctctcctgggcttgcagatggctgtcttctccctgtcctcacatggtcttccttctgtttacctgtgtccaaattttctcttcttataaggacaccagtcacattggattagggcctgttaaccaaaaagtatctgagacaggtctcaatcaattcagatgttttattttgctaagcttagggacattcctggaagaataaacatggaatcacagaaacagggtgtgctttgtgcctttccccaaagatgattttgaggccggcagtatttaaaggggagggcaagctggaggggaaagagggagggaatggtcacattactgaatccacgtgttgtgagagaaaaggagcaggtagaggaatagtcaatgatatatttgtctcacgcccagtaaatcagctctttatataagataaggtgagcatagagtagctacctgtagagatatttaaccttttatctgtagctttctgcttaggaacaaaaggaagggtatcttcttgcatgaaagcatccagcttattttttttcctttggcatagtaaattgaggcaccaagtttttattttccgttcacatttcttcccctccccttttaaaaaaagtcttcagaaaatgcattttagaagaaaatgcgtctctagtcttggggttttgtctggtctcttgtgactaagacagtttatttctagacaggtcccacgtggttaggaaagctcatttttagcaggttgtaaagtctcatgacccatgaaggaaaaaaataggtggaggaagagagagagaaacaaacaaacaaacaaacaaaaataaagggagaacaatcctggaaaactgacataaaccgtattactctgaagtccctatgtcagtaggcaggtatgaaagtgatttacgtatataaataggttcctgttattttcttccaaagttgacgttgtctagcttcagtttacagggctttaagaaaagcatagcttaatatttagtgatttcaaatcacgattaaaaaggaaaagaaagaaggaaaaaaaactgacaacattattttccagaattgtagccaggaaaaattttagaattcagcccaaattgtagaaaataataaaaacagacaaacattaggcaaggctagactctaattacagatgtactatagtttattttgaaacataatttttctctttccagttccccaattgtattaaatacaagattataatagggccaatttatttgtaaaataagttttagttctattatgattggcttgattatttggataaagtgcagcaagaataatcatttgccatataggtttgctctctcgctctttttgttgttgttgtttttaaattggttttgttggaaccttttcataaagaatctaagatttagagcttttgttgttgttgttgttgttgttgagacagagccttgctctgttgtccaggctggagtgcagtggcatgatctcggctcagtggcatgatctcagctcactgcaacctccacctcccaggttcaagcgagtctcctgcctcagcctcctgagcagctgggactacaggagcgtgccaccacgcctgcctaattttttgtatttttagtagagatggagtttcaccatgttagccaggatgatctcgatctcctgacctcatgatccacccacctcagcctcccaaagtgctgaaattacaggcatgggccactgtgcccggctgatttagacctttttaaaagcctcagtcccagtcaaggatttttctgtgcctatagatacctgtatgaattggttgaatttttctattttcaaggtcccaagagaacttgaggttcctagccctgttagaaagtgacattttttacttaccataggtcaggaccctgtaaaggacaaggtatggggccagtttttctaagaggcttttactagctctgtaggtcacccttattttctcaaggcaatctgaaaatgtcattccaatcaaagccttggtaaaataaccaatgacagaacaggatcacacagaggccattgtaaaatcagtcattcatttagccaaagcgataactcaaagatttcacaacctttattctttgagagaagagacttacttttctaaacaataaactctaataaagacagtatgaggccaattaaatctctctcaaattttataaacaaatctattaaattttaatcatcttgaccaaaatatataatttccataaatcattttataaccttttataattttttaattaaagaatgggttaatgtcccaagaaaaccttgttaaactggcatagggacacagatgctggtcttgcatcagtgtacctttgatattagtgtttaatttatagagaaactaagctaattttatctgtcaatattagctcttccaatctatgtgtccacctcttctgtgatactctgatagtccctgggcctagaggggttgaatagttttaatttctggccctgtgtctcttgaacacagtttattttgattgtcatcttctcctgggtctgaagatgaggcttttaactgctgtcagtgtttaagatttagctggacttggtatcttttttagacccaggagtcaaagtcctgtaatagtacaatgactttagaagcaatacagaaagttatatggatataataaccttaattttttaaatctcagttttcgtaggactttaattagttagacataggaagagtgcatcctgtgttataagttttctatttcatagaagaatttagagaataatataggaagaaagcatttgctttaggctgcgtgtggtggctcatgcctgtaatcccagcactttgggaggccgaggtgggaggattgcttgaggtcaggacttcgagaccagcctggccaacatggtgagaccttatctctactacaaatacaaaaattagccaggtgtggtggcacgtgtctgtaatcccagctatcctggaggctgaggcacaagaattgctggaacctgggaggcagaggctgcagtgagctgagatggtgccactgcactccagcctgggtgacagagcaagactccatctcaaaaacaaacaaacaaacaagcaaacaaagaaaaccattcagtttagatctttaagttaagatatattttttaattaggccacaacatcagtcagaaccagaggggaaaaagttaaaggagctgataaaaagttgaaagagttactatctcgggccctcttgaaggggagagaaagctgaaaacagcgagatgaaattaaagttgaaattttggtttatgaaaattaaaatgtcttgtaattttattaagaataaaccagtaccttaagaaaatttagttgttctaacaatttttttagtttattagtgtatttttaatatcaaagcccaatttctagaaagactattataaataattttcttttaattatggccaacttgatcacataaatattttttcataaattctctttttataaaccttattatgacttacacaaaccatttactgaatacttggagtttctgttttatcccaaacatcctcttttttaaataaccagtgattttattttaggacaaaaaatatatcacacaacatttttgtcatgtaaaattgttttccttttaatctttcttaccaaaaataccacttaatatttataactttttttgcatctcttttatttactgtttccttttaccttgttttagaaacgacctttaagtaatctttgaattagacaaaaattatttctttttaataagaaaacattgtttttcagaaaaacattttcctatatttttttttaaattggaaatgacccagacatttaagcaatatctattattttgtttaatgttactttagattctaaattatatgtcgttttttaacaagcatttattctattatatttatctaattaattttttaatagattacttataaaaactgatggtcatcatttaaagttatttccctgctaaccaattttatagcctgcgaatttcaggtgtttacctatgtaaaaaacttaaggttaaataaatgtatttgttttttctttttgccaaataattcagtattaactgtttgctattaaaccaacaatattaaatgccttacttaccaaaagttacacaaagataattctcttttgggctgcatttatggctttataaccctcattccaaatattgacaccttataatatttagcaaacataaatataaaactacttgaccaataaatctaaacaataatatgtgttgacagtacttaagactttctaattttatttggccaataattttaaagccagcttatttattaaaagttaagtcatgtgaacttgaaaagcatttggattatttactaaatttatgagtactcctttatttttaagccaatttggtaccttgtggccacaacacataacaaaatgcatgtatgtatacataaacacacctaagcacacataaacagtcatgcaaataaagatcctatagcttttacttcagaactctagccatgatatatcaatacagactcatcagtttacaaaaaaaaagattaaatagaaacagtggtttttatctcaacaccagtagaaaggtcctctaaactagaaaaatacattttcttaagcaaaaaacacatcctcgcgtgttttataaactttaccaaaaacacatcctacgatacactactaaccctaattctccctgaaaaatcaaggattacttaatttaatataatatgactttaagtgttcaaattactggggacagttttgagactaactttaccaaattaatcttaccaaagattactaaaactatatgaactgaaaagcctctgagctagtttctattagtctgataaaaacttacttttctttaggccaattaattagaactctttcatataattggtagcaaaatattatttccacatgacatatctgaacatatagacataacagacccaggcagaggcagatcttatatatttaaaatttttcatttgcctgttttcaaaaatgttctttttcctacttaaactattaaagttgtctggagggaaagagggagggtatggtaatccacgtgttgcaagagaaaaggagcaggcaggggaatagtcaattatgtattcatctcccactcagtaaaatagcactttacaacagataagatgaacttagagtagttaccagtggagatatttaaccttttagctgtagctctctacttaggaacaaaaggaaaggcaactccttgcatgacttagctttaagcttaatttttccttttggcagagtgaattggggtgtcaggtttttatttgcctttcaaagtccccaccatatgacctcattttactaaatcacctcttaaaggccttatcttcaaatacagtcagtcatattctgaggtcctgggaggtggagcttcaacatgtgaatgaggaggaagggggacataatttggtccataacagcgctcacaagaaatcactagttaaagccataagcctcatatctaaggatttaaaccaggtcagcttattttaaactccataatcttaatgatcatctacttactgatttgtttatttgatagctatgaaacttatattttcatttgatctcactatacccaaacacccacatccctgttttttcctcattttcttaccaccaaaaacttattttcttcattccacagtggatagtcttcacattgccttgctgacacagtggcctgtgctgtatctgatagtatgcaaaccaagagtgcatgcacgcaaagcaacatacgttttacaaatacaaatacaaacaaaaagatgcacatagaacccactgggatcacttcttatggatatagaagctggagaatgagacctgttttttggtgtaaatgagccaaaatcagggtcacttttgttcaagctgttattgacttggttttcactgtaaacactggaagtagtctcgaattttagcccaggatgtacagcctcagagcaaaagacaagtaggtggaacacagcatcccttcctctagacaccgttacattaaaatggcaatcattacaagtacagcaagtatacttcataatgaattcattattctgttcataagctttttagggactatattattatcccatctaagaggcaggatccactgatcatgcttggtcgaggttggcttcccctgcctgtttgcgaatggtgccttgtaacgtggagacagggagtggggagagtgagggctgagaatctctactcagaggctttttcacactgtccagatatcatgaaataaaaataaatattttgacagtctaagagaagattacagtaacgtgatctaccttaacacaatagaacacagataataaggacacttgtaagaaccagaattcacaaaaggacaaatattcctctagattcctaagagtttaaactaagcaaaaaaatcctaagtggtgaatttttaaagtgtcttttaaaatttcactaattcagtaaacaacatataaatggattttttattgctttcactggtttctttgtattctttaaaattagaagtgtttctcttttgtttaatgaaattttactaatggttagtccataatttaacataaacactttggttgtactctttaaatactgaaatagacaaaataattgaagtttctgaaactggcaatcattataagcacagtaaatacattttataatgaaataattattctgttcataagcttcttattgttcatttgatattctgaatcttttatctgtaaatgtgagccattctgtccagagcttattgcctctttaatatcagatctccaaagaaagactcaaattccatacacacgaaaggcatatattatccacatttaaaagatggcctgtttttttttcccaaaatgttaaattttgccacaaattattttatagtgtttgtacacttctgttgcattgggaggtttttaaaaattctatttctctgaaacagttttaatcattctagtaatcgttgagacttgattctagaacttgttttaaaagtcttagtggatagttttctatttatctatttggattctttgcacttagatctgggaaccctttattatcttgaattttttatggatgttattgggaccaggaggtcatgtgagtgctcattcagtgagcactatgtagtgttgtagattttttaaaaaagaaaacgtaaggagccaggctttcaacccaacacaagggtccttttcctgatcccctaggaatgtgtctggttacagagagaggctttcctcaccaaaagtctcatgcaggtgaggtcaccatgtgaggtgactttggtgccacaaaagcatgtttctctgtgtgtgtgtgtgcccatgtatgtcctcaagtacacatacacatctgtttccataaaattctttctctttataatatccattaaatcttaacaagaaatgcaaatttagtacctaaatattgaagaggcgactaccacaggcccattagaaacatgggccaatgaataaagtataatgggaagctgcaaatactgagaattgaacaaaaagaaacatgcaaccaaacttgccacacacagctaaagcagcacctacaaaacagacatcaattgaaaagaggaaagccagaaaatcataagctaagtatcaaaattaagctagaaagcagcaacaaaataaacctccaaaaagtaaaaggaagaaagcaataagaattaagaaatgtaacaaaatacacaaaaaagacccaacagagaggatcgacaaagccagatgttggtagttggcctgcctaattacataaacgatctctggaaagataggtcaaaaataaagaaaacacagattaacttgtagtagaaaatacaatggcacaattacagatacttcagagatttccgaaaatagtaagggagcattatgagtaacatcatgccaagaattgcccataaacacatatattcaataactacaacaaaacatgataccaaaactgactcaagagtaaatagaaaacctgaaaaatcttattgttaatacaacatgtcaatagtaaaattttcttacagcagaaatacccaaattattattctttttttttttttgagatggaatcttgctctgtcgcccaggctggagtgcagtagcgcgatcttggctcactgcaagctccacctcccaggttcacaccattctcctgcctcagcctccccagcagctgggactacaggtgcccgccgccatgcccagctaattttttttgtatttttagtagagacggggtttcactgtgctagccaggatggtctcgatctcctgacctcgtgatcctcccgcctcggcctcccaaagtgctgggattacaggtgtgagccactgcacatggccagaaatacccaaattcttaaataatgagtatcctaaactgcaggaaacttatcagtccaatcctaagtataattcacagagagcagcaaaagaggccacactgcctcttatatcttgaagccagtctaaatttgattctaaaaccagatgagaagctgagacagaaaagctataaacaatctcacaaacttaaatgtaaaaattctatgtcaaacattagcaaataaaatccaatgagattttaaaaaatatagtataccatgtccaaactgtgtttaatctggatatggcaggatggtttaatagtagaagatttttaaagtgctagtcaccatgttaacagagaaggagaaaaaaagttatcatattagatgcagaaaaagcattagataaaagtcaacaacatttcaggacaaaatgtcttagtaaaatcggaacagcagagaacttcttaatctgataaaaggtaactaccaaaaaacatagtgaacctttacttaatggtgaaatattagaagcactccctttaaaatcagaaaaaaatgaggattcccataatctgcacttctattcaacactggactttcctaacctccataataatttaaaaaaaaaaagataaagaagtaaacatgtaaggatcagtatggaagacataaaactctcattgtcagatgatgtaacctcaataaaaagagaatcctcaaagtattattaataaaagaacccagcaagatgtctagatacactaacatttttaaggttgcatttttttacatctacattaaacagtatgtgtaatttttacaaaggtaacactctttataatagcaagaaaagatatgtttactatgaacaaacatatccaaacctgttcagatttatatggagaaaattctataattttttggaagtcattaaagaagtcctaagtaggatgatatgttcataaagaagactcgatattagacctcagcacaattctaataaatatcctggcataatatttatatgggccaagaatagccaagataattgtgaaaaaaaatatagtgaggaagttgcctccttaaatatcaacgtgtgtgtgtaaagtaaccacgactgaactcatgtagcaccagcgcgggcacagatgggtagagcacattagaagagagagccagaaacagactccacatattccaattagggcttctaatgtttacagaattgttgcaatccaatatgacaagataagcaatctaacagaaaaatgaacaaaaaattctttatcaaggaggaaacagatatgcttaataaatacaaagttactcaccctccttagtaatcagaaatgtaaattgaaatcccagtaaaacactataggttgtttacaatagtctcttcatactaaacgttgaccaggatatggaagaggagctcgcagactgcagaactgttgtggagactgatttggagctattgaatacggccgtagatagatgctttcctccaaccttaacatagctcaccttgtgctattccattggcagatgcatggccgacgggcgctgccactaggggctccaggagtatgcacagggatggtcccatgtccacatcagtgtagtttgtctatcaataaatgggaaatgatagaatgaatggattgggatatgtgcatgcactaaaatcccaggaggtcatacaaatgagtgagcaagagccctgcgcatgaatgaatgtgaaactcataggtctattttggggtaagaaagcaaattatagaaacatgcatggaattataaaatttaagataatacatcttaagtttatggtacagtatgtttagcagtgtgcaaaataatatagattgcttagggatttggagagaaaattttgtagaactatgtaagagtaggaacacaaattcagccttgtggcctcttgtgtgggacagggagaggaagtaggtgagggacaggaatatttaacttttattaatacttataatttaagttttatttcataagcagggggtggtgatttattctttacatcttttgtatggctttaattagtgcaaaattttttaaattaaaaaacagctggaaggcccctgctgagaatgagaagggaaagtgtgatctttgtggacaaagggcagagttctactgatagccataaatattcacatccctcttggtcccctctttttaagtctaggcacagagctttctctaatgcagagagacccaaaggacctccccccacaaccagtggctccccataaaatgcctatgatgcaagaaaattcctatacacacaaaaaattaggtgcaattttcttccacaagtcaaagaaagaatatacactagacagcttattattcctactgactttgtctgtctttaaccttaaaacaaaaataaaggctcaatgaccatttatagataaatccagcctctctctcacctccttggtaagccacatctcagcatcctattttgtgctcactgggttctgtctttcagggactctcacgttttatttgttttcaagcctaagctactgtcagattaacatttcttctctagtttgcccttaggatactttatttgctacaaaattgctttgtgatggtgtcaccacactgccaatgaagcagagcaatggcaattaccataaagcacaggcccttcaaaggccagcccagtgagagtttgggtccgagttctgcagaatgactaccagtgtgagtgctctgtgtgcagacaggtgaaagaggacccctgtctgcagcccagggcatcctggccttctcactcattagcccttgggattttcaccccacacacacttactgatgccagcagggccagtcactgtgctgtccctggaaagagagagaggagcaaatgctaacctctgtggttttccctcttgacaccaattctccaactctgcagacaccagctgggtgtcctaaactcactcctattctgactgtaactacctagaggtagcgtcagactccacagggttaagggctcagtcccatcagccggcccccacttcaaatgccagttacagtgttgggtctccaggttacccacagttctgtccaccgtggctacaaactcaggggggttcccataacccttgccccaggttcagtaacttactagaacaactcacagaattcaaaaaagcattttacttaggtttacaggttataaagagtacaaacaaagaaatgcaatggcaaagtacaagtggggtggtaggtcacgtggcttccatgccctctctgtgtatgccaccatcccagcatcatgaagcatttaccaacccagagctctccaatcctgccacttaggagtttttaacggagtttcattcagtagggatgattgcttaaatcactggccaactcatctccagccccctaccctccctggagattggaagccatcgaggagaccccagctgccagctatcttattaacatgcaaaatgaacccttatcactaggagatctcaagggttttaggagctgtgtgccaggaactggtaacaaagaccaaatatttattttttattctaagaacgccctccccaggtacttggagcagagacagggccgtgcaggcagagtggtgttcagggcagggctgggagcaggtgcctgagctgaggcaggtggggagaggggagaggtggtccagtctagggtacttggttatcagcccgttcatttgttctctaaaaccagggtgaaaaagagaacagacttaacgggagcctttagactggaccccacttacctgaagcacagccatcaggattcaggtaagctgtgagcctgctttctgtggactgtttctggtcttgttcccctcagagctgccctggaggtccctgggagttaggggaagaccatccatatccaaggaggctttcacagagaagacggggtgctgtgcattcctggatttgcccttgtagcccactccctgtgggttggttaagaggcttggggaggctccctgggggaggctcctgctctagaagcactgagaacctgctgggctcattgcaggagcaggggcaggtgggcacagccatgggattttaatatgggcatgcatactgcctgcagacaaggaaacgtctttaacataatgacagccataatgtctacaaaaaggctttgcatcaccttccaccaataccatgagggggcaaagtaaatgaagaaggttgagtagggttggtgagggaagagaaaataagatgaagccaaggctcagatcagcacacaaaggtgcacctaagtcatttggtcagtaggcctgctctctgtgcctggcgctggtgacagccaaggaggctcagcacccacctgcaacgtctagcagggaggggatgagtgggcagttatcaagtggcatcaggggacacaggctgctctggggccacagcacggaatgcacaattcttggcttttgcacttcacctatgtcgtctcatttgacttgggccagtgtatctggctaattaatggtaggcattgaactagaaccaaaataaatagaatttttttgataactgaaaattctgtcacaacgctggtgaggaggtaaagtggttacactagtcatgtaggctttgaagatgtattccttattattaaagatgtacatttggaaaatagagtcaacgctgggccagaaaattcctgtaatcccaccactcaaatgcaaatattgctaatatattgctgtatttcttaccagtcttgttcaatgcattgttcgctttaactctgcaccacttaccaattaccaatatacaagctgcccttcccacatgtacctcatgaagttttacatcttatgaggcacataagacctattaagtagtccacagttcaagtaaaaccattgtcagaggaaactactggctaagaggtttgtcatttctttatgttaacagtaaagaattgtgcaaggaagcttctaactgggccagttctttactcgtccataaggaagcagattcacggagaagcagataggaacttgcactaattagacaccgtatctgaattcttctactgaaagcctccagtttttctttcctgtagaagtttctgcaatgagggaaatttataattctgcaccacccaatatggcagccaccagtccgcatgtggctactgagtgcttgaaacgtggctcatctgttgaagaactaaagtttaatttcctttagttttaattaacttaaatttaaacgtcaacagccacatgtggctactagctaccgtatcagatggtgcggtaatagaaactaaaaaggtgggccattccctcattttcattcatgacaatcatctggttctttgacaattttttttttttgagacagggtttggctctgtcacccaagctggaatgcagtggtgcaaccttggctctctgcagcctccacctcccaggctcaagtgatcctcccacttcagccttccaagtagctgggaccacagacgtacagcacaaggcccagataattttttgtatttttttttttttttggtagagacggggtttcaccatgttgccaaagctagtcttgaactcctgagctcaagcgatttgcctgccttggcctctcaaagtgctgggattacaggtgtgagccaccacgcctggcgtcgacaatttcttactgagtgctttctgcatgcactctgttgagtgttgttgtttcatttgcagtggtttctgtgaatcattgccagatgctgctattgatgttatgtttgtttaacaagctcccttactaatgagaggccatgtgtcgtaaaggagagtactgtgtatgggttgagataggctgtatgactttgggcttccatctcagggtcactcataaaacagggggtggaggtcttgcatctcctcccagcactgccattttttatgctagtggagaaaataactattagggaatgataccaagtggtgacttcagatgttcttgtaaatacaatgtaggcactcctgtgcagtggatgaagtgcagggtggggcgtgggttgtattaggtggacagcttgtcccagctgagcatggtcaggtcctgctatggccctgccacagcccctgttgactgcggaagtaggggacactgatgtgcctggtccagcccacattcgtggatctactcccagagcacgagactcccttttccaccgatctgtgcagcaggactgcagcatgttgtcataatcctcacctgatgtcttgcgcaggatcacttgtattaatagaaactcccgtctctgagcctgcatccagggttctttctcctttatggtcctgggatttgctgctttaggcatgaggggaggctcaaaagcaaatcatccatttttcataaccaatgtggagccaatgattcctggatgttaaaactgactcagcagatattcactgagtgtctgctctgtcccagatactgaactaagatctgctaagatccacggatacagagatgaataatcccaccaagagtttcattctcctttttaaaatattctaatcactccgtatatcacaaattcaccttcccatgcatgaatgaatgaatgatgaacgatttacgtgatctgaatgctaactctctactgggcactagatgaaacctcagatgttcatgctatgtaactgcagaaagcaaaactaatgggggtctattgagagtgtaacatttccaatttgtgttttgggcatcctgttctcgggacacacccttagaatatgttaccctgggaagtgccgcaaagaacacccagacccagcctttgggcagttttatttctggcttagaagacacaagaaatttacctggaaaatgaaaaggattagcgtgtgatcaacaaacctgtctaacgatttcttttttctttttctttctcttttctccagggcttatcactgactaccgggtaagtgggagattccactgtaatctcaaatgctagtggagtgctggggggctacgccacagctgtcacacatctcctcccccactctcatgatcagcacgcactggtgggcaccttctaactgggtcctaactgacaaattaggggggtcctgccaggtggcgggcagctctgctgaaccccccagtcagaggtctcaggttaggagggggaaacctggaccctggactttgctcctggggaggagaaaggagcttctgcccctcattcctctggaaggaaaaggcccttctgccctgggctgctgtgtgcctggggctgcactggtggtggcagtgggagagtgagggaggagtcagggaacagcaaaagctcccaggtggggccagtcatctcagcagcctagtctcaaatgcattggtcctctctcgtttttatttgaaacaagtgttgaatgaggcatactttgaaaatgccaggttgttctagtgttagtctggaaaggaatttgggaccaaaggcagtactgcgaagcttatcaaaagaatagaacccaagggggagggtgaaactcagggggaacagaggtgtggccactgagctggctgtcttctgccatcaagagatgacctgtggccaggtgctgtggctcactcctgtaatcccagcactttgagaggctgaggtgggtggatcatctgaggtcaggtcttcgagaccagcctggccaacatggtgaaaccccatctgtgctaaaaatacaaaaattagctgggtgtggtggcaggcacctgtaatcccagctaccccggaggctgaggcaggagaatcattggaacctgggaggcagaggttgcagtgagccgagatcatgccactgcactccagcctgggtgacagagtgaaactctgtctcaaaaaaaaaaaaaatgacctgtgtccacgtgtggtgggcaccagacatcatcaaagcagaggctgccatttcccgacagaggtgtgtgtctaagtgcgtttggagcaaacattgtcagcagccggtgtgataatgacccagcaggggcttcccctcaaaggcatgggtagcttgccttcttcctgtgacagctgtgagccaggaggcaggggggcagcagtaaaccttcccaagccatcaaggctggtcctaggacagttttggcaaagtttgcctgggaccacccagctctacacccagggagaaaggccagggtgtgtgcacataagggcacactgggaagatccatggatgatgccatttaaaactttcatataatcccattgtcaatctgacttatcttttggaaagttattattgaagggaaaatatgacaataatattaaaaataacctgaggaccagctcaccctgacctttcatcctcgcgcctctgtggcctgtgtttctgtctcctcctctggttcgtggcctttctcagacttcatgttgcatgagggccacgtgctgtacaaacgacattgcagctggttctcatggcactgaaactaaaattgcaataccttctccactcctccacagccttagtaagtacagaaaatctacacagaatcccatgttatatggtataattatttccctgttatttaactacttccctgggaaagtcccttgctttcctaaatgactatgcagtgggcatctggcacatccagctttctgctgaggatgagctgcttcctgcagcatgagactgaaaatggggtaacaggcacgaacacttcatgccttttattttattattttttaattttgctctttcccagcttagatatcattagaaaaaaaggcacaacaccatctctggttcacataaaataacataggctttgctaaaaactccgtattgactaacaagtcctctgggaaccaaagtccttttagataaacttggcactgtctttcaaaggcctggggcacaatccccagcaatgctggcttatgttacattgcccaagacaaaaaccagcccagctctgcccgcatctagcagctcagggaacatgatctcctcagacagtttctaccgttcaccaagaatcacagatctgtactggcacccgcctgcaggaccacgaaggtggcagggcttgcctgaggcttccccagcctgttcttctgctccatccagggccttccagtcctcagggctcactccttcttcccaaccctaggttcttcatcctactccctccaccaccagtccctgaccctcatggggtctttctgtccccttctgtctttagtgctgagcctcactctcctcagcacctcaggccctttccgcactgctaatccagaagacttgagcccaccattcaccctgccttgataggccaagcattctttgaaaagcgtttgtccttctgttacttcaactagttatctctactagttatctctactagcttaatgaaaggcattggcctcggttaaggaaaggtcaagcatcagcaacctgtgctccagccctactttcaaagcatcctttgatcagcccctgtactccccaccctgttggtcctgctgtgagacctgggtctctttcaccccatctcaaggcagccccttgactggcactccctttccaaccaggagctatgagctgctcctgcagctactcagaggtgagtgaggcccaaagccacctccaagactcccaggccactgagggagacagaggcgcagaccacgcaggccctgatgcctgttctgaaacacacctgagacacctcgatcctccagcctgccctttgtggcccaagaggacatgccccaagtccttagctagtcctctgcctgccagctctcctcttgccgcttgtggcaggcaatgatgctgagatccctggcactatggctggcagtgcatgagtcaggagccatgtggggacagtccttgtttggctgcctgttgcttctaaaggaacccaggcagatgggaagcaccacagcagcccagtcccactggcatccatccaccaggcttgggaggctctctggggtgattggccttctgtgctgctgtgttcctagagagggctggagatggcacatcatgtgttcacagccaatgtttcatggctgatgaggggacaaacgcatgaaccttatgaaagatggaatgcagaaggtgaaagctgttctggagcagaggggcttctaaatgcgaagcacaggcattaggcctcagcataccagccccaggaagcaggagtggccatgtggggacagccccgggcagccaccgggaaagcacacacaagttggccgggtgtgagtatgggagcagcctcagggccctggtgtgcagagcccccagggcacctctcagcccagctttgctctttctatcccttgggtgcaggcacaagtgtcactgcctcttactgaaccctctccatctgccacaacccagggatgtccctggccgtatttcccggcatcttctctttgctgctattttagctacaatgcagtgacctctttccctctctgtgctcacatgcacctctcaggctcctctatgattcccaccttgaatgtgaattccaggcaaatgtccccagagcatttgctttgctgggctcagcagggaatgggaaggaatatcatagacattctcattttgttcaaagaggctggaaacccaaacctaaggcggtctggggagaagatccatcagtctggggagaagatccctggatggtgggctgcctactgggccagtgagaaagtgtggggtgaaaaggatgagcagaccctggtagttctatcccccgtcagtagatgagggcacgaggacagagtgttagtcccaggaggaggctgttcaggacgcgaggtatggcaagagagctctgtgttctttctgatggtgaacggcacactgaagatgtaagacagcaccatttgcctccagtttgcacggtcctgggtaaagtgggcatcattatgcctgtttcataggggaggagacagaggttcagaaaagtttgctgaacctattgaaagacaggaccacggacctaggtcacaagccactgagccatgcagccctgcatgctatttggatgaggaaactgcatcttctggaagatgttgatggcttatcaaaaatgggacaaaatacaggtttaaaaatgatcaattgtggaggaaaaagtaccaggaaatagatcatttgatgtccgggaagcatcaaatatgaattgacttctacataaagaatcctttcagatgacccatgaatgagggtcaaatgggttttactcctgatttatttaagtacgtccatcaacaatcttccacaaaatgtgggctggccgcgccatgccaagccaggtgctgggcttggggctgggactaaaaaggcaaatgagacagagtccctttcctctgggaacttagtctggcaggaggtgaggctgggtacacaggggtcacagctgtctactgcaggcacccaggagcatattgggggaggggacagtgcatcgaattcagtctctggagagaacatgacaacatttggagccacatttgagtgagcattcaattagattgtgtgcattttcactccgggaccacagaaattaagtttaccttggtattcttccaaatgttagactgaaatctaacattttaatttgtaggaagttgaccagtcgaggaatgattttggaacacagcgcccatgctgaaccatggcagggaagcgtcgttttactgactgttagatagtcagtcagctagtggtgggataaggggttcttcttttagatttcccaaaagacaagttagcttagttcttgagcagcccaacagcttgcaaacagtgctgaccagcagacaactgtgtgtgcaggttcggctcaggctctgctgcatgctggcttggtgacattgggcaagtcactctccatacctgcttttgctccaagaaagtggggatccgaacccttgtttacagtgctgctaggaagctcaaaggagataatgtgtcaacacaccgggcagggcctggtgtgcaactggggggaaccacactgaatgcctgagtcagaggttgggtccctgtttcccttttgacttgagaagctcctgcagaaccatggctctgggcccttgagctacttctcttgtgttcagaagcagttgccacctgttcattccacccacactttattttatttatttatttattttgagatggagtcttactctattgcccaggcttgagtgcaatagcgccatcttggctcactgcaacctccgcctcctgggtcctgcctcagcttcccaagtagatgggattacaggcatgtgccaccataccaggctaatttttgtatttttagtagagagagggtttcatcatgttggtcaggctggtctcaaactcccgacctcaggtgatccacctgccttggcctcccaaagtgctggggttacaggcgtgagccaccgcatccggccttcacccacactttaaaaaacacctgcaagccctcctactggggagcagtgcgggactcaggactccggctaagcagtcccacccggcagatggcccagctgcgctagagtgtcgcgcctggctgcactgtgtcacccaggcccagtagggagctggctcagctctcctcagtgtctcctttatagctgaaatagaatatgactgttaagatgaccacgcagtgctgctatgctcacttcccagcagtctcctcgtcccagtccttccttactcacttcaccacatctccatccctcagtgtgtgggggccggtcaactgactgggtctgggaaaaccagaggaaggacagggaaagcttctggagcaccagcatggagacacacattgtgtcttctgatgaggggtcttggggtcactccatggtgatcagtaggaccaagagggaaccagtattgctctagaaaacagtgccagaacatctggggcagaagtggcagacaagagcaggttctggctccctccttcctcgtaggcaaggacatcaatgaaaattacccccttatccccactggatggtgagctcactgggggcagggccgtgtcttccctgtttgctcaccacggaaccctaggggacagcccaaggtctggccctgctgtgcatgccgcaaacacctgttgagtgaaaacaatgaacatcactggctcccaggtcaacagtccccatctgtgttcctttctcttggagatttgcaaagaaagcctctgcccacatcaccgagggccctgccatccaagacaggccatggcaatgggagcagggtggccaccagggaatcggctgcctccaagagaaataggcgagccggtgagccgaaaaggaagccagcttttaatatcttcctcactgatggtctgtttcatgtttcatttcagcattggcagataccactgggcagaagatttcgctctttgaaaatgtggtttgtatttaggatgtatggagtcaaaggactgcaggcttatatccgcaaggtgactttgtttttattatttatcacggtaaaattgcggaggtctttcgggactttagaaataaattcaaattttttttctttttttttttttgagacagagtttcactcttgtcccccaggctggagtgcaatggcacaatctcagctcactgcaacctctgcctcctgggttcaagcgaatctcctgccttagcctcctgagtagctaggattacaggcatgcgccatcatgcccagctaatttttgtattttaagtagagattgggtttcaccatgttggtcaggctgatcttgaactcctggcttcaggtgatccacccacctcagcctctcaaagtgctgggattacaggtgtgagccactgcacctggccttcaaatgtcttaataagcaaatacatggcaagagaaccagactgtagtttgggttgttgagatgaggttatttataagatctgttaagtcactttcgttaagattgcaggttatcaggtccaggaagatggtcacagtagaaacatcacataggttgtgctttagccacatctagccaagaatgaagttcattgagcaatggcaattatgagaacataaggactgtgtttttctcccccaaaattgccagaataagatagatattccctagtccagtggttctcagacatgcttccagaccagcagtgccggcctgcagtggggcccagcaacctctgttttaacaagcaaaccagacaccttctctatgcactaaaatttgagaaccacttatcagctccaagccccactcccctgcttttttttttttttttttttttaaaataacaattggctgggtgtggtggctcacgcatgtaatcccggcactttgggaggccgaggtgggcagatcatgaagtcaggagttctagaccagcctggccaacatagtgaaaccttgtctctactaaaaaaaaaatacaaaaaattagccaggcatggtggcaggcacctgtaatcccagctactcgggaggctgaggcagaagaatcacttgaacctgggaggcagaggttgcaatgagcagagattgtgccactgcactaaagcctgagtgacaaagcaagactccgtctcaccaaaaaaaaaaaaaaaaaaaaaaatgaggaaactgagtcctgaatatgagcctggatctgcctagagccacccgtttagccagctgcagaaggcctgctgctgttctgctggctctctctgatcctggtgtccttcctaagctgtggcctcatcttgatggacagaggtccccaggcttcatgggaacaagcacacttatgatattcagccttagtgatggtaacagccctccattttaagtcctgttgccacttcacaaccaggtgtgcaggggcaggtgtccccagccacctcctctgtggcacagcatatataaacacatccatctgcaagcttcatagaatgcctaggatgtgccatgaactgcctactcccaaagcttcggtgaggacagttccaggagctgccgagcactatgaggacctgtttgggggcgagaactgggaaaggagtatgtatatgaattcctgggtaggaaatccccctctacccatttgagacgaattcagcttttttggggaaagaaagccaaaaaataagggatttatctccccacaatgatgacgtctttaagctcaaggacaactagttatgatcatgctggctcctgtttaaaacacactccacttctttcttaaaggggacccaatcctgccttaggagcagagtccagcgatgctcaaagcctgtctccttgggcgggaaccggctttcgggatcgcccatgaggccgaggtctttggcgctctctggtggcatgacgaggaaccactcgtatgacacgtgtttttgtcccagccaccccctgcccgcgaggcgccgcgtttccgcaggtcctccccagcacctgcaacatgggggccctgctgtatccgcgggcttagaatgagcaaggcacgggcctacgccacggagggctccttctcctaggatcacatgctgtctgaatagcttctgagttctataactatttggaagtgaaataaggtcagtgtgatattcaatgagaggaaggccgtttctgaatgtgacagagcggacaggatgcccagctctaggtggcaaacgcggaggaggagcaacagctgtggcagccacagagctgcagctccatcaggctgccttagaatcccagctcagccaaggcctccgggtgcaccttgggcatgtcgctcaccctctcccagcctgttttcttatctccaaaatggggataatcatgatatcttctgtgttgtgggctgtcctgaggatgccgcagtggtgagcgctggcacctcaagcacagaggagcaactcgatgggcattagccattgtctcttccagaatgatcaaatacctcctcacggtgtttattctaacattataaaagacagtttgggtgggataagaatagtcccatgaacagaagaaaatgacaattggtgttctgaggacactagacctgtgctaatgtagggaatgagtttcttagcctgcctggaaacagctggtcagtgaacggtaaaagcacttgaggaaaattgccaagagcgtctaaatgaattatacatgggcagtctaataaggttttctaggtagttaagttctgaattaaatggccatgagaaaaacagattttccctttcctctttgaagcatgtccagctgtcccatgagtttgagtcactggtgcgccaggatccccgctttgaaatctgtgtggaagtcattctggggcttgtctgctttcggctaaaggtttgtctacatctattccattcttcattttctgtgaatgtgacagaggggaaagtgttgttcattacctccatgctcaaacactggcactggctctccagagatggcagagcaaagcctgcattctttggcccaccggcctgccctgccccatgctacacagccttgtttccacgcacagcggctgttcccgcttcctcaagcctgccatgagacttctaacttacatagcttattggccgcagaatctttaccatttttccttcctcaaggctccatcccacacctctgccactggccctccttggaggacagcggcctgtccatagcctcactaatctgagtgtcttctgtggatcaacagcatcagcatcatcagcattgtctgggagctccttagaaaagccagtcttgggccccaccctagagctgctggctgcgcacctttacaagatgcccacacaggagtctgtttgacactgtgttgtggcgtgctgttattttgctgcctgatgctgtgcattcaccaggtgagggcaggctggcccacacgggttggggcataagccatctctactgagaatcatgatacagttctcaaaaaggctctaagatgcactgcacacatgccccttggtaatctcccttgtgtacacagagccaggtgagaccaaatgctctgtctgtttggtttataaggttttttttttttttttttttttttctttttggagacagagtctcccactctgttgcccaggctggagtgcagtggtgtaatctcggctcactgcaacctctgcctcccgggttcaagtgattctcctgcttcagccttttgagtagctgggattacaggtgtgcgccaccacgcccagctaatttttgtatttttagagatggggtttcaccatgttggtcaggctggtctcgaacttctgacctcgtgatccacccgcctcagcctctcaaagtgctgggattacaggcgtgagccactgcgcccggctgaggtagcttttaattcacaatcatttcaagcctttccaggaggcttccttgttcaaattaaagacagcactcaggagaaggagcaggctggggtcagtgtcattgtcaaggggctgccagtcagagtgtggcactgccactccacctactatgtccttttgcctcacctgactcttggagctctgaggcgaggaggagctgcagccgtgggaaagcctgcaggtagcagagcaggagaggagacttgagcccttggaagagcacaaagtgatgagacctgggaggtgcacagaggaccgagagggcaagacacgctctggatgtttgtgggaggagcctcagtccatccatgtccaggatgtgtccagtcaaccaaccttagtgttggcatcgtgcttattagactcatctgctgtcaagcagttgttttcattcttgtttttgttgacagttttcttctaggacttttatattctatttttttaacagttctattgagatataattcactttgttcatttaaagttaacatttgggctgggcgtggtggctcacgcctgtaatcccagcattttgggaggccgaggaggccagatcacttgaggtcaggagttcgagaacagcctgaccaacatggtgaaacctcgtctctactacaaatacaaaaattagtcaggagtggtggcacatgcttgtaatcccagctactcgggaggctgaggcaggagaaccacattgaacctgggaggcggaggttgcagtgagctgagattgtgctactgcgctccagcctgggcgacagagcaagactctgtctcaaaaaaaaaggctacgtttgagtatttttagtatatctacagaattgtgcagccatcaccacaatctaattctagaacattttcatccccctaaaagaaaccccacacccagtcatgccactttccccatcctcagggctactaatctgttttctgtctctgtaggtttgtctattctggacatttgtataaatgaaaacatacaacatattgccttttatgactgttttcttcacttagcataatgtcgtcaaggttatggcttttattttatttgcataatttgtagatgccaccaaacccatctgtgtactggtttctgtccattcttctctcatgccatatagtgagtcctctcatgaaggaagtccaaggcatttttcagctgacaaatgtttccttttgtaaaactttgcttgtgcctccagtctgcaaatccagtttctggaggaagcgcgttagtcaaacactgtggctcacttttctgcctccatatctgccatcttggcctcactctctcctggtctaatcctctctaatctgaatttcaggtcctctcatgctgaatgcttcagtgtgtcatgtggctctttactaaagcagaagtgatgttgctatggcatcacggtccctctccctccatcctcattatggccagaacttgcttggtctccatctgtgtgcactcagcctactttgttcattgtaattgtcccacctctgctaggcttcttgcctctacttcatggaagtactgccctatccagtctgtttgaaaatggcaagcacatttttcctaaataatttgcttccattttctgtgctctatactttgcagatgtttgctctcatactgagtctttttggtaaaattccattcccttggtatgataatttctttttttctctatcctcatccttgagtcctcatccagattcacccagccttggtgttcacccacggtttccaaatttcctctggcccatcactgtctacctgggcacaacaggagcagggcactcaggcccatagctagaggccaggggatttgcacagctctatggccaggtgccaacatccagcaggtgctcgtctgaggtggttccatgcagtggatagaactctctccttcccactcatcctccctgcttctccactctgaagacagggccacgaagtgcagtcctgtgaggtttgggtgactaggatgcagtgtcccacattcagttccttctatttaagactccatggcttagaagacatggagtcactgcctgcaaacagaagaaggacagaggagcaaagggagatggaggtgaagtgtcagaagaccggctgctatggaagcagggcccaggcaggacagcaagggcttcccattggcttattgataccaggcttccatctctagtgtagtgggaggggtggggcctctgcgcctaccccaggctggtgggccgtgcttgtctggagaggcaccagtggttgctcggtcctgtggttcatggacattcttctcagattctagcactagcttgaccgttatgcttcattttctaggttgctgagactcttctatgtttccgtgagaatttagagactcctcccctggtgccatcagaaaccccaattctgctgtttaagctcatatatttgtagattacatatccagggatccttattttccttaaaaaaacttagaccatggaagggtcatcttttgatggcacatcagaatatagagaaattgtctgtggggagaagatgcatgcagtcttttagggtgcattactattattttgttgaattttgtaacatcgtaaacgcaagggggatggttagtcggcttcttcctgatgtacggtagggttgccaagcactgtctttcctacatgaccagttgatttttgagtcctcagagacctgagcacagttcctctctttcaatccctccagggttccaacaaagtgaatgaagctcttctgcaaagaataaacagtgccaaaaaaatccacttggttccatgtcacctcagggacaagtttgtcctgcgctttgccatctgttctcgcacggtggaatctgcccatgtgcagcgggcctgggaacacatcaaagagctggcggccgacgtgctgcgagcagagagggagtaggagtgaagccagctgcaggtaggctgccctgggctcattttctgcctgtctccttgtcccgtggcaagagtgtcctcctggagtccagacccagctacaggcccagcccggccactcaatgctgccagagtgcatttccctcaccttaaaataaggaagagaaggccgggtgcggtggctcacgcctgtaatcccagcactttgggaggccagggtgggcagatcatgaggtcaagagattgagaccatcctggccaaagtggtgaaaccctgtctctactaaaaatacaaaaattagctgggcgtggtggcatgcacctgtaatcccagctattccagaggctgaggcaggagaatcgcatgaacctgggaggcggaggttgccgtgagccgagatcgcgccactgcgttacagcctggcgataatgcaggactcagtccaaaaaaaaaaaaaaaaaaaaacaagaagaagagaaaaccatgttaattctggagaagtagaaggaatgatacattgtaataattcttttaaaacttagatttttactttttattcttacatcaatctctataatacttcaggtttcttcaaacagcatttgttgagataacttactatcataacaagctcatataagaaactggtgacctttagagaactaatgaaaacaataaaaagggaatttattatgactcacgacttgccgtccaaattcttgatggtttgaagaaaggatatgtttcgactaccgggcttcttgcagttgtgaggggtttacccctcatagttaaaccctggagacagcatgcagttaatttgtaaaaacaaagcacacattttaaataaatgcagtgttggcaacatggagggtatttaaaattatgtttgtgggaacctagacaaccttagaaagcctcttcattaggttatcttaagaatgtcatcctgttggggtatgtctacctttttctgtttattttcttttttttttttttttttttttgtctttttgtcccatttggtggaagaatctgtgatccctccttagggtctgcttctctttctctctctccctatcctttttgcaatggctcgttcattataacccgtgggggatttagaatctgtggatcatgtaatgcatttcctgattgcctacaatttttatcttctttgctgttgattttaattgtgaatatctgaaaaagtatagtgctcaacaagtcagaagttgaaaatcatgtttggtatatgtgatagacctgtccatggctcctgaaagttgaagccaaagggctaccttctgagtcaaaatgtgccctgagaaccaggtcctttccctggtgcaaccagggccttcccctactcataagctgagaaagacctggggtctgaggaagaactgctgacccagagcaactccaaagtggtatctcaagcatctctggaaggtagtggggagaggcttatatgttgaagttattccattgctctcagcataagactatgtgaggggagggaaagtaccgctgtaagctctgtatgaaacaaatccctatcaggcaaacgctcccgactcgcatttctgcaaccccacgtttgcatctgtctcataagcatgtatcatatcaggatcttattgacatacgcccagaagaacatatgtggagagtgtagctctgaaaatttatcagcaaaggtgtgtttccgataggagtctcagttcctctggagtcattatatttgctgtagattcaaaaggtaaaaatgaaattcaatttttaaaaagatatgtgatacaatagtaagtcctaatgcatgtatgttgttttggacagattagaacaataaaaatcttaatatcttgattttacttgtacttatttgagtttattacacatattcatgtggtcatagctctgagagaaagtaggaactattcttattttacagagggtagaaaattaggcagagattctagttgacactaatacagttttcatcagagaagccagattggcaataaaaattcctttatttaagttcaaactctttggcattgcacaattgtctctgtttcattggagaaattatacgttcgttctttatattcaaataagaagtacatgcaattcttattctttatttttttaatttttatttatttatttatttttttttttattgatcattcttgggtgtttctcacagagggggatttggcagggtcataggacaatagtggagggagggtcagcagataaacaagtgaacaaaggtctctggttttcctatgcagaggaccctgcggccttccgcagtgtttgtgtccctgggtacttgagattagggagtggtgatgactcttaacgagcatgctgccttcaagcatctgtttaacaaagcacatcttgcaccacccttaatccatttaaccctgagtggacacagcacatgtttcagagagcacagggttgggggtagggtcactgatcaacaggatcacgaggcagaagaatttttcttagtacagaacaaaatgaaaagtctcctgtgtctacctctttctacacagacatggcaaccatccgatttctcaatcctttccccgcctttcccccctttctgttccacaaaaccgccattgtcatcatggcccgttctcaatgagctgttgggtacacctcccagacggggtggtggctgggcagaggggctcctcacttcccagtaggggcggccgggcagaggcgcccctcacctcctggaccgggtggctggccggacggggcggctggccgggcagggggctgacccccccaccttcctcccggatggggcggctggccgggcggggggctgaccctcccacctccttcctggacggggcggctggccgggcagaggggctcctcacttcccagtaggggcggccgggcagaggcgcccctcacctcccggacggggcggcaggctgggccaggggctgaccccccacctccctcccggacggggcggctggccgggccaggggctgacccccccacctccttcccggacggggcggctggccaggcagaggggctcctcacttcccagtaggggcggccgggcagaggtgcccctcacctcccggatggggcggctggccgggcggggggctgaccccccccacctccttcccggacggggcagctggccgggcagaggggatcctcacttcccagtaggggcagccgggcagaggcgcccctcacctcccagatggggcggctggccgggcagggggctgacccccccacctccctcctggatggggcggctggccgggcggggggctgacccccccacctccctcccggacggggcggctggccgggccgggggctgattcccccacctccctcccggacggggcggctggcctggcgggggctgacccccacctccctcccggatggggtggctgccgggcagagacgctcctcacttcccagacggggtggttgccaggcggagggtctcctcacttctcagacggggcagctgggcagagacgctcctcacctcccagacggggtcgcggccgggtagaggcgctcctcacatcccagacggggcggcggggcagaggcgctccccacatctcagacaatgggcggccgggcagagacgctcctcacttcctagatgggatggcggccgggaagaggcgctcctcacttcctagataggatggcggccgggcagagacgctcctcactttccagactgggtagccaggcagaggggctcctcacgtcccagacgatgggcggccaggcagagacgctccgcacttcccaaccggggtggcggccgggcagaggctgtaatctcggcactttgggaggccaaggcaggcggctgggaggtggaggttgtagcgagccgagatcactccactgcactccagcctgggcaccattgagcactgagtgaaccagactccgtctgcaatcccggcacctcgggaggccgaggctggcggatcactcgcagtttggagctggagaccagcccggccaacacagcgaaaccccgtctccaccaaaaaaatacgaaaaccagtcaggcgtggtggtgcgcgcctgcaatcgcaggcactcggcaggctgaggcaggagaatcaggcagggaggctgcagtgagccgagatggcagcagtacagtccagcttcggctgggcatcagtgggagaccgtggaaagagagggagagggagaccgtggggagagggagaggggggagagggagagggaaagggagagggagagggagagggagagggacttctttattttttttaatgtagccatatgctcatgctattttttttccctgtaggaatcaaaaattgaagagagatatatctgaaaactggaataagaagcaaataaatatcatcctgccttcatggaactcagctgtctgtggcttcccatgtctttctccaaagttatccagagggttgtgattttgtctgcttagtatctcatcaacaaagaaatattatttgctaattaaaaagttaatcttcatggccatagcttttattcattagctgtgatttttgttgattaaaacattatagattttcatgttcttgcagtcatcagaagtggtaggaaagcctcactgatatattttccagggcaatcaatgttcacgcaacttgaaattatatctgtggtcttcaaattgtcttttgtcatgtggctaaatgcctaataaacaattcaagtgaaatactaattgtgtcagatgatcatcttgttctatgttgtatcaaatttattcttgtgatacagacattccctccaaagtagacaaagatacagcatccttggatgtttttaaacggcattcatttattcagcaaatgttcactgagtgcctagtatatgtcaggcactgttctggatacattaacaatacacaggttttacttgaagatgacttcaacttctgtggaaataaaattagaaccaagagtcaacctggagcaatgagatcgaggtctctgctgtgatgggaaggattctctggctttctgggccttgattttctggtccgacaagtctatctgtcctgtagtatcatgattgataagcaactgaagagtacttctgtaaacattaattccaacaaggatatggtatttactcaatctcactttaagttcactatctgtattgggaaccattttgcttttagaaacatgtgttttaatcctaagattagttattgtcctttgaagactacagaactatcaaaggcactgtcagaaagggtccttgggttattaccaagtatatttgaatttcaaagacctcagatatctatgtgaactaagtgaatgatacgatctgttactcaaaaatctggaaatatgtcagatgccaagtagttccccatctaatttagtcaggtcatttgttctctactcaacagcaaacaagacctgtcctccatcatgatgtggggacagaggctgtgtttttggggcccaccaggggccacccttgataggaccagtggagtgtggagtactcaggttgagttgaggctgggatgtctaaattttacaagattatttttcagcccgtgagttaagattgctgcaagggctccagtgtgagccaccaacatcattgataccagctctctgctttagtgggctcatccagcctcatccacaaatatacttcagaaagatggctgagacctgatgggagggaggagactgggtggcaggggccaacggggatgctgtacagaagcagggcaggaggccagcaagtgactgaagatttcctccctccgaactggctggatccttttgatggagagtctaagacatcagcttagacacagacccaacagagagaaaagcttgtctgatttctcgctcatttctaggtaactcatagcagttcaccccacctcctgacttctccaggttcctccataaagtggttctcagatctgaatcccccagccctagaaacaggaagaataacttcctcccagtttatttaacaagaacacacccatagcacttgctgtatgccaggcactgttacacgtgttttaaagtattaatttaatacttattttaaaattctacgatgcgggctcaattattatgctcattttacaagtgagaaaactgaggcattgcaaggtttagtgatttatcccaaggtcatataatcagtgaccaagctgggattggagcccagtcagcctggctctagaatccatgctcttgcccagtaaactatgctgcaaaagatgccatctgctacccaggattaaccatttctgaaggtaactggcagtgaagacatttattctcttctgggtaaagccctatctttgcctaccaaggtaaagtcttggaccctagaccatccctagggggcccctagaccccacatccaatgtggggaagtttttaaagttttggattattcagactaatctgtggtcaatacagagcatctttatttaaatacatattcaagttagtgtcaaaaagagtgcacaaagtgctgctggcactggaattagatgtttccttactgacctctggtatctcctgataacaggcccctcctgcttagtgttgggaaagtcccagattgatctagacacaactaacagctgatatgaaagatttgtcctggaatcacatgtctcctctc

SEQ ID NO: 25130 - DNA, 3836 bp, Homo Sapiens
ctcactgagtccactctgaacgtgctaaaatgggaaggaggcggtgttttgctgatctgttaaattcttagtgaagtttccttgatttccagtggctgctgttgtttgagtttggtttggagcaaaactgaggtagtcctaacatttctgggactgaatccaggcaagagaaagaagaaaaagaagaagaaaaagaggaggaaaaaggtagggagaaataaagggaggagagaagcacagtgaaagaaaaaaaaagtcccttttcgacatcacattcctgtgttttccctcagcctggaaaacatattaatcccagtgcttttacgcccggaaacaaagagactaagccagactatgggggaaagggagataagaaggatcctggaactttaaagagggaaagagtgagattcagaaatcgccaggactggactttaagggacgtcctgtgtcagcacaaggggactggcacacacagacacacgagaccgaggagaaactgcagacaaatggagatacaaagacttagaaggacagctcctttcacctcatcctacttgtccagaaggtaaaaagacacagccagaaagaaaaggcatcggctcagctctcagatcaggacaggctgtggatctgtggcggtactctgaaagctggagctgcagcacaccccttttgtattgctcaccctcggtaaagagagagagggctgggaggaaaagtagttcatctaggaaactgtcctgggaaccaaacttctgatttcttttgcaaccctctgcattccatctctatgagccaccattggattacacaatgacatggagaatgggaccccgtttcactatgctgttggccatgtggctagtgtgtggatcagaaccccacccccatgccactattagaggcagccacggaggacggaaagtgcctttggtttctccggacagcagtaggccagctcggtttctgaggcacactgggaggtctcgcggaattgagagatccactctggaggaaccaaaccttcagcctctccagagaaggaggagtgtgcccgtgttgagactagctcgcccaacagagccgccagcccgctcggacatcaatggggccgccgtgagacctgagcaaagaccagcagccaggggctctccgcgtgagatgatcagagatgaggggtcctcagctcggtcaagaatgttgcgtttcccttcggggtccagctctcccaacatccttgccagctttgcagggaagaacagagtatgggtcatctcagcccctcatgcctcggaaggctactaccgcctcatgatgagcctgctgaaggacgatgtgtactgtgagctggcggagaggcacatccaacagattgtgctcttccaccaggcaggtgaggaaggaggcaaggtgagaaggatcaccagcgagggccagatcctggagcagcccctggaccctagcctcatccctaagctgatgagcttcctgaagctggagaagggcaagtttggcatggtgctgctgaagaagacgctgcaggtggaggagcgctatccatatcccgttaggctggaagccatgtacgaggtcatcgaccaaggccccatccgtaggatcgagaagatcaggcagaagggctttgtccagaaatgtaaggcctctggtgtagagggccaggtggtggcggaggggaatgacggtggagggggagcaggaaggccaagcctgggcagcgagaagaagaaagaggacccaaggagagcacaagtcccaccaaccagagagagtcgggtgaaggtcctgagaaaactggccgccactgcaccagctttgccccaacctccctcaacccccagagccaccacccttcctcctgccccagccacaacagtgactcggtccacgtcccgggcggtaacagttgctgcaagacctatgaccaccactgcctttcccaccacgcagaggccctggaccccctcaccctcccacaggccccctacaaccactgaggtgatcactgccaggagaccctcagtttcagagaatctttaccctccatcccggaaggatcagcacagggagaggccacagacaaccaggaggcccagcaaggccaccagcttggagagcttcacaaatgcccctcccaccaccatctcagaacccagcacaagggctgctggcccaggccgtttccgggacaaccgcatggacaggcgggaacatggccaccgagacccaaatgtggtgccaggtcctcccaagccagcaaaggagaaacctcccaaaaagaaggcccaggacaaaattcttagtaatgagtatgaggagaagtatgacctcagccggcctactgcctctcagctggaggacgagctgcaggtggggaatgttccccttaaaaaagcaaaggagtctaaaaagcatgaaaagcttgagaaaccagagaaggagaagaaaaaaaagatgaagaatgagaacgcagacaagttacttaagagtgaaaagcaaatgaagaagtctgagaaaaagagcaagcaagagaaagagaagagcaagaagaaaaaaggaggtaaaacagaacaggatggctatcagaaacccaccaacaaacacttcacgcagagtcccaagaagtcagtggccgacctgctggggtcctttgaaggcaaacgaagactccttctgatcactgctcccaaggctgagaacaatatgtatgtgcaacaacgtgatgaatatctggaaagtttctgcaagatggctaccaggaaaatctctgtgatcaccatcttcgggcctgtcaacaacagcaccatgaaaatcgaccactttcagctagataatgagaagcccatgcgagtggtggatgatgaagacttggtagaccagcgtctcatcagcgagctgaggaaagagtacggaatgacctacaatgacttcttcatggtgctaacagatgtggatctgagagtcaagcaatactatgaggtaccaataacaatgaagtctgtgtttgatctgatcgatactttccagtcccgaatcaaagatatggagaagcagaagaaggagggcattgtttgcaaagaggacaaaaagcagtccctggagaacttcctatccaggttccggtggaggaggaggttgctggtgatctctgctcctaacgatgaagactgggcctattcacagcagctctctgccctcagtggtcaggcgtgcaattttggtctgcgccacataaccattctgaagcttttaggcgttggagaggaagttgggggagtgttagaactgttcccaattaatgggagctctgttgttgagcgagaagacgtaccagcccatttggtgaaagacattcgtaactattttcaagtgagcccggagtacttctccatgcttctagtcggaaaagacggaaatgtcaaatcctggtatccttccccaatgtggtccatggtgattgtgtacgatttaattgattcgatgcaacttcggagacaggaaatggcgattcagcagtcactggggatgcgctgcccagaagatgagtatgcaggctatggttaccatagttaccaccaaggataccaggatggttaccaggatgactaccgtcatcatgagagttatcaccatggatacccttactgagcagaaatatgtaaccttagactcagccagtttcctctgcagctgctaaaactacatgtggccagctccattcttccacactgcgtactacatttcctgcctttttctttcagtgtttttctaagactaaataaatagcaaactttcaaaaaaaaaaaaaaaaaaaa

SEQ ID NO: 25131 - DNA, 18556 bp, Homo Sapiens
aacatagcgcatgtgcttaaaagggaaacaaaagcaggagggggaagggtctagagtgataagagctctagtgagaggctaggcctagagagggacatggagaaatagcatgcggagaggaacggtagaggagcaacgctaacattcagttgtaaataatacaatcatagcagctaatacatagagggactacacgccaagcactgttctcactgtttagccatattcactcatttagcatgcgcagtagcttgaatccggtttttcaattattcattccctctctctgcacgtggccgtagagtacactagagtgggcagaaaataagtcacaaaacagcaaagaaacagtgcttttggaagtaggtatgagacaaactcttttctaggcaaaagtaacccacgaaaatgtgtgtggaaaggccagatcctactattaggcaggatgggaatttgagccattttatttggatattacagaatggggtgaccccagaaaactggaagaactggggaccagcaaatggccgacctgcagtcctgagcagaggatgtaggccagagtggacctagaagataagaaagggaattgaatccagtaagggacagacactttatttttttatttttatttatttatttatttatttttgagatagagtctgatctggaggctggaaggcggggctaaaactcccactcacttacctctaccaacaactaggccaccaagtcatttctgaggactggctcaagaaagcagatttaacttacactggcctagcccaggccaccagatgcatccacggagatccaaatgcatataatcacttgaatcaagatctagacagggacgcgtgcagcaggcttcatctgactgattcctgacacgggagagaaagcctaagctccgaatcatccttcaatgtttacaaaggccctaaatagcagtgggctaattgctgttcctggatttccaggagacctgagacccatgaaggagcaggaaagagcttggggataaaaaattaatctggaacctactggagcggaaggggctgcactcacctggaaaagacaaagttcttgggaactggccacgtaggccaggtccctaagcaattccatcccgcacccttaacaccccgactggtgttgctgggtccctaacattgtctgtacccgcttcggaggttggacaaaatgagtttttcactgccctgcctcaggcctctctcaaaggtctggcccatgatatttggtgtacattgggaccccagcgcccagatatttgaaacggggtggggagcgggtgttgagctgctacatttccaggttctaggtaccctggggaacccctggtcgttgacggaagcacagcgttcaagggcggcagagctcaggtactggaggacacatgggccgcgccgggtctagccgcgggacatccccagaccccagcacggcctcccaggccgaccttccagaagccggcccactgccttccccgggtcccagcccagaaaagcggagaccttcccctccgtttggaagatggactcatcccctacttcctcctggctccccagaagacctggagacctcgggaagtgttctcatctatgttcgctccaacccgggggctcaggcccacctcgatcccgccttcccgggaggtccaggaaggtcccgccgcacccaccccgttggcctcaccctggctcgggcccctttatcatcctgcagctacgctccgaccaggaggcacagccagtccccacagccggctctaccgctctgctcgcaggtttgggctagtctggggcggggacttgggagcgcctaaaacttgcgaggagggcggggccgcagaccggtcctttaaaggttggaagtggccccgaggcgccggcagccctgggcggtcccgggaatcgcacaggacccggctcccctcgcctaagctgctggggggcgccatgggccgctaccgcatccgcgtggccaccggggcctggctcttctccgggtcgtacaaccgcgtgcagctttggctggtcgggacgcgcggggaggcggagctggagctgcagctgcggccggcgcggggcgaggtcagcgcggggagcgaggggagctagggcagcggggaccccgggcccaggcccgggtcgagctgggctcgcggcgggagggcgggaggctgggggcgaggtgacagcgcgacctcgcggactgggacttccacgaagctgggacgaggtgggcaagatcagggacagggtccgcagctgggatcccgggctgggctcaaccccatctccctttcccgcccctggtcccggcagcccccagctccttctcccagtgacccagagccaatgtaagtatgaggccagaggtcagacgtgaagctcctccaagaaccggcgcggggagagctcagttaatgggacccacgtgggcgatgctgctccagcatcagctccaggcgctgcgggccctcgtcctccacccgactccgggcgtctgagacccaaagagcaggttgtgcgggggcgggaacgaggcgatgctgtctttggaggccctgagaaactgaggttgcacaggagcgcggctctgtcctcgaaacggcctcagtcgggtccctcctactaagtctggcctgggtccggcctgcacaggaggaggagtttgatcatgacgttgcagaggacttggggctcctgcagttcgtgaggctgcgcaagcaccactggctggtggacgacgcgtggttctgcgaccgcatcacggtgcagggccctggagcctgcgcggaggtggccttcccgtgctaccgctgggtgcagggcgaggacatcctgagcctgcccgagggcaccggtgagcaggcggcgttggggaaggaggcacaaggtcccgggaactgctgcggggctaggagggcagagttaaggacggtcggagcagacttagaggaggtatgggcccagggcaggtgaaatgtagggatcccagggtgctggacagaaaacgggaaggagttatgaattcccaaagttttacacaggctaagagaggctgcgtgtgaggctggaggcagggagtaagtgatctggagatcccatcttccaagaaggcaaagacagaaagtgggagttgcagcgatccaggaaaacagagaagcaaagtgaaagtaggaaggagatgtaaaggtgactcagaagtcaggtgaggggaccacatggaacaggagggggtgggtgacccgtgagagcagacagctaagggaagaaaacataggatgctggagagctggtttggttggaataacacggaagacacccgtgaaagacaagaagcacactggcccgcaggagatgaggaggaatgaggatggcaaatagtgaattttttttttttttttttttgagatggagtcttgctttgttgcccaggctggagtgcagtggcgcgatcttggctcactgcaacctccacctcctgggttcacgccattctcctgcctcagcctcccgagtagctgggactacaggcaccccccaccacacccggctaattttttatatttttttttagtagagatggagtttcaccgtattagccaggatggtctcgatctcctgacctcgtgatctgccctccttggcctctcaaagtgctgggattacaggcttgagccaccacgcccggcccaaatagtgaatttttaaccatgggtaatgagtaaaagagagatgaatccagagatgagtgagggcagtagggatggaacatcaaatctatgactttgagacaggtgagtgtaaatgcagaaaagacccagaataagtccatagatacagattatgatagtaaatccagaaagatgaggtttaaaaaaaaaaaagcaaatgtagaatcttttgaggacaggtgaaggcgtggcaggtgaggtttaagatgtgaaattaatcaaagcaatctgtagtagacagtaggtgtaggtgtataggtgactaagatttcatcaccttaattaaggtgatttttttccaaccatagatattgatgaagtaaggccaggtaggggaagatgagtgaaggagcaagaaatggtggcaaacaggaggtttttatctacaggcaaaggatgagggctgaaataagagaaagcaggagtgcaaagttggcaaagatgggataaacgtgtctggtggataatcaaatgaggcaaagccagagataaaagcaacagtgcatggctgaaaacatggaatacggctaaccacagggagatgaggacaagaggcgggcataggaccagacagagccgtgaggccaattgtcttgatgtctccccagcccgcctgccaggagacaatgctttggacatgttccagaagcatcgagagaaggaactgaaagacagacagcagatctactggtgaccacccaccccttaaactaaccccgccaccactgtcccaccccttccctgcccctgcccctgcccctggccccatcactgaccatgacatccttcctgaagctttgtccccaactcctagctgggccacctggaaggaagggttacccctgaccatcgctgcagaccgtaaggatgatctacctccaaatatgagattccatgaggagaagaggctggactttgaatggacactgaaggcagggtgagaaaaaggctagacctcggagtgaaataagggctgggagggccaagaatgatgatagacggtgagggactgagggatcagctgatgagttaagcctcaatacctgtcctagggctctggagatggccctcaaacgtgtttacaccctcctgagctcctggaactgcctagaagactttgatcagatcttctggggccagaagagtgccctggctggtcagtggttccccgaggtctccataatcccttaatggcccctctggatgactcatcacactccacagtcccccgtaactctttgcaagaagagaccttatcatatctggtcaactcagagaggccttgagaatgaaaacgcagaagctgggttcagggagggttatatacctgaacccctggggtagattttggagaagggatatgcaggctgtggtacatatatcctcctttcaccgcccaccaaagagaaggttcgccagtgctggcaggatgatgagttgttcagctaccagttcctcaatggtgccaaccccatgctgttgagacgctcgacctctctgccctccaggctagtgctgccctcagggatggaagagcttcgggctcaactggagaaagaacttcaggtacctctccttcccctgcctggcactgttctctccttagtagtgtggtgagaacggacagagagaatccaaactgagtcagaggaaggctgcagtactgcgttgccccttggtgcagtcctgtgctggaaaaatacagaaataaaatatgtaggggaagaaactatgaggagctcccagcaggaaggggaaaatagaatggatccccagcacacagagaggggctggagatgttagcaggaacagtgacattgcctggccgcagtgttctggactccagtgttcatgggcagggagaaaagtgaggaagtgccatcaggtggggagaatcggggaggctttctagaaaaagagagcggggtttggaagcaatggactgtactgaggacaagcctaggcaaaatgtgtgcgtatgcatgtgtgtgctgtatgcggtggcaggggtagtaggggaagctctctggaatatttggcagaggatgtgagatttgaatagggaatgaaagagcatttgctgagctgataggagccaaaaccagagcgcagaccattcgggaatgatcagaaaggggcctggccatttgacaggtggtcagtttacaatgcctgtgatgccaactggattgagcaggcctggttccaaacccagatctgccaccacatccacacacaagacatctaccctcaccagactgtttcttcactttaagatgagaggaactggaccaggggctctagttctcccaacaggactccggtactgatgcaggagaatggcaagaagctagactaaatctcttgccctttgccccggccccctgggggtagactttgaactctaaaaatggatacatccctcctgtccccagaatggttccctgtttgaagctgacttcatccttctggatggaattccagccaacgtgatccgaggagagaagcaatacctggctgcccccctcgttatgctgaagatggagcccaatgggaagctgcagcccatggtcatccaggtaagggccccagacctctcccacaacgttgcactctgttcacctcaacctctgctcccagggacccaacccccagctcttggctcccaaaccccatcctcactcagtgagacttgtcttcatgtcactatttgcctgtaccctcgtctcccctgcctcatccaactagaattactttttcaagagtcaaaatggcctcttggagttctcatcctgtatccaatggtcctcacacttcagtgtgcatcagaatcacctgaatgcctgttgaaatgcagatttctggatcccatgaccagactttctgattcagtatgtctggggtgggaactaagagtttgcgtttttataagttccaaagtgatgctgacactaccagttcaggactacactttcagaatcactatctcatctctcagtggcctctggctctgaaccctcgccatctcttgaatatcttttcttgcaatttcttttttttttttgagacagaatctcactgtgtcactcaggctggaatacagttgtgtgatcttggctcactgcaacctgcgcctcctgggttcaagcaattctcccacctcagtccctccagtagctgggaccacaggcatgtgccaccatgtgggcctggctaatttttgtattttttgtagagatggggtttcgccatattgcccaggctggtcttgaacttctgggctcaagtaatctgcctgcctcggcctcccaaagtgctgggattacaggtgtgagccactgcacctggccttctctcactattcttaacagtcaggtgacaagaactgtcaataatcttacacctcctacttctccttcacattccaccaccatctgagcgccgaccccaaagcagcaggtttctcccacaccactgttagggcctccttctggacccccttcttccagtccctcctgccttccacctgacatcagggcactccagctagcgagcggcaggctgggagggttcacagtcctcctgctagactataacctcctagaaggcaataatcttacttagtcatctctgtttccccaagaatgctgactataatgtcatatacggaatgggagttcaataatttctctttctcccagattcagcctcccaaccccagctctccaaccccaacactgttcctgccctcagaccccccacttgcctggctcctggcaaagtcctgggtccgaaattcagatttccaactgcacgagatccagtatcacttgctgaacacgcacctggtggctgaggtcatcgctgtcgccaccatgcggtgcctcccaggactgcaccccatcttcaaggtacttattaatctattaaatcacatatccctcagaccccagagagaggaacagccccatatcaaaagatattgcagcagcaaaaactctttgtagcaatttgtgagtgaagaggagactgtctcaatatcttgagatgttgattttaattaagtttattaagtttagtcacttaacattatataggaatcctctgaaattctcagagatctgacagtctagcagtgcgctcacagtagggcttgaacactgctagtaaaacaaaagccatattcctaccttagatctagtatttagccagaaaaacaagtgatgcccataagaaccaaccagagaacagtatctggtactagagtttgaaatcacaagggacagcctataacagtatagtattgatgaagaatgtttctacccaattgaggagtcagctaagtagaaacagaccaaaaggcaaggaagaacagccagcaagccgctcatacctgcccaacagcaaggtggatagagatgtacgttagcatggtaatgacaggaatgaaaaggaaagaatctaaaacgtagtgaagggaggaaatggtagctgcagcgtgcctgggtgcaagagagagaaaagccagaagtccaagcttctgccacacctgtaagtccctggggcaggtgtgttatactgacctagaaatactgtggttttaagagctgggtgtggtggttcacgcctgtaatcccagtgctttgggtggccaaagcagtatgattgcttaagaccaggagttcaagaccagcctgggcaacacagcaagtcccggtctctaaataaaaagaaagaaagaaagaaatactgtaattttataaaacagtgagttccatatatattgctgggagaaggcaaaataagacctgtgcttgcttaagaaaatgttcttaaaatcttgatgatactttatatacagggaactttggcagagggagcacaaaaatgatacaagcttacaaaccagagtaattgtcagaaacagtaaagttagaagaaaccagagtcagcaaaaatgaggtgtttggttttaggtacatggagtttgatgtattggcaagatatgcaagtatgtcctgggtaaaaacaaccaaattgtgtttcagctgggggcctccaccaagaccccccaagcctggccagtatagctgtgccgcctctggaattttccccttcggtaacatagacaagatggagaccagtctgatgaatggaatcttggatttcattcatctcatgctgtctcctgcttccccatcctctgctccacacgaacaagtgaagcctctattcacacttacaattccttttcctagttcagtcctctccgtgtctccactcaccacagtaatgccatgccccagcggacagctgagttgctggcagatgcacacaagggtcaagcctgcagatgtcttaacagtggcctatgcaggctctgactttggattgctggggtcttagtcctgaaccccggcctcaataatttccagatgtcctcacatgttccatcgtgaggttattaaaggttaaaatgacttaatggtgtgacacaagctaaatgctacaaaaaacattagttcttgcaaatttttttttttcagagacaagttctcactctgtcacccaggctggagtccagtggcgtaatcataactcactgcagcttcaaactcctgggctgaagcgatcctctaacctcagccttcagagtagctgggactacaggtgtgcaccaccatgcctggctaattttttttattttttgtagagacagggtttcgctatgtggcccaagctagtctcaaattcctgggctcaagcgatcctcctgcctcagcctcccaagtaacctggattgcaggcacatgccgccacacccagctagttcttgcaattattattattagggactgtttatccttaggcatcctttctcctcatgtggactttggcctttccgtgacatttggcatctttcatgaatcttctgaaaagcttcaggttaatgtgagctgctttggtatcttaacaccaaaggtgtcattggggtcattgccagtgtccagcatcaacaattcagacaagcaccaaaactgcttgaaacctgcatgttaactatgtggaaaggaagacaaacagtctaagataaaaagaaacgcatgtaaggaccatgccttttttaatagctaaggaaaatattttaatatttttaatttaataaattttaatttattaaaattaaaattttaatttaatattaaattaaaattttaattttaattttaaataaataattaaaatttaaataaatttaaatttaaaatttaaatttaattttaaataaacatttaaatttttaattttaatattaaattaatttaatttaatattaatttaacttaatttaatttaatattaatttaacttaatttaattaatttaatattaaattaaattttaatatttttaattttaatattaatttaatattaaattaaattttaatatttttaattttaatattaatttaatttaatttaatttaatattaattaatttaattttaattttaattgcttcaatattaaattaaattttaatatttttattttaatattaaattaaaattttaatttaaaattaaatatttaatattaaattaatttaaatttaatattaaattttaatagctaaggaaaatattttaatattaaaaaaagaccatggccttttttcaatagctaaggaaaagcaggagaagaggggcccaacagtgcttaagtaggggtggagaaagatttgcttaaacaggtagctgaatatagctcttctagttctgacagaaagtattctccccatccatcccctaaagaaacccccaactgtgaaacaactaaaagatggagatgcagctttgatcataagcagagaggctagtttaagaggatgtgaatgacagaggaggtagcaaagaaaatcagaaagggctgattcataaggcacctatactcaaggtagaaacaatgaagcagacagctactattccaggactcttatgtgtaatagacactctccaacatcacttaggtgagcatcaccacagcccctgagataagagagtctattgctgccccctgttgacaaatgaagagattgcagattaaaaggttattaacttggccaagtctcaaaatgaggagtaaagtgtaggttaaaatcctggtcagtctggctccagggcccaactcacagggaagttggagagcacaagagtgagtgatcagaacagcaggagatcagcctgtaaaggaaagcatcaagaggagaaggcgccatgctgggtgccaggccctaccaggaaggacccaagcatggcctccaccagtcacgccctccaatctcctcctctccagttcctgatcccccatatccgctacaccatggaaatcaacacccgggcccggacccaactcatctcagatggaggaatttttgataaggtgaggagggtacggggcatgggactgcctcatccatctctccatgatctgccactttcaggatccaagatcaactatgtgtgaatgtcctcactcttaacctatgaacctgtcccttttatacccatgtcttttttttttttttttttttttttgagacagagtctagctctgtcgcccaggttggagtgcagtggcgccatctcggctcactgccatctccgcctcctgggttcaagcgattctcctgcctcagcctcccgagtagctgggattacaggcgcccgccaccatgcccagctaatttttatatttttagtagagatggggtttcactgtgttggccagactggtctcgaactcctgacctcatgatccacccacctcagcctcccaaagtgctgtatacccatgtcttaatatctgaaaatcccacatttgccccactttatggaagatgtgttggttctccagccctgtttccccctctaagacctgtgatctcctgtcccaggcagtgagcacaggtggagggggccatgtacagttgctccgtcgggcggcagctcagctgacctactgctccctctgtcctcctgacgacctggctgaccggggcctgctgggactcccaggtgctctctatgcccatgatgctttacggctctgggagatcattgccaggtgagtaaggaggagctgagaaatggtggggtgggggggggggggggctctggcctgaggccagcatggggcaaaagcaagaaggtccagaaaggagaagcagagaactcaatcctggggagagatgaggaaaagtgaggacacagtgggtggctctgaaaatgaggagactgggatgaggcagagagaggaggtgaggggagctgtggggggagactgggggaggtgtctggaaaaatcaggattttctgacgatgtatgacagcaaccatgcgaattcctagaactaaggacccacatcttccatgagatgctagtgtgtttagagggctgaggatgtcccaaaggcgaggtgtcttcccagatactgtggaagcattgggcagatgccacagaaagaggaatagaggtcagaggcgggggctttctgccctcaagtgccttttccccctgggcaggtatgtggaggggatcgtccacctcttctaccaaagggatgacatagtgaagggggaccctgagctgcaggcctggtgtcgggagatcacggaggtggggctgtgccaggcccaggaccgaggtaagatccattctagagacagaagaagctcctgggagactctgccagggcgccttcccagccctgcccttctggggacaggaccccagcctctcatcacgcctcccttcctccctccacacgggaaagcatgtgtatcccattcccacctcctccgactcaggacaattctagagacccaaggactgtcctcctcagagaccctggccatcaacccctagtcccactacaccccagtcacagatgcccctgaactgccatatcctggggccccccaggccatatccacagctgggaggggtctgcacagtccctgctgggctcatattctctcctgatggttccgttttcctaactgaggatgtaaatgggaagattttccctccgaagcccacaaggacccaccctggctttccctccctctcttcctgcctgccactgtgcagcacgcacagagggtccaggaataccgcacgcttgctacagtgcaaggtcagctcttgatgcaagctcaatcctatacatgctttgcctcaaacccaaactcagcaccctgatccttggggctcaggtttctttggctaatccaactcttccaccctaaccaccccttggccaaaatctagccactacctttagtcaactctcactccccacatttgaacctctgaggaagaaaaagcctttgctgagctcttaggtttaatcacacaggcaccagcctggactgctgtcactcatccttcggcccctccccctcacacttcagatctaggctgtgaataccatcctctgcctctgtgagacaactacagacatttactggggagcccttatggcgaatcctgggaatgtggcaaacctccttaccctggagggagcctctccctggggaatctgcaccaccctacccttccaggaccaaactctctctagttcttctcagtacagtcccttaggctcctagcagtttgggctactacaacaaaacactagctgggcacagtggctcacgcttgtaatcccagcactttgggaggctgaggtgggtggatcacgagctcaggagttcgagaccagcctggccaacatagtgaaacccgtctctactaaaaatacaaaaattagccaggcgtcgtggcacgcacctgtaatcccagctactcgggaggctgaggcaggagaatcgcttgaacttgggaggcggaggttgcagtgagctgagatcacgccattgcactccagcctgggcaacagagcgaaactccgtctcaaaaaaataaaataaaaaaaaccacacaccatagactgggtggcttataaacaacagaaatgtattcctcacagttctggaggctgaaagttcaagatcaggttctggtgagacccctcttccaggctgcccacagccgatttctccctgtatcctcacacagcagaaagatagcaagctagcactctgtcctctgctcataaaggtatcaaacccattcaggagggctgcaccctcacaccctaattatcatgtggggctccacctccaaataccatcacaataggattagatttcaatataaaaatttttcggagccaaagacattcagttcatgacacatgttaactttaacctccactaaccaccctcccccctgttctctttcagttctcatagctcacttttgtctagttttcccagcagacattttagaggctaaaattaaaaatgccatgggattagcagtcaggaacctgagttcaagatcagcctctgccttttcccaactatgcagtcctgacagtttattctctatgggctttgattttcttacctataaaatgagagtaattatatttattccacttaactgataagattattgggtctcccagcactttaggaggccaaggtgggcagatcacctgaggccaggagttccagaccagcctagccaacacggtgaaactccatctctactaaaaatacaaaaattagctgggcatggtggtgggagcctgtaatcccagctacttgggaggctgaggcaggagaatcacttgaacctgagaggcggaggttacagtgagccgagattgtgccactgcactccagcctgggcaacagagcaagactccgtctcaaaaaaaaaaaaaagattatcgggtctctgagcccccatatccactgcaaaatgagtggactgagataacctttgtgggagcccctctcagctgtgacactggaaatccatgacttattccccacattataacgcagacacttgtaattctgtctgggaataggattacgcattcctaaattatttatttattttttaatttttaaatagagacaggctcttgctctgtcacctgactaccagcaatcctcctgccttggcctcccaaagtgctgggattacaggcatgagtcaccgaccacgcatccctcaattggtttttttttttttttgagacagactctcgttgtgtcgcccaggctggagtgcagtggcgggatctcagctcgctgcaagctctgcctcccgggttcacgccattctcctgcctcagcctcccgagtacctgggactacaggtgcccgccaccacacctggctaacttttcgtatttttagtagagagggggtttcaccgtgttagccaggatggtctcgatctcctgacctcgtgatccgcccatcttggcctccccaagtgctgggactacaggcgtgagccaccgcgcccggccgcatccctcaattcttaaccactttttgaggcaagggatatttggtcactcagaacttttcagcccccaatccttccataacaataattattacttacttattgagcatttattacagaccaggtgattttgatacatcatctcatttataatgtaggtatcgtccatattttacaggtgaaaaaaactgaggttcaaataggttaagctggcctatggtaactaagtgtaagtgactgagccaggacttaaacgcatgtctgatgcaaatacgtctaaataaaataaacaaattcatcaattctaaaatatgggcatcccaaaacaacagcctttgttcctctcctcttatgctgtagcttctaactgctattcctttcctgcccaggtttccctgtctccttccagtcccagagtcaactctgccatttcctcaccatgtgcgtcttcacgtgcactgcccagcatgccgccatcaaccagggccaggtatggacagctgaaagcccaggtccctgaaggcaaggtgacctgagggagagatgggagttcaaaccctaagtaccagggttctagggttacagtttcttcctccagctggactggtatgcctgggtccctaatgctccatgcacaatgcggatgcccccacccaccaccaaggaagatgtgacgatggccacagtgatggggtcactacctgatgtccggcaggcctgtcttcaaatggccatctcatggcatctgagtcgccgccagccagacatggtgagaggggactctcgggagagggaaatgacagttggaaaggaaacatcagagtgaggggctgggctctaggtgcgtttgtctttagaaactgactgatcctttgttctgtctcaggtgcctctggggcaccacaaagaaaaatatttctcaggccccaagcccaaagctgtgctaaaccaattccgaacagatttggaaaagctggaaaaggagattacagcccggaatgagcaacttgactggccctatgaatatctgaagcccagctgcatagagaacagtgtcaccatctgagccctagagtgactctacctgcaagatttcacatcagctttaggactgacatttctatcttgaatttcatgctttcctaaagtctctgctgctaaggctctatttcctcccccagttaaaccccctacattagtatcccactagcccaggggagcagtaaactttctctgcaaagactagatccttttttacgctttgcagaccgcatagtcactgtctcaactactcagctctcctgctgcagcatgaaggcagccacagacaacatggaaatgagtgtgactatgttccaataaaactttatggacactgagatatgaatgttacatcacaaagtagtcttcttttggtttattcaaccatttaaaatgcaaaaaaaatccacaaacaaatgtgctttgtttgagacatgcacagccaggctacagactggatttggcccttgaaccctgcactagcctgaggccctgaccctacttccaaaacatccaagatcatggagcagggggatttcttagaaaaatcagcttacctcagctaactctccattcccaggaactaaccttcatgcctggtggccaatgtacaaattcctgactcagttctttggcaaattccttccacccatatttctcctattcacccatgtaccccaaaagtccctgaataagaatcatgtttttggggcagaatacaaaccactgccccaaaatggcttctttctccaaacagtcccagatgaaaggcacataattcatgtcttaaggctacttttccagcccctttaatactctgggatctatgtgtttcccacattccaagttatctttcacaagccttttaagaacaacatgcacaaaataaatggacaagaactacaaagttattctagccaatgatagtgtttatttgttaggtcctggggtctcaaggtcaaatgatccctctcaattattctgaggtcactgtcctcactagagtgggtacaacttgctcactgcaaaactgtgttcttcaaacatccctacttcttttcttttctttttttttttttttttagaagtagtctctatcgcccaggcgggaatgcagtggcgccatctcagctcactgcaaccttcgcctcccgggttcaagggattatcccgcctcaccatcccgagtggctgggatcacaagctcatgccaccacatccagctaatttttgtaatttttagtagagacagggtttcgccatgttgacctggctggtctcgaactcccgacctcaggtgatccgcccgcctcgacattcctatttctaaataattattacagatctgtcactcaccagttaaacatacaaacggcttttttggaggggatgacctatttatatttttaaatcttatatcctaccttattcaaaagtcctatcagttttcctagtttagagaagcaaagtgacatttttgtgtacatttaacaggactgcttaccttcacaacctgctcagtcggctttccctggacttctcctaaccgcccatttttcctggatttggcaccgagagttacagtatttcacgtgcgatgataaaatgttacttaggagaaacagttccaataccaagaaacttcagcaattttaaagcattttaaagccacaaaaccatgccggatccccaaaagggggtcctaactcctttacactgtcagaatctcaattttaaaagggaggagtagagaagagatagaaacgctctctgttggtgaaaatctgtcttacttaccatttccccaacacaggagagactaaggaatttcaggtaaaaatcagatggctccaatcctccgatactaagagcccatcgccccagttcccaggagttccgccagttagactttttcccccatggcctcgctaaggctagttcctcgtcacgtgacgtgacaggcttggtcacgtgacataccagctccttccattcccgtgtgcggggggagggggaccaacaaaccggaggccctcgctcttccaatactcacgccctagctacagaggtcaaggaaggtttccccaggagcagttttggtttcagacggcgccgtctcccgcgaaagtcctgagaggagcccagccttttccgcctgccgcccccggatgggatggttgaggccggggccacgccccctctgcccccctgcgagggcatcctgggctttctcccaccgctttccgagcccgcttgcacctcggcgatccccgactcccttctttatggcgtc

SEQ ID NO: 25132 - DNA, 3659 bp, Homo Sapiens
aactctattttaagaacctctcaaaacgaaacaagcaaatcatggagaagaatggaaataaccgaaagctgcgggtttgtgttgctacttgtaaccgtgcagattattctaaacttgccccgatcatgtttggcattaaaaccgaacctgagttctttgaacttgatgttgtggtacttggctctcacctgatagatgactatggaaatacatatcgaatgattgaacaagatgactttgacattaacaccaggctacacacaattgtgaggggagaagatgaggcagccatggtggagtcagtaggcctggccctagtgaagctgccagatgtccttaatcgcctgaagcctgatatcatgattgttcatggagacaggtttgatgccctggctctggccacatctgctgccttgatgaacatccgaatccttcacattgaaggtggggaagtcagtgggaccattgatgactctatcagacatgccataacaaaactggctcattatcatgtgtgctgcacccgcagtgcagagcagcacctgatatccatgtgtgaggaccatgatcgcatccttttggcaggctgcccttcctatgacaaacttctctcagccaagaacaaagactacatgagcatcattctcatgtggctaggtgatgatgtaaaatctaaagattacattgttgcactacagcaccctgtgaccactgacattaagcattccataaaaatgtttgaattaacattggatgcacttatctcatttaacaagcggaccctagtcctgtttccaaatattgacgcagggagcaaagagatggttcgagtgatgcggaagaagggcattgagcatcatcccaactttcgtgcagttaaacacgtcccatttgaccagtttatacagttggttgcccatgctggctgtatgattgggaacagcagctgtggggttcgagaagttggagcttttggaacacctgtgatcaacctgggaacacgtcagattggaagagaaacaggggagaatgttcttcatgtccgggatgctgacacccaagacaaaatattgcaagcactgcaccttcagtttggtaaacagtacccttgttcaaagatatatggggatggaaatgctgttccaaggattttgaagtttctcaaatctatcgatcttcaagagccactgcaaaagaaattctgctttcctcctgtgaaggagaatatctctcaagatattgaccatattcttgaaactctaagtgccttggccgttgatcttggcgggacgaacctccgagttgcaatagtcagcatgaagggtgaaatagttaagaagtatactcagttcaatcctaaaacctatgaagagaggattaatttaatcctacagatgtgtgtggaagctgcagcagaagctgtaaaactgaactgcagaattttgggagtaggcatttccacaggtggccgtgtaaatcctcgggaaggaattgtgctgcattcaaccaaactgatccaagagtggaactctgtggaccttaggacccccctttctgacactttgcatctccctgtgtgggtagacaatgatggcaactgtgctgccctggcggaaaggaaatttggccaaggaaagggactggaaaactttgttacacttatcacaggcacaggaatcggtggtggaattatccatcagcatgaattgatccacggaagctccttctgtgctgcagaactgggccaccttgttgtgtctctggatgggcctgattgttcctgtggaagccatgggtgcattgaagcatacgcctctggaatggccttgcagagggaggcaaaaaagctccatgatgaggacctgctcttggtggaagggatgtcagtgccaaaagatgaggctgtgggtgcgctccatctcatccaagctgcgaaacttggcaatgcgaaggcccagagcatcctaagaacagctggaacagctttgggtcttggggttgtgaacatcctccataccatgaatccctcccttgtgatcctctccggagtcctggccagtcactatatccacattgtcaaagacgtcattcgccagcaggccttgtcctccgtgcaggacgtggatgtggtggtttcggatttggttgaccccgccctgctgggtgctgccagcatggttctggactacacaacacgcaggatctactagacctccaggaacagacatggaccttctctccagagctcctgagtggaatcaagttcttgtctttaggatgaccgtttcttaacaatcaaatctggtattgaactgcaggtgactttggcagagaaatgttttcacttttggtctcctcttccagagtcacctttccccactcctatttttgtagatgctattctttctgatgtcttcttactaggggtcattttagctcaaaccctgtaagttacagtcacaattttctgtgccaaagcagctacaataatagagaggaagccttcttagaactctgcttactaatgtattaataccactgagaccttcaggccttgctgggatatcacttcatcctgaagtttgcattaataatccttccaggccgggcacagtggctcacgcctgtaatcccagcactttgggaggccgaggcgggcggatcacgaggtcaggagatcgagaccgccctggctaacatggtgaaacatggtgaaaccccgtctctactaaaaatacaaaaaattagctgggtgtggtggcgggtccagctactcgggaggctgaggcaggagaatggcatgaaccccaggctggagtgcagtggctcaatgcaacctctgccccccgggttcggtgattctcctgcctcagcctcttgagtggctgggattgcgggcacatgcaccacgcccggctgatttttttttgtatttttagtggacagggtttcaccatgttggccaggctggtcttgaactcctgacctcaggtgatccgcccgcctctgcctcccaaggtgctggattacaggtgtaagccatcacacctggccctagtgacaggtttttatgggtacttttagatgatctaagaaatcatgtgcatatatctttcagatttctattttggaaaatgaaggtttctacaacatattgtttcagtgttcaaataaactgaaggactcaacattacatttgaactatatccttcctagtgggttagtgtgaaaaagagtttggctgattcctaaaactctgccagccctgcagtaatctccaggcctggttattgttcagacattccatggtgattcctgggaaggaagcttggctgctcagtttctgagtctggggtgagataatgttctggaaggacatctgttctttggtgtaatctctcatggtgaaatctgctctgtacatcagacaattgcattgctaccaagtttcataccaaatatttgaaaggatggtattgaatctaaaccaaatattaggtttttattaaactcatgggaaggctaatatattccaacgtaaattattacatatggttaagtaattgcatgttaatttattttaatgtaaatatttttgttactgttctgagccaaattctaaagaaaaaataaatacatttccttgttgaaaaaaaaaa

SEQ ID NO: 25133 - DNA, 9129 bp, Homo Sapiens
ggccgcgggctgcatgggcagcgcccgcgccccgccgctgagccgtcgcggagccgcgcagccctcggagcacgcccgtgcagcctgccaggactcttccagacacgggatttgtcggtgaacaacgcagagctgatgcagacataatatatacagccctgctctgggacacacctccattggatttaaaagacagtcctcgtcagcactgactttcagctatggaatcgcagacggttgatgatgaagcgccggccgtgtaaatgaagatcgggtgaggagcaggacgatgcccaagggtgggtgccctaaagcaccacagcaggaagagcttcccctcagcagcgacatggtggagaagcagactgggaaaaaggataaagataaagtttctctaaccaagaccccaaaactggagcgtggcgatggcgggaaggaggtgagggagcgagccagcaagcggaagctgcccttcaccgcgggcgccaatggggagcagaaggactcggacacagagaagcagggccctgagcggaagaggattaagaaggagcctgtcacccggaaggccgggctgctgtttggcatggggctgtctggaatccgagccggctaccccctctccgagcgccagcaggtggcccttctcatgcagatgacggccgaggagtctgccaacagcccagtggacacaacaccaaagcacccctcccagtctacagtgtgtcagaagggaacgcccaactctgcctcaaaaaccaaagataaagtgaacaagagaaacgagcgtggagagacccgcctgcaccgagccgccatccgcggggacgcccggcgcatcaaagagctcatcagcgagggggcagacgtcaacgtcaaggacttcgcaggctggacggcgctgcacgaggcctgtaaccggggctactacgacgtcgcgaagcagctgctggctgcaggtgcggaggtgaacaccaagggcctagatgacgacacgcctttgcacgacgctgccaacaacgggcactacaaggtggtgaagctgctgctgcggtacggagggaacccgcagcagagcaacaggaaaggcgagacgccgctgaaagtggccaactcccccacgatggtgaacctcctgttaggcaaaggcacttacacttccagcgaggagagctcgacggagagctcagaagaggaagacgcaccatccttcgcaccttccagttcagtcgacggcaacaacacggactccgagttcgaaaaaggcctcaagcacaaggccaagaacccagagccacagaaggccacggcccccgtcaaggacgagtatgagtttgatgaggacgacgagcaggacagggttcctccggtggacgacaagcacctattgaaaaaggactacagaaaagaaacgaaatccaatagttttatctctatacccaaaatggaggttaaaagttacactaaaaataacacgattgcaccaaagaaagcgtcccatcgtatcctgtcagacacgtcggacgaggaggacgcgagtgtcaccgtggggacaggagagaagctgagactctcggcacatacgatattgcctggtagtaagacacgagagccttctaatgccaagcagcagaaggaaaaaaataaagtgaaaaagaagcgaaagaaagaaacaaaaggcagagaggttcgcttcggaaagcggagcgacaagttctgctcctcggagtcggagagcgagtcctcagagagtggggaggatgacagggactctctggggagctctggctgcctcaaggggtccccgctggtgctgaaggacccctccctgttcagctccctctctgcctcctccacctcgtctcacgggagctctgccgcccagaagcagaaccccagccacacagaccagcacaccaagcactggcggacagacaattggaaaaccatttcttccccggcttggtcagaggtcagttctttatcagactccacaaggacgagactgacaagcgagtctgactactcctctgagggctccagtgtggaatcgctgaagccagtgaggaagaggcaggagcacaggaagcgagcctccctgtcggagaagaagagccccttcctgtccagcgcggagggcgctgtccccaaactggacaaggaggggaaagttgtcaaaaaacataaaacaaaacacaaacacaaaaacaaggagaagggacagtgttccatcagccaagagctgaagttgaaaagttttacttacgaatatgaggactccaagcagaagtcagataaggctatactgttagagaatgatctttccactgaaaacaagctaaaagtgttaaagcacgatcgcgaccactttaaaaaagaagagaaacttagcaaaatgaaattagaagaaaaagaatggctctttaaagatgaaaaatcactgaagagaatcaaagacacaaacaaagacatcagcaggtctttccgagaagagaaagaccgttcgaataaagcagaaaaggagagatcgctgaaggaaaagtctccgaaagaagaaaaactgagactgtacaaagaggagagaaagaagaaatcaaaagaccggccctcaaaattagagaagaagaatgatttaaaagaggacaaaatttcaaaagagaaggagaagatttttaaagaagataaagaaaaactcaaaaaagaaaaggtttatagggaagattctgcttttgacgaatattgtaacaaaaatcagtttctggagaatgaagacaccaaatttagcctttctgacgatcagcgagatcggtggttttctgacttgtccgattcatcctttgatttcaaaggggaggacagctgggactcgccagtgacagactacagggacatgaagagcgactctgtggccaagctcatcttggagacggtgaaggaggacagcaaggagaggaggcgggacagccgggcccgggagaagcgagactacagagagcccttcttccgaaagaaggacagggactatttggataaaaactctgagaagaggaaagagcagactgaaaagcataaaagtgtccctggctacctttcggaaaaggacaagaagaggagagagtccgcagaggccgggcgggacagaaaggacgccctggagagctgcaaggagcgcagggacggcagggccaagcccgaggaggtgcaccgggaggagctgaaggagtgtggctgcgagagtggcttcaaggacaagtccgacggcgactttgggaagggcctggagccgtgggaacggcaccacccagcacgagagaaggagaagaaggatggccccgataaggaaaggaaggagaagacaaaaccagaaagatacaaagagaaatccagtgacaaggacaaaagtgagaaatcaatcctggaaaaatgtcagaaggacaaagaatttgataaatgttttaaagagaaaaaagataccaaggaaaaacataaagacacacatggcaaagacaaagaaaggaaagcgtctctcgaccaagggaaagagaagaaggagaaggctttccctgggatcatctcagaagacttctctgaaaaaaaagatgacaagaaaggcaaagagaaaagctggtacatcgcagacatcttcacagatgagagtgaggacgacagagacagctgcatggggagcgggttcaagatgggagaggccagcgacttgccgaggacggacggcctccaggagaaggaggaaggacgggaggcctatgcctccgacagacacaggaagtcttctgacaagcagcaccctgagaggcagaaggacaaggagcccagagacaggagaaaggaccgaggggctgccgacgcggggagagacaaaaaagagaaagtctttgaaaagcacaaggagaagaaggataaagagtccacagaaaagtacaaggacaggaaggacagagcctcagtggactccacgcaagataagaaaaataaacagaagctccccgagaaggctgaaaagaagcacgctgccgaagacaaggctaaaagcaaacacaaagagaagtcggacaaagaacattccaaggagaggaagtcctcgagaagtgccgacgcggaaaaaagcctgcttgaaaagttggaagaagaggctctccatgagtacagagaagactccaacgataaaatcagcgaggtctcctctgacagcttcacggaccgagggcaggagccggggctgactgccttcctggaggtctctttcacggagccacctggagacgacaagccgagggagagcgcctgcctccctgagaagctgaaagagaaggagaggcacagacactcctcatcttcatccaagaagagccacgaccgagagcgagccaagaaagagaaggccgagaagaaagagaagggcgaagattacaaggagggcggtagcaggaaggactccggccagtacgaaaaggacttcctggaggcggatgcttacggagtttcttacaacatgaaagctgacatagaagatgagctagataaaaccattgaattgttttctaccgaaaagaaagataaaaatgattccgagagagaaccttccaagaaaatagaaaaggaactaaagccttatggatctagtgccatcaacatcctaaaagagaagaagaagagagagaaacacagggagaaatggagagacgagaaggagaggcaccgggacaggcatgcggatgggctgctgcggcatcacagggacgagctcctgcggcatcacagggacgagcagaagcccgccaccagggacaaggacagcccgccccgcgtgctcaaagacaagtccagggacgagggcccgaggctcggcgatgccaaactgaaggagaaattcaaggacggtgcagagaaagaaaagggcgacccagtgaagatgagcaacgggaatgataaggtagcgccatccaaagacccaggcaagaaagacgccaggcccagggagaagctcctgggggacggcgacctgatgatgaccagcttcgagaggatgctgtcccagaaggacctggagatcgaggagcgccacaagcggcacaaggagaggatgaagcaaatggagaagctgaggcaccggtccggagaccccaagctcaaggagaaggcgaagccggcagacgacgggcggaagaagggtctggacattcctgctaagaaaccgccggggctggaccctccatttaaagacaaaaagctcaaagagtcgactcctattccacctgccgcggaaaataagctacacccagcatcaggtgcagactccaaagactggctggcaggccctcacatgaaagaggtcctgcctgcgtcccccaggcctgaccagagccggcccactggcgtgcccacccctacgtcggtgctatcctgccccagctacgaggaggtgatgcacacgcccaggaccccgtcctgcagcgccgatgactacgcggacctcgtgttcgactgcgccgactcgcagcactccacgcccgtgcccaccgctcccaccagcgcctgctccccctcctttttcgacaggttctccgtggcttcaagtgggctttcggaaaacgccagccaggctcctgccaggcctctctccacaaacctttaccgctcggtctctgtcgacattaggaggacccccgaggaagaattcagcgtcggagacaagctcttcaggcagcagagcgttcctgctgcctccagctacgactctcccatgccaccctcgatggaagacagggcgcccctgcccccggttcccgcggagaagtttgcctgcttgtcgccagggtactactccccagactatggcctcccgtcgcccaaagtcgacgctttgcactgcccaccggctgccgttgtcactgtcaccccgtctccagagggcgtcttctcaagtttacaagcaaaaccttccccttcccccagagccgagctgctggttccttccctcgaaggggcccttcccccggacctggacacctccgaggaccagcaggcgacggccgccatcatccccccggagcccagctacctggagccgctggacgagggtcccttcagcgccgtcatcaccgaggagcccgttgagtgggcccacccctccgagcaggcgcttgcctctagcctgatcgggggcacctctgaaaaccctgtgagctggcctgtgggctcggacctcctgctgaagtctccacagagattccccgagtccccaaagcgtttctgccccgcggaccccctccactctgccgccccagggcccttcagcgcctcggaggcgccgtaccccgcccctcccgcctctcctgccccgtacgctctgcccgtcgctgagccggggctggaggacgtcaaggacggagtggacgccgtccccgccgccatctccacctcagaggcggctccctacgcccctccctccgggctggagtccttcttcagcaactgcaagtcacttccggaagccccgctggacgtggcccccgagcccgcctgtgtagccgctgtggctcaggtggaggctctggggcccctggaaaatagcttcctggacggcagccgcggcctgtctcacctcggccaggtggagccggtgccctgggcggacgccttcgccggccccgaggacgacctggacctggggcccttctccctgccggagcttcccctgcagactaaagatgccgcagatggtgaagcggaacccgtggaagaaagtcttgctcctccagaagagatgcctccaggggcccccggggtcataaacggtggggatgtttccaccgtagtggctgaggagccgccggcactgcctcctgaccaggcctccacccggctccctgcagagctcgagcctgagccctcaggggagccaaagctggacgtggctctagaagctgcggtggaggcggagacggtgccggaagagagggcccgtggggatccggactccagcgtggagcccgcgcccgttcccccagaacagcgcccactggggagcggagaccagggggctgaggctgaaggcccccccgccgcgtccctctgtgcccctgacggccccgccccgaacactgtggcacaagctcaggccgcagacggtgccggccccgaggacgacactgaggcctcccgtgccgccgccccagccgaaggccctcctggcggcatccagccggaagccgcagaaccaaaacccacggccgaagccccgaaggccccccgagtggaggagatccctcagcgcatgaccaggaaccgggcgcagatgctcgcgaaccagagcaagcagggcccgcccccctccgagaaggagtgcgcccccacccctgccccggtcaccagggccaaggcccgcggctccgaggacgacgacgcccaggcccagcatccgcgcaaacgccgctttcagcgctccacccagcagctgcagcagcagctgaacacgtccacgcagcagacgcgggaggtgatccagcagacgctggccgccatcgtggacgccatcaagctggatgccatcgagccctaccacagcgacagggccaacccctacttcgaatacctgcagatcaggaagaagatcgaggagaagcgcaagatcctgtgctgtatcacgccgcaggcgccccagtgctacgccgagtacgtcacctacacgggctcctacctcctggacggcaagccgctcagcaagctccacatccccgtgatcgcaccccctccctccctggcggagcccctgaaggagctgttcaggcagcaggaggccgtccggggaaagctgcgtctacagcacagcatcgagcgggagaagctgatcgtatcctgtgagcaggagattctgcgggttcactgccgggcggccaggaccatcgccaaccaggcagtgccattcagcgcctgcacgatgctgctggactccgaggtctacaacatgcccctggagagccagggtgacgagaacaagtcagtgcgcgaccgtttcaacgcccgccagttcatctcctggctccaggacgtggatgacaagtatgaccgcatgaagacttgcctcctcatgcggcagcagcacgaggccgcggccctgaacgccgtgcagaggatggagtggcagctgaaggtgcaggaactggaccccgccgggcacaagtccctgtgcgtgaacgaggtgccctccttctacgtgcccatggtcgacgtcaacgacgactttgtattgttgccggcatgacaccgcgggacggccgcaggacgcaggcgagggccgcacggctgcccaggactgctgctgagccccaggggcggaggagggagcgccctgtccacccgggcggggagagaccccgagagagactgcacttggccacagcgcctccatcccttccagactggtccagacgtcggggaggtgaaacacgtctcttctctaccagctgccgcggcgggggcaaagcccccagagcctcactggccccggcgggatgaggagaccatgccgggcgcgcacacacggcagcttctgtttgaaaacggcgaccttcgggcccttttctccagcaactgcagaggcatttcaggagttggagaacggagtacatttttaaaattttttgttccattctgatcaactaaagaaaattaaggtgtccacctctcacaaacagtgacctgcaggtcggaggggcaggagccccatcccagccgtggttctgttgccgccgagctgcgacggcctcagactgggcttcagacctggtgcggagccaggcggagggacacagagccaggactcccagccgtattgaaatggagtcaaatccgcgtggtttgtatcttctttcctttaatcttgggcattttgtttctctttctgagaacgtaacttgaaacactacagagccaataatcatataaaaagtgtatccgtaaacgctgtacagttttatataccttcacaatgtacttttgctgccttctagataatttattttgcaacacattactgcacagttgtaaataacttatgtactgtaacatcactttcagttatgtgtaaagaaataaataaattaattaaaa

SEQ ID NO: 25134 - DNA, 1000 bp, Homo Sapiens
gccccaccatgggcaacagcgcgagccgcaacgacttcgagtgggtctacaccgaccagccgcacacgcagcggcgcaaggagatactggccaagtacccggccatcaaggccctgatgcggccagacccgcgcctcaagtgggcggtgctggtgctggtgctggtgcagatgctggcctgctggctggtgcgcgggctggcctggcgctggctgctgttctgggcctacgcctttggtggctgcgtgaaccactcgctgacgctggccatccacgacatctcgcacaacgcggccttcggcacgggccgtgcggcacgcaaccgctggctggccgtgttcgccaacctgcccgtgggtgtgccctacgccgcctccttcaagaagtaccacgtggaccaccaccgctacctgggcggcgacgggctggacgtggacgtgcccacgcgtctggagggctggttcttctgcacacccgcccgcaagctgctctggctggtgctgcagcccttcttctactcactacggccgctctgcgtccaccccaaggccgtgacccgcatggaggtgctcaacacgctggtgcagctggcggccgacctggccatctttgccctttgggggctcaagcccgtggtctacctgctggccagctccttcctgggcctgggcctgcaccccatctcgggccacttcgtggccgagcactacatgttcctcaagggccacgagacctactcctactatgggcctctcaactggatcaccttcaatgtgggctaccacgtggagcaccacgacttccccagcatcccgggctacaacctgccgctggtgcggaagatcgcgcccgagtactacgaccacctgccgcagcaccactcctgggtgaaggtgctctgggattttgtgtttgaggactccctggggccctatgccagggtgaagcgggtgtacaggctggcaaaagatggtctgtgagcccgggctgcctcctggtg

SEQ ID NO: 25135 - DNA, 1155 bp, Homo Sapiens
atgaattcaacattattttcccaggttgaaaatcattcagtccactctaatttctcagagaagaatgcccagcttctggcttttgaaaatgatgattgtcatctgcccttggccatgatatttaccttagctcttgcttatggagctgtgatcattcttggtgtctctggaaacctggccttgatcataatcatcttgaaacaaaaggagatgagaaatgttaccaacatcctgattgtgaacctttccttctcagacttgcttgttgccatcatgtgtctcccctttacatttgtctacacattaatggaccactgggtctttggtgaggcgatgtgtaagttgaatccttttgtgcaatgtgtttcaatcactgtgtccattttctctctggttctcattgctgtggaacgacatcagctgataatcaaccctcgagggtggagaccaaataatagacatgcttatgtaggtattgctgtgatttgggtccttgctgtggcttcttctttgcctttcctgatctaccaagtaatgactgatgagccgttccaaaatgtaacacttgatgcgtacaaagacaaatacgtgtgctttgatcaatttccatcggactctcataggttgtcttataccactctcctcttggtgctgcagtattttggtccactttgttttatatttatttgctacttcaagatatatatacgcctaaaaaggagaaacaacatgatggacaagatgagagacaataagtacaggtccagtgaaaccaaaagaatcaatatcatgctgctctccattgtggtagcatttgcagtctgctggctccctcttaccatctttaacactgtgtttgattggaatcatcagatcattgctacctgcaaccacaatctgttattcctgctctgccacctcacagcaatgatatccacttgtgtcaaccccatattttatgggttcctgaacaaaaacttccagagagacttgcagttcttcttcaacttttgtgatttccggtctcgggatgatgattatgaaacaatagccatgtccacgatgcacacagatgtttccaaaacttctttgaagcaagcaagcccagtcgcatttaaaaaaatcaacaacaatgatgataatgaaaaaatctga

SEQ ID NO: 25136 - DNA, 32167 bp, Homo Sapiens
agagaccattcccgatctctttcagcattttcatactgaatgtccacagctgccctgtgaggaggctttttacccatattttctgactcagagagaagcagccacatgtcccttggccatggcagttaagaccaactccatggagctgggtgtcttagctcacatctgtaatcccagcactttggaaagccaaggcaggatgattgcttgaggccagaagttcaagaccagcctgggcaacatagccagaccccatctctacaaaaatttaaaaattagccacaaaatttaaaaattaacaacaaaagggccgggtgcggtggctcacgcctgtaatcccagcgctttgggagggtggatcacgaggtcaggagttcgagaccagcctggccaagatggtgaaatcccatctctactaaaaatacaaaaattagccgggcgtggtggcgggcgcctgttgtcccagctacccaggaggctgaggcaggagaatcgcttgaatccgggagtctgaggttgcagtgagccgagatcgcagcattgcactccagcctgggcgacaagagcgaaactccatcttaaaaaaaaaaaaaaaaaaaagtggaagatgaggaagttgatcagacatcaaggatgagcggatgacttaataggcttctttgctaagacttggctgggcaggtgaaagacaaagtcgaggagtggttatggtgtggcacagaagaagggtcagaggacggtctttgttacctcttcatgcctgagtttcttcctctgtgaaatggggataataagagccgccatacagggaattgctgctaggatcaaatgagataatgttatgtgaaacgctctggctgtaggcttctcagcaaatgggcacgacttgcggagtggggatttgaattcacgtctggcgggatgtccaagctgctaccctgaccgctagggagcttcagaggacagggctgcaggtgatcaggaagaggactggggcaggtgggcgaggaatgcctcccaggagtgaaggagggggaattctagtcagcaggatggagtcggccaggtagaaacgagggaaaggagacaggaccggatggaacggggaagccaaagggcagggcgtcggagggttgaatggtggccggtgcagctttgaacaccgaggtgaggacatgcagctgtgtcctagggtcaggaccgtacacgcctgacccaattccacagcacggaggggaactccaggatccggccgcgttgcccacacacttcgctctccctcccgcctctcgcaagcccctcccccgtctccgtccaccgagtgccagccaatagcagaagcgacagcgcatctgggtgccgactcagccaatcgcggctgagtgacgaatgagccccaggaccaatgagagtgccgccaccatggcaaaaaaaaaaaaatccaatggtgacgagcagggagaacagagcagctgccaatgggcgtgtgcgtttcaggcggccaatgggaggaggcgtctcggcgggggacaagcagtagctacccgcgggagcggggaggggtccgggttcgagcttgtgttcccccggaagggtgagtctggacgcgggcgcggaaggagcgcggccggaggtcctcaggaagaagccgcggggactggctgcgcttgacaggctgcacttggatgggagcacctggtgcctcgggactgctccgatgcccggtgggtgcacatcccagttcccgccgttgccggccgggtttagaggttttggggggaggacatgggggcgtgcagccttcccagttgcaaacttcactccgaccctgtcttcaaagctgggtctgggtccagtggggacgagaaaggaggaaggaggaagtaggctccgcgaaagccccatccccgggatctcatctataacatgaataggtattaatggcaaaggctaattaagcgcttactgtataccaggcactttctctgcctcctcgcgttaaatcctcccagcagccttttgaggtagacactgttacatgcccattttccagatgaggaaaccagcaacatgggtggaagtgacagcccctccacttccatactggcgccctcaggaggctcaggccctggattggggggatggagctggacataaactctcctaggctttggggagtcaacagggactgaggtcactcatgggggtaaatgtgggagaggagaattgtggcctgaaagaggccatcaccacgatgaaactaataacaattatgttattcttgttttggtcatatttgttctttttgtgtgtgcctgaatcagggtctgtgctgaatgtgtaatatgcggaactatattgaaacattacaaccatcttttgatggcaacaccctgaggacctcccttttccagatggggaaactgaggcccagaattgctaagtggcttgcttgagttgacacagggagctccaggactcaccctcaggtatgtttgaccacatctgcctgtctggttattttggggaggtgtgttaagagcagatttttattttactttttatttatttatttatttatttatttatttatttattgtattttagtagagatggggtttcaccatgttggtcaagatggtctcaatctccagacctcgtgatctgtccgccttggcctcccaaagtgctgggattacagtcatgagccaccgcgcctggccctttttatatatttttattacttatttatttatttatttatttatatttttagagtcagggtctcactctgtcacccaggctggaatgcagtggtgcgatcactgctcactgcagcctccaactcctgggctcaggagatcctcccacttcagcctcccgagtagcttggagtacagatgtgcacccccacgcctggctaaattttaaaaatttcttgtagaggccgggcacagtggctcacgcctgtaatcccagcactttgggaggccgaggcgggtggatcacctgaggtcagaggttcaagaccagcctggccaacatggcaaaaccctgtctctactaaaaatacaaaaattagcccggtgtggtggcaggcgccagctactcaggaggctgaggcaggagaatcacttaaacccaggaggcagaggttgtggtgagcaagattgtaccattgcactccagcctgggcaacaagagtgaaactctgtctcaaaaataagataagataagataagataagataagataagataagataagatataaaataaaacgtcttgtagaaacagggtcttgctatatggcctaggctggtctcgagctcctgggctcaagcaatcctcttgcctcaacatcccaaagtcctgggattagaggcgtgagccactgtacctggccagagcagatttttatatctgtgtcaatttgtggaaagagaggagggttcagtgttattgttgatgagagatctaggtggggatgcataccccaaccctgtccaataaatgtggaaaacgagactcagagagggaatcgggtctctaatgtcatgccaagatgggagcccagaatcttcccctcaggccttagctggggtgggtggaaggttgaagagctaacaggggtctctgggctgagacttgggagctgacagattgtcccctttccagctgagccacctgccgggagcatgcctctgcgccactgggggatggccaggggcagtaagcccgttggggatggagcccagcccatggctgccatgggaggcctgaaggtgcttctgcactgggctggtccaggcggcggggagccctgggtcactttcagtgagtcatcgctgacagctgaggaagtctgcatccacattgcacataaagttggtgagtctggggcgttggcaccatggggactggggtgggtgtgcaagcagcagctgggccccatccatccgtctatccacccacccacccatccacccacccatccacccactcatccatccatccatccatccacccatccacccacccatccaccctcccaaccacccatccatccacccacccacccatccatccacccatgcatccatccatcctcccatccacccatccacccacccattcacccacccattcacccatccacccaccctttcacccatccacccatccacccattcatccacccacccacccacccatccatccacccacgcatccatccacccacccacccacccatccatccacccacgcatccatccatacatccacccacccactcatccatccacccacctatccacctatccatccacctactcacccacccatccacccacctatccacccacccacccatccacccatccatccacccacccattcatccatctatccatccatccacccatcgatccatccatacccacccattcatccatccacccatccatccacccacccatccacccatccatccacccatccatccattcatccatccatccatccacccacccacccatccatccacccacccacccatccatccatccatccatccacccacccactcacccactcacccacctatccatgcatccatccatccacccacccatccatcctcccacccattcatccatctatccatccatccatccatccatccatccatccatccatccacccacccacccacctattcatccatctatccatccatccatccatccatccatccatccatccatccatccatccacccgttcattcggtgaacattttgtaagcatctactgtgtggcagctgcaaatcactgcctttgtagagctgaaattttagtagggaggacagcaagaaatataataaatcagaaaacttggccaggtgcagtagctgacacttgtaatcccagtacttgaggaggcccaggcaggaggattgcttgaggccagtagttggagaccagcctgggcaacatagggagaccttgtctcaacaaaataatttttagaaattagccaggcatggtggtacatgcctgtagtcccagcaacttgagagcctgaggcaagaggatcgcttgagcccaggagttcaagcctgcaatgaggtatggtttcgtcactgcactccagcctgggtgacagagtgagacccagtgtcattaaaaaaagaaagtcaggccgggcgcggtggctcatgcctgtaatcccagcactttgggaggctgaggctggtggatcacttgaggtcagaagtttgagagcagcctggccaacatggcaaaactccagctctactaaaaatacaaaaactagccgggcgtggggtgcgcacctgtaattccagctactcaggaggctgaggcaggagaatagcttgaacctgggacatggaggttgcagtgagccgagatcacagcactgcactccaggctgggtgacagagctagactccgtttcaaaaataaaaaaaggccaggtgcggtggctcatgcctgtaatcccaacactttcagaggctgaggcgggcagatcacctgagatcaggagttcaagaccagcctggccaatgtagtgaaaccgcatctctactaaaaatacaaaatgtagccaggcatggtggcaggtgcctgcaatcccagctactcagaaggctgaggcaggagaatagcttgaacctgggacatggaggttgcagtgagccgagatcacagcactgcactccaggctgggtgacagagctagactccgtttcaaaaataaaaaaaggccaggtgcggtggctcatgcctgtaatcccaacactttcagaggctgaggcgggcagatcacctgagatcaggagttcaagaccagcctggccaatgtagtgaaaccgcatctctactaaaaatacaaaatgtagccaggcatggtggcaggtgcctgcaatcctagctactcaggaggctgaggcaggagaattgcttgaacttgggaggtggaggctgcagtgagctgagatcgtgccattgtactccagcctgggcaacaagagcgaaactccatctcaaagaaaaaaaaaaaaaaaaaagaaagaaaggctttccctcctcctgcacaggaaattgcacttccaaatatatctactacagtctttctttttttcttttttttgagatggagtctcgctctgtcccaggctgaagtgcaatggcgcaatctcagctaactgcaacctccgcctcccgggttcaagcgattctccggcctcagcctcccgagtagctgggactacaggtgtgtgccaccatgcccggctagattttttttttttttttgtatttttagtagaggtggggtttcaccgtgttagccaggatggtcttgatctcctgacctcgtgatctgcccgcctcggccctccaaagtgctgggattacaggtgtgagccaccatgcccggcccaattttctttttttaatgacatagggtctcactctgtcacccaggctggagtgcagtggtgtgacctcagctcactgcaacctccatgtcccaggttcaagccattctcctgcctcagccgcctgagtagctggaattacaggtgcacaccccacgcccggctagtttttatatttttagtagagctggagttttgccatgttggccaggctggtctcgaacttctgacctcaagtgatccacctgcctcagcctcccaaagtgctgggattacaggcgtgagccaccatgcccaaccaaggaaaggcctttctaaggcggctttggttacatataccttcctccagaaactcctcttacctcccccattcccagctttccatgactggatgggggcattgtaatcaatttttataacacttcctacttccccattgatggctgagtctttttttttttttctttcgtagagacagtctctctcttgcccaggctgaaatgcagtggtgcaatcatgacgcattgcagcctctaactgcccaggctcaagtgattttcctgcctcagtctcccaaatagctggggctacaggcacatgtcaccacacccggataatttttgtattttttgcatgttgcctcatgctggtctcaaactcctgggctcaagccatccacccgccttggcttcccaaagtgttgggaggcatgagccatcgcgcctggccatgactgattttttttttttttttgaaacgaagtctcgctcagtcctcaaagctggagtgcaatggcacaatcttggctcactgcaacctccgcctcccgggttctagcgatcctcctgcctcagcctcctgagtagctgggattacaggcgcctgccaccacgcccagctaatttttgtatttttagtagagacggggtttcaccatgttggtcaggctggtcttgaacatgcatgctgttccccctgcctcggcctctcaaagtgctgggatgacaggtgtgagccaccgtgcccggcttttttttttttttttttttttgagacggagtctcgctctgtcacccaggctggagtgcagtggtgtgatctcggctcactgcaacctccgcctcccgggttcaagtgattctcctgcctcagcctcctgagtagctgggattacaggcgcccaccaccacacctggctaatttttgtattttcagtagagacgggggtttcaccatgttggccaggctggtctcgaactcctgacctcaagtgatccacctgcctcagactcccaaagtgttgggattacaagtgtgcaccctcgagcctggccatggctgattctttgttttgttttgttgtgttgtttgagacagagtctcgctctgtcgcccaggctggagtgcagtggcgcgatctcagctcactgcaagctccgccttccgggttcacgccattctcctgcctcagcctcccgaggagctgggactataggcacccaccaccacgcctggctaattttttgtatttttagtagagacagggtttcactgtgctagccaggatggtctcgatctcctgacctcgtgatccgcccacctcagcctcccaaagtgctgggattacaggtgtgagccactgtgcccgcccccatgactgattattaaaggattcagacaggtgtgcgggtgatgtgaaacacgctcagcagagggaacagcatgcatggaggcccggagagcttgatctgtttgaggaagcgaaagaccttcagggtgactggggtatcaattttgagagtttggaaggggaagtaacaattgaaattggggcatagcaggcaaaagccagggtgggggtactcagaatcaagggtcaaggggttgggcattctccgggagcaatggggagccatggaaggtttaagccagagagtgaagcagtctgactagttcttttatttttattttttatttttgactggttctttaagaagttgtctcaagccaggcacagtgggtcacgcctgtaatcccagcactttgggaggctgaggcgggcagatcacttgaggttaggagtttgagaccagcatggccaacatggtgaaaccccgtctctactaaaaatataaaaattagctgggcgtggtgacgcacatcccagctacttgggaggctgaggcaggagaatcacttaaacctgggaggcggagttgcagtgagccgagatcgcaccactgcactccagcctgggtgacagagactcggtctcaaaaaacaaaaatatgaaacattggccaggtgccgtagctcacacttgtaatccttgcgcttagggaggccaaggcgggtggatcacttgaggtcaggagttggagaccagtctggtcaacatgatgaaaccccatctctactgaaaatacaaaaaattagccgggcgtggtggcgggcgcctgtaatcccagctactcaggaggctgaggcaggagaatcgcttgaacccagggggtggaggttacagtgagccgagatcacgccactgcactccagcctgggcaacaagagcaaaaactctatccaaaaaaaaaaaaaatacaaaaaattagctgggcatggtggcacatgcctgtagtcccagctactcaggaggctgagacaggagaatgacttgaacctgaaaggcagaagttgcggtgaaccaagattgcaacattgcactccagtctgggtgactccatctaaaaaaaatatatattgtttcacagggaggtatcctcccttcacagaggggcagtataattccatggtgtgactttggagagtgatttgataacacagtcaaagctggatgcagtggctcacgcctgcaatcccagcagttttggaggctaagcgtggaggatcacttgagcccaggagttcaagatcagcctgggcaacatcgcgaaaccccgtctctactaaaaatacaaaaaattagccaggtgtgctgtgtgctggtgtgcacctgtagtcccagctactcaggaggctgaggtgggaggatcacttgagcccgggaggttgaagctacagtgatcatgccactgcccttcagcctaggtgacagagcaagatgctgtctcaaaaaaaaaaaaaaaaaaaaaaatatatatatatatatatatatatatagctgtgtgtggtggcgtgttcctgtatttcccagctactcaggagactgaggcaggaggactgcttgagccagggaggtcatggctgcactgagccatgattgcaccactgtattccagcctatatgtcagagcaagatcctgcttcaaaaaaaaaaaaaaacccaggccgggcgccgtggctcacgcctgtaatcccagcactttgggaggctgaggtgggcgaatcatgaggtcaggagattgcgaccgtcctggctaacacggtgaaaccccgtctctactaaaaaaatacaaaaaaattagctgggcatggtggcgggcgcctgtagtcccagctactcgggaggctgaggcaggagaatggcgtgaacccaggaggcagagcttgcagtgagcggagattgagccaccacactccagcctgggcgacagatcgagactccgtctcaaaaaaaaaaacaaaaactcagaaacatcttccctgaggccatatagttccactcctggacagtgacagtcactctataaacagtcagctcatgtgctcccagggacacttatgagaatgtttagagccgccttgtttatcatatggaaaaggggagaccattgcaaagtccctcaataagagactgcctaagtaaattgcaatctggttgaatactggactactgcgcagccgggagaaggaatttaaccagaattactcatgtcattctgcatgaagctttataacctctcgtagcctgaaaaagcacattgcagagggacgtctgcagtataataccacacatttacagttcataacttttttttttttgagacagagtttcgctcctgttgcccaggttggagtgcaatagcacgatctcagctcaccgcaacctccacctcccaggttcaattctcctgcctcagcctcccgagtagctgggattacaggcatgcgccaccacgcccagctaattttgtatttttagtagagacggggtttctccattttggtcaggctggtctcgaactcccgacctcaggtgatccgcctccctcagcctcccaaagtgctgggattacaggcgtgagccactgtgcccagccacagttcataacatttaaggctagattgtagaggatatgaaaattataaacactacttcagggcagagcacactggcttatgcctgtaatcccagcactttggaggctgagtagctcagcctcccagctactcaggaggctgaggtgggaggatcacttgagcctaggagtttgagaccagcctggacaacatggtgagaccccttctctacaaaaactacaaaaatcagctgggcatggtggcgtgcgcctgtagtcccagctccttgggaggctgaggcaggaggattgctttagcccagtaagtcgagggtgcagtgagccatgatcacaccactgcactccagccacacctggctaatttattttatttttagtttttttagagatgaggggtctcactatgttgcttaggctggtcttgaactcctaggttcaagtgattctcccgccttagcctcccaaagtgctgggattacagatgtgagccaccatacccagccttagataaaattatttattttattttattattatttttttagacagagcctcactctttcacccaggctggagcgcagtggcgtgatctcggctcactgcaacctctgcctccaggttcaagcaattctcttgcctcagcctgctgagtagctgcgattacaggtgctcacccccacacccagctaatttttgtatttttagtagagacgaggttttgctctggtggccaggctggtctcaaactcctgccctcaagtgcttcacctgcctcagcttccgaaagtgctgggactataggcatgggccactgcacccagccagataccatttttttttttttttttgagacagtcttgctgtgtcgccaggctggagtgcagtggcacaatctcggctcactgcaccctccacctcccgggttcaagcgattgtcctgcgtcaacctccggagtagctgggactaaaggtgcaccccaccatggccagccaatttttttttttcagatctcactctgccgcccaggctggagctcagtggcacgatcttggctcactgcaacctccgcctcccgggttcaagcagtcctcctgcctcagcctcccaagtagctggaattacaggcacatgccaccaggtccagctatttttttttttaatagagatgggatttcaccatgctggccacgctggtctcgaactcctgacctcaagtgatccacctgcctcagactcccaaagtgttgggattacaagtgtgcaccctcgagcctggccatggctgattctttgttttgttttgttgtgttgtttgagacagagtctcgctctgtcgcccaggctggagtgcagtggcgcaatctcggctcactgcaagttccacctcctgaattcacaccattctcttgcctcagcctcccaagtagctgggactacaggcatccgccaccatgcctggctaattttttgtattttttagtagagacggggtttcaccatgttagccaagatggtcttgatctcctgacctcgtggtctgcccacctcagcctcccaaagtgctgggattataggcgtgagccactgcgcccggccgacaggtacaatttttaaatgacatcagtagaagaaagataccctgggtagctggtgtgggaaattacagcaagtctggagactggattggggttgaggtttgcatttgaaggtggtggatggagccccaggacatggagggtgcaggaagagcaggtcttggtgaccgatctgttttggagcaggtgggagaggttgaagataaggaccaagttcctggtttgaagaactgggcagaagccacacaccctggctcatagccataatcccatcaactccagagattgaggtgggaggatcgcttgagccctggaggttgaggctgcagtgagctaggattgcaccactgcactgcaacctgggtggcaaagaaagaccctgacccttaaaaaaaaaagggcagaggaagggaaggttggagtttgccaaccacagataagatatgttgtttggaacaagccatatctaagggggggcctgtgatgtccagggggagacagccaggaggtgactggatgtttctttggggctggagttcagggagacgccagacaattgcagcagtttgtagagttatgtgggtcaggctaggattagttttgctgcaggaataagcaatccccccaaatcttaatcaaggtttacctaaaatcggccgagcacagtggctcatgcctgtaatctcagcactttggggggccaaggtgggcagatcacctgaggtcaggagtttgagaccagcctggccaacatggcgaaacctcgtctcttctaaaaatacaaaaactagccggggttggtggcgcacacctgtaatcccagcaactcaggaggctgagacaggagaatcacttgaacccaggaggcggaagttgcagcgagccaagatcgtgtcactgctctccagcctgggcaacagcaagactccatctcaaaaaaaaaaaaaaagttttacttaaaatcaagtacaggttggatggttcacctctgtcttacagcttcaccatctgtcacaagaagccttcatcatacctcgggtggtgaaggtggcaagagaatttatttccaggcttggaaatgtacccagccctttggccagaaaccagcagtgcaattggctccatcctagctgcaagggaggctgggaaatgtagtcctcctgtgaggccacagcatgggcaacatacgcactgtcctctgcccaggggcaacgtgagactgaagctgcaggtgggggagggggcctcagagggagtgtgaaggcagacattgggtctggggggtctttggggctgacggtagcaaatgacgtgactcctgacctcgtttctcacctgatccaggtatcactcctccttgcttcaatctctttgccctcttcgatgctcaggcccaagtctggttgcccccaaaccacatcctagagatccccagagatgcaagcctgatgctatatttccgcataaggtgggtggagacctttgcaaagctcgtcccctcctgtgctgaagctggtctgactctgtgctaagccccagctgcgtccctccttcctgcaggttttatttccggaactggcatggcatgaatcctcgggaaccggctgtgtaccgttgtgggcccccaggaaccgaggcatcctcagatcagacagcacaggggatgcaactcctggacccagcctcatttgagtacctctttgagcaggtatgagcagggctggggtggcaagactatttgtgggagacttaggggcagttgaggagcccccatttccctccctgattcaatatagctaataggtttcaactcatgctatctggggatcttttttttttttttgagacggagtcttgctctgtcgcccaggctgaagtgcagtgatgtgatctcggctcactgcaagctccgcctcccaggttcccgtcattttcctgcctcagcctcccaagtagctgggactacaggcgcccgccaccatgcccagctaattttttgtatttttagtggagacggggtttcacagtgttagctaggatggtctccatctcctgacctcgtgatctgcccgcctcggcctcccaaagtgctgggattacaggcgtgagccaccgctcccagccgatcttttttttttgaaatggagtcttgctctgtggcccaggctggagtgcagtggcgtgatctcagctcactgcaacttccacctcccaggttgaagcgattcttccacctcagcctcccaagtaactgagattacagaagcccgccaccaccccaggctaatttttctatttttagtaaagacggggtttcaccatgttggccaggctggtctcaaactcctgacctcaagtgattcacctgcctcagcctcctaaattgtgggattataggtgtgagccaccatgcccagccaagagttcaggttgaaggggatagagtgctgtgattgattagtaatgtctgccacaggcacaagattgacaagaggaggggtgtatgctgtgtatttggcctttccagtaaatggtggtctctcccctcctcaaggtggtaagacgcaggaaattagagttctctggctagagtaagcttgtccaacccctggcctgcggactgcatgctgcccaggacagctttgaatgaagcccaacacaaattcataaactatcttaaaatattctgagattttgctgtgatttttttttttttttgagacagagtttcattcttgttgctcaggctggagtgcaatgtcatgatctcagctcactgcaacctctgcctcccaggttcaagtgattctcctgcctcagcctcccgagtagctgggattacagacatgcgccaccacacctggctaattttgtatttttagtataggcgagttttctccatgttggtcaggctggtctcaaactcctgacctcaggtgacccgcccgccttggcctcccaaagtgctgggattataggcgtgagccaccatgcccggcttgcgatattctttttttttttttttttttagctcatcagctatcattagtgttagtgtattttatgtagggcccaagacacttcttccagtgtggtccagggtagccagaagattggatacctctgggctagagaggaacgcattctcacacctccctttctgctcaatttcctgttcccagggcaagcatgagtttgtgaatgacgtggcatcactgtgggagctgtcgaccgaggaggagatccaccactttaagaatgagagcctgggcatggcctttctgcacctctgtcacctcgctctccgccatggcatccccctggaggaggtggccaagaagaccaggtgtctgggaatggggtggggacgctgtgtaggcagggggaaatgtcctgagcatctgggagccagggtagactttgcatattgccgtgcctctacttttttttttttctgagccggagtctctctctgtcacctaggctggagtacagtggcgcaatcttggctcactgcaacctctgcgtcccaggttcaagagattctccttcctcagcctcctgagtagctgggattacaggtgcccaccatcaagcccagctaatttttgtatttttagtagagacagactgagtttcatcatgttggccaggctggtctcgaactcctgacctcaagcgatccttccgccttggcttcccaagtagctgagactacaggctcaagtcaccacacctggctagtgtgcctgttttccagatgaggcagctgaggctcaaagaggttaagccacttgccctgtgtcacccagctgggcctgcaacccaggtccctgaccagcccctcactgtgtttccccccagcttcaaggactgcatcccgcgctccttccgccggcatatccggcagcacagcgccctgacccggctgcgccttcggaacgtcttccgcaggttcctgcgggacttccagccgggccgactctcccagcagatggtcatggtcaaatacctagccacactcgagcggctggcaccccgcttcggcacagagcgtgtgcccgtgtgccacctgaggctgctggcccaggccgagggggagccctgctacatccgggacagtggggtggcccctacagaccctggccctgagtctgctgctgggcccccaacccacgaggtgctggtgacaggcactggtggcatccagtggtggccagtagaggaggaggtgaacaaggaggaggtgagcaaggcgccccttccgccctgggggttcaggttgggctggggtgggtttctgtgttcatccttgaccctagcctctgagggtggctgacctgagccctctccccacatggctctggggcacctgtccgctagggccagtttcttggagaaggtcctccatctgcttaccccctggggaccttatttctggggtctgcacctccagggaaccccttcatctggggactggcacctgggtgtgagggggtcaggattcttctctctgccttccctaagggtccggcttccagcatgtgtatgattttggggtgggtccccatcccacctgtgacactgggacttgggaggtcaacctaggttggtgcctggcccttctggctccagtctctccccaggggaaagtgcaggaggtataaacgggcattgccctctccatcctctgccccacttgctgggtgttcagggttctagtggcagcagtggcaggaacccccaagccagcctgtttgggaagaaggccaaggctcacaaggcagtcggccagccggcagacaggccgcgggagccactgtgggcctacttctgtgacttccgggacatcacccacgtggtgctgaaagagcactgtgtcagcatccaccggcaggacaacaagtgcctggtgaggcccagggtaggggctgggctagggcccatcatggcctgggaggacacccacctgatgcgcccctggctggcaggagctgagcttgccttcccgggctgcggcgctgtccttcgtgtcgctggtggacggctatttccgcctgacggccgactccagccactacctgtgccacgaggtggctcccccacggctggtgatgagcatccgggatgggatccacggacccctgctgtgagtgctgggtggggggcgctgggggccaccgccaagggtgccaactagactgtgagccctaggggctgtgcagggtgtgtgtgtaggtgcacgtcttattttttttttattttttgtcgcccaaactggagtgcagtggcatgatctcagctcactgcagcctccgcctcccgggttcaagcgattctcctgcctcagcctcccaactgactacctgggactacaggcactcgccaccatgccaggctaatttttgtatttttgtagagatggggtttcatcagattggccaacctagtcttgaactcctgacctcaggtgatccacccgcctcggcctcccaaagtgctggtattacaggcatgagccaccacgcccggccatgactgtcattgtgtgttgaggttgtcattgcacagaactggtgattttcatgggactgtgtgttaccctgacgctggtgaccattcaggcgtatgttggatgcttccacctctgcaggcggctgcctgtgctggtaacttgtgagtcaccatctcagcggggtcctgtgtgtgacttgtgggcctgagggcgtgaagttgtcggtacttatgtcatcatcaggtgcaggggagtgtgtggctgtcctgtgtgctgccaagtcgtgatttgtgactgtctctttgtctggtcactggccctgtgactctctgtcccttgtcctacctgtgatgccaggggagggggaagtggccatttcaccttgtgaggcctgtggccgtgcctgctgtcaaggctatatgtgtgctgcccccgtacagacaggtgtttggggaccacgtgtgtcagccactgcacatgtaggtgtctggacctatgtgaccatgacactttatagtgcatgtttgtgtcacctctgtgtctgggatgccctggcccctatgttgccctgtcatattgggtgattagttgtgtctgggatcgttgtcctttgcttgtgtgattggccatccaccgtgtgtcacccttgtgagtggcgatggtcatggctgggtgtgtgcccatccggctcctgatggctgtttccaatcttggagtgtgtgtcaccttgtcagggcccgtctggcgtcaagtacaagagtaggagtaggctgggtgtggtggctcacacctgtaatcccagcgctttaggaggccgaggtgggagaatcacttgagcccaggagttcaagagcagcctgggcaatgtagcaaggtcttttaactacagaaaacacaaaaattagctgggcacacctgtaatcctggctcctcaggaggctgaggtgggagaatctcttgagcctgggaggtccaggctgaagtgagccaagattgcaccgctgcactccagcctgggcaacagagcaagaccctgtctcaaaaaaaaaaaaaaaaaaaagagagatcaggtagccgggcacagtggctcatgcctgtaatcccagcactttgggaggctgaggctggcagatcagctgaggtcaggaatttgagaccaggctggctaacatggtgaaaccccctctgtactaaaaatataaaaattagctgggcatggtggcagggacctgtaatcccagctactcgggaggttgaggtgttgaggcaagagaattgcttgaacccaggtgggcagaggttgcaataagctgagatcacgccattgcattccagcctgggtgacgagggaaactccgtctaaaaaatacaaacaaataaacaaaaaagcaggtgtgtgcctgctgctgcattgtgtctccatgtaagtggctgtgtgtccagagttagtgtccccacaagagtggctgtgtctgacacttgtcctagctgtgtgtgtgccctctaagtaggtaatgagtgtcattgttcccgggtatgggtccagagtggccccaggtggcctgatagtccccctggaccaccttccagggagccatttgtgcaggccaagctgcggcccgaggacggcctgtacctcattcactggagcaccagccacccctaccgcctgatcctcacagtggcccagcgtagccaggtgagcccagggctgggggctggggctggggctggacacgttccctgcctggtcccctgcttactgctcccacctctgccacctcctgccaggcaccagacggcatgcagagcttgcggctccgaaagttccccattgagcagcaggacggggccttcgtgctggagggctggggccggtccttccccagcgttcgggaacttggggctgccttgcagggctgcttgctgagggccggggatgactgcttctctctgcgtcgctgttgcctgccccaaccaggaggtacgacgatagggggacctctgggtgggatgtggcatctctcccccaggcccgccctccatgacttgatgcctgcccccagaaacctccaatctcatcatcatgcggggggctcgggccagccccaggacactcaacctcagccagctcagcttccaccgggttgaccagaaggagatcacccaggtgggtgcagggaaggggcccggggcaagggcagggcccctggggatgtgggtgctgggggccctgggagatcagctgctaactttcaccatggcggtattctgtgccacatgatcccgcagctgtcccacttgggccagggcacaaggaccaacgtgtatgagggccgcctgcgagtggagggcagcggggaccctgaggagggcaagatggatgacgaggaccccctcgtgcctggcagggaccgtgggcaggagctacgagtggtgctcaaagtgctggaccctagtcaccatgacatcgccctggtgagtgggcagggccaggcctgggggtgtgtctgtggaggaggtggccggaggaggtgggatgggaggggtgtgtctgtggaggaggtgggatgggaggggtgtgtccgtggaggaggtgggatgggaggggtcggctttgcagccacctgacctgcccggtccccacaggccttctacgagacagccagcctcatgagccaggtctcccacacgcacctggccttcgtgcatggcgtctgtgtgcgcggccctgaaagtgagtgggtcccgccatacccatccccctttggcaggccacccctgacttatacccactccctgatctgtaccccaaccctcgacctacaccccaacctatgcctatttctcaactctcacctgtactctgatcccgggctacaccttgaccttcaacctagaccccaacccctaacgatattccagcccataacttacatcccaacacgtcgaccctcacctgccctcagtctcaacccccaccctgattcccaactacatccccacttccatcaacctcccaaacaacctctacagtccagcccccatctgctcctggccccatcagcactatggcctcaggcagactccagtgctgatgtgtgctgattctcctaggcctcagcccctgcacatccaaccctgcctaaccccacctcttcctttcctctgcaggtagctcaaaactccttgtataggctaggtgtggtggctcacacctatcccagcactttgggaggcagaggtgggaggatcgcttaaacccaggagttcaagaccagcctgggtaacatgtccagaccctatctttacaaaaaatttaaaaatcagggccaggcatggtgacctatgcctgtagtcctagctacttgtgaggctggaatggaaggatcacttgagcccaggagttcaaggctgcagtgagccatgattgtaccactgcactccagcctgggcgacagggcgagactctgtctcaaaaaatataataaataaataaaaaataaagcccttgtacagaacaaccctagacccacccatccctcaacccccctgtgtgtgtgtgtgtgtgcatctcccccactttcccctggaccctggccgacaccctgacccacatccctctgactactctggtacccaaacatctcctacaccccaacctcaagcccctagcctctgcttatccatgcccatcccccccatccctagttgcttactttgtaggctcacctttatctctttttttgtgagactagggtctccctctgttgccccggctgcaatgcagtggtgccatcatggctcactgaagcctcgacctcccgggctcaagcgatccttccgcctcagcctcttgagcacctgggatgacaggcgtgtgctatcacacccggctgatttttaaaaattttttgtagagatggggtctcactatgttgcttaggctgatctcaaactcctgggctcaagggatcttcctgcctcagcctcccaaagtgacaggattgcaggcatgagccactgtaccctgccacctttatctctttttttttttaatttttttgagacggagtctcactgtgtcacccaggctggaatacagtggcgtgatctcggctcactgcaacctccgcctcccgggttcaagcaattctcctgcctcagcctcccgaatagctgggattacaggcatgtgccaccatgcccagctaatttttttttttttcttctttttgagatggagtcttgctctatcgcccaggctggagtgcaatgacgtgatctcggctcactgcaagctccgtctcccaccattcttctgcctcagcctcccaagtagctgggactaccggcgcccaccaccatgcctggctaatttttttgtctttttagtagagatggggtttcactgtaatttttttgtatttttagtagagttggggtttcaccatattgaccaggctggtctcgaactcctgaacttgtgatccgcccgcctcagcctcccaaagtgctgggattacaggcgtgagccaccgcgcccggctgtatttttttttttagtagtgatggagtttcatcatgttgggcaggctgcccttgaactcctgacctcaggtgatccacctgcctcagcctcccaaagtgctgggattacaggcgtgagccactacgcccagcccacctttctctcttgaacttcaacttcttccgtgccccatcccacttggaccccaatgccctcatccaccgctgcctctgctgcattccgcatttcttctctccccaaactcactttcaacccagaccaaactccacccacacctctgccctgacacctccccagccacatgccaagtccctccctggcgtctcccccaattccccgccatccagagggcagaagcaggcaggttgccccagagcagctgtgtctttacagatatcatggtgacagagtacgtggagcacggacccctggatgtgtggctgcggagggagcggggccatgtgcccatggcttggaagatggtggtggcccagcagctggccagcgccctcagctacctggtgtgtggcctgtgtgtggggcctgggtcggtcagggagggccaggagcccaggagttcgagaccagcctgggcaacagggcgagaccccatcttttttgtttgttttgttttaggtggagtttcgccctgtcacccaggctggagtgcaatggcatgatctcggctcactgcaaccttcgcctcccgggttcaaatgattctcccgcctcagcctcccaagtagctgggattataggctcctgccatcacgcccagctaatttttgtatttttagtagagatggggtttcaccatgttggtcaggctggtctcgaacttctgacctcgtgatccatccgcctcagcctcccaaagtgctgggattccaggcgtgagccaccacgcccagctggccccatcttttaaaaataaacaaatagccaggtgtggtggctcatacctgtaatcccagcagtttgggaggccaaggcgggtggatcacctgaggtcaggagtttgagaccagcctggccagtatggcaaaaccttgcctctactaaaaatacaaaaaaaattagccaatgtggtaacttgcacctgtaggccgaggtactcaggaagttgaggtgggaggatcacctgagctcaggaatttgaggccgtagtaagctatgatcacaccactgcaccccagcctgggcagcagcatagctagaccccatctccaccaaaaatttaagaatcagctaggctgtggtgatgtgcacctgtaattctcgctacttggaaggcttgagcccaggagtttgaagctgcagtgagctatgttcgtgccactatactccaacctgagagacagagtgagaccctgtcttaaaaaaaaaaaaaaaaaaaaaaaacaagaaaaaaataaccccccaaaaaacaaaacagaaagaaacccagtgatagtcacagttgtccttttcacattggctgtccctatggggaccaggtttggggttggcgtctgtgcctctcctgagtggccacaccccctctcctgcccacctcaggagaacaagaacctggttcatggtaatgtgtgtggccggaacatcctgctggcccggctggggttggcagagggcaccagccccttcatcaagctgagtgatcctggcgtgggcctgggcgccctctccagggagggtgagtacctgaggggacctgggcacagtggggggcttcccctgctcctttcacccttggtgacctctgaccttggcctcccagagcgggtggagaggatcccctggctggcccccgaatgcctaccaggtggggccaacagcctaagcaccgccatggacaagtgggggtttggcgccaccctcctggagatctgctttgacggagaggcccctctgcagagccgcagtccctccgaggtatgtctaggagacccttgggccctccccgcagtgggggcccctccaagaaatccagaggacagaatcagagctcaaagctgcatcccttctggcctcgtgacttcaagtctctctgggctaccagcaggtgggccactcgctggggctcaatgtagtcccagcctttttaggtccttgtggaagtcacttgtgcctggcacacagaaggcaagtaagagacttgatttcagttttaggcagagtgaccagggcagcgatgggagacgcccaggctgcagagtggggaagaagggctgaggatgcgcctcacccagcagtggggtcagacaaggcttcccaaaggaggttcatgagtgtggtggttttattttgagacgaagttccactctaattgcccaggctggaatgcaatggcgtgatctcagctcactgcaacctctgcctcctgggttcaagcgattctcctgtctcagcctcccgagtaggggggattacaggcacatgccaccacacccggctaatttttgtattttttgtagagatggggtttcattatattggtcaggctggtctcaaactcctgacctcaggtgatccgcccacctcggcctcccaaagtgctgggattacaggcatgagccacagtgcccggccccagaagaggttttatctaagtgtagaattatgccaacaagcctggctaggaagggcagcctaggcagagtgcatggcctgtgcaaaggctgaggcttcagtgtattaaggagctgtggtctacaggaggggcaggagggaagcttggggcaggaggctgactgtgacactccagctctgcataatcactggacctgggtcccagtcctggttctacggctgtgagcacgtcctcccactttgtggagcctcagttgcctcatctgtataatggaactgataagagcgggcacctggcggtccactctggggacttgactctgcctcttggggaacgggttgggggcgaggggaggatgttgactcctctgggtccctttcccaacagaaggagcatttctaccagaggcagcaccggctgcccgagccctcctgcccacagctggccacactcaccagccagtgtctgacctatgagccaacccagaggccatcattccgcaccatcctgcgtgacctcacccggctgcagccccacagtgagctccatcccagtgctgggaccctggggaagtgggacggggctgggatccctgctgtatgcctatagcgcacgagaggtctctgcacagtggttcagggtgtgtgccaatttcttgcagtggcattcataagcatgccctgcctggctgccctgagctctcattaatgtatttatttatttatttgcaatggaatcttgctctgtcacccagcctggagcgcagtgacgtgatcttggctcactgcaacctccacctcccaggttcaagcaatcctcccacctcagcctcccaagtagctgggattacaagcgtgtgccaccatgcccggctaatttttgtatttttagtagaggtggggttttgccatgttggccaggctggtctcaaactctagacctcaaatgatctatctgcttcagcctcccaaattgctgggattacaggcgtgagccactgcgcctggcctccttaatgttttgtctggggagagacacaacttctttggattagagaattagaccactgcagttttttttttctttttaaaaaagttttgtattgttctctttaaaaaattaatatgctcttttttcttttttttgagacggagtctcactctgttgccaggctggagtgcagtggtgcaatcttggctcactgcaacctccgtctcccaggttcaagtaattgtcctgcctcagcctcctgggtagctgggactacaggcgcccaccaccacgccgggctaatttttgtatttttagtagagacgggaattcaccatgttggccaggatggtctcagtctcttgacctcgtgatccacccgcctcggcctcccaaagtgctgggattacaggcatgagccactgcgcctgacctattttctttttttttttctttctttcttttttttttttttgagatggagttttgctcttgttgcacaggctggagtgcaatggcacgatctcggcccactgcaacctccgcctcctgggttcgagcaattctcctgcctcagcctcccgagtagctgggattacaggcgtccaccaccacacccagctaatttttgtatttttagtagagacggggtttcactgtgttggctaggctggtctcaaactcctgacctcaggtgatccaccctcctcagcctcccaaagtgttgggattacaggcgtgagccaccacgcccggcctaatatgccattttcaactggtcatatcacatttttctttctcttttttgttttaaagactaggtcttgctgtgttgcccaggcaggagtgtggtggttattcagaggcacgatcatggctcactgcagcctgagactcctgggctctagggatcctcctgcctcggcctcccaaagtgctgggattacaggtgtgagccaccacgcctggccagtttttctcttttctctatgaaatatctgtgccctctacccaatctcggaacttccagatgtcaggtttttctgttttttctttttctttctttctttcttttttttttttttaaagacagtgtctctctgtggcccagactcactgcagcctcaaaactcctgggctcaaacgatcctcctacctcagcctcctgagtagctgggaccacaggcatgcacccccacacctggctaatttttttttttaacttttttgtagagagggggtttcaccatgttgtccaggctggtcttgaactcccgggctcaagtgatcttcccgcctcggcctcccaaacaggtgtcagttttgatgcagccaactctgcatcattttgtacaataagtggactctttcagctgttgcaggaaaaagttttcttacctctagaatcggatcctggggtagctgtggctggctttgtgactcccaagtgtgggcctgctggggaaaggatcggggtcaggcctttacccaccgcaactcttccagatcttgctgacgtcttgactgtgaacccggactcaccggcgtcggaccctacggttttccacaagcgctatttgaaaaagatccgagatctgggcgaggtgagggacgggcctgagctgctaaaaggcccgcctggtcgggaaggagtttgggggttgaggataaattcctacctaaggtgattctcaggagatgtgggtgggaccctctgctttgagggaggcctaggtgccaaggagtcttaatagagcggagtaggcggggcctggggtattccgaaaggatctgcctggaggagtggcccgggaaatcgggggttggggagtggtgcagggattggggaggtggagctgaccctcgtgcgctcccgaccagggtcacttcggcaaggtcagcttgtactgctacgatccgaccaacgacggcactggcgagatggtggcggtgaaagccctcaaggcagactgcggcccccagcaccgctcgggctggaagcaggagattgacattctgcgcacgctctaccacgagcacatcatcaagtacaagggctgctgcgaggaccaaggtgggcgggacccggcgagtcctagagactcgagggggcgtggttagagcgtgggtgtggccttgtgggcggggccagtctggcctagccaattagagactctcaaccccaggctgcagtacgcggttcttggcatctgggtgagcgtggctgggctgcctccttcccatctggggggtgctacctgctggggccaggatggacgggagccaccagcagctccctcaagtgagaatggggttctggatgggtccatcccacctgagaactgggtctagtgtgcgcgggtcttggccttccctcccgaccttggaggggctctgctgggctcaaggtaggcggtccccggcccgccctctatcgtcccccaccggggccgcccctctccgcggcaggcgagaagtcgctgcagctggtcatggagtacgtgcccctgggcagcctccgagactacctgccccggcacagcatcgggctggcccagctgctgctcttcgcccagcagatctgcgaggttggtcggccccgcccctgcttctggagcttgccccttcctcttcagcttgggctggcctgagcgatccggtgcagtctgctctcacgctccgcccctgctcgtttgcccaggctgtcttgtccttgcactgacctccgaactgtttggcttgcttggccacaccccctcctcccaagggaccacgcacagccggctcggcccctcccaactcgccctcctgcccagctttgctcgtctagccccgtccctgctttctggctcagcctccttttgcttggtgccacgtgccatccggccctctccagcggccgggtagccaccggcctgacctgactgtcccccagccctcctggctgctcaggtcctgccgccgcccccggccgaaccccgccccactgaaactcacgagccctgccccgtccccagggcatggcctatctgcacgcgcagcactacatccaccgagacctagccgcgcgcaacgtgctgctggacaacgacaggctggtcaagatcggggactttggcctagccaaggccgtgcccgaaggccacgagtactaccgcgtgcgcgaggatggggacagccccgtgttctggtgaccaggcggggtgcagtctgagggggtgctggggtcacttggaacaggcagggtggagtagacggatgctgggtatcatgatagggcatgatcccagtgaagcgcggcggggcctagcggtgcgggggtggggcctatggaggcaaggggcggtgtatagagtgcggcttggcctggtgggcggggttaacccggcctagccaatgagcggcctagccaatgagcatatcaccccgctcaggctgcgctcttaagggtgggtcccaactgagcccagagggtccttcagtctcaggtgagggcttcagcctggtctgatccccaagccctcagtgcagccccccgtggcctgagtgcccccctccccctaggtatgccccagagtgcctgaaggagtataagttctactatgcgtcagatgtctggtccttcggggtgaccctgtatgagctgctgacgcactgtgactccagccagagcccccccacggtgagagccaggcccgcagccccaccgggagtttgctagagcaattagaaaggcataggctgggccaggcgcggtggctcaagcctgtaatcccagcactttgggaggccgaggcgggcggatcacgaggtcaggagatcgagaccaacctggctaacacggtgaaacccgtctctactaaaaatacaaaaaaaattagccaggcgtggtggcgggcgcctgtagtcccagctactcaggagactgaggcaggagaatggcatgaacccgggaggcggagcttgcagtgagccgagatctcccgactgcactccagctgggtgacagagcgagactccgtctaagacaggacaggacggagagagagagaaagaaaagaaaggaaagaaaggcataggccgggcgcggtggctgacacctgtaatcgcagcactttgggaggccgaggcgggcagatcacgaggtcaggagatcgagaccagcctggccaacatggtgaaaccccgtctctactaaaaatacaaaaattagccgggcgtggtggcaggtgcctgtaatcccagctactcaggcggctgaggcagggagaattgcttgaacccggtaggcgaaggttgcagtgagccgagatcatgccactgcactccagcctgggtgaaagagcgagagactgtctcaaaaaaaaaattctggacggtaagaacaatctgctgtgaggcttaataataacggcaaacacctgactcacgcttactctatgaatattagtttaacgttcacagtaatcccaggtggcagatgttattaccctattttacggatgagaaaacaggcccagagaagtgaactcaaattcaaagtcacacagctgagaagtgtaagaggtgggattggaacccatgcagtcgatttcatgaagttgcagagtgatttctttttcttttttgagatggagtttcacacttgtatcccaggctggagtgcaatggcacaatctcggctcactgcaacctccgcctcccaggttcagacgatcctcctgcctcagcctcccaagtagctgggattacgggcgcctgccattatgcccagctaatttttgtatttttagtagagatggggtttcaccatgttggccaggctggtctcgaactcctgacctcaggtgatccacccacctcagccttccaaagtgctgggattacaggcatgagccaccgtgcctgcctttcattgcctcttgaaaagagcttgtcttgtttatactgtagaaattccttgagctcataggcattgctcagggtcagatgacagttctgagactcactgagttgctggaacgaggggagaggctgccacggcccgacaaatgtccctgtgaggtgagacttcctttgtctttccctgaccccactatcctgctgtggagagggcagcccccaccagccctggtttttccttctaggtctatcatctcatgaagaactgctgggagacagaggcgtcctttcgcccaaccttcgagaacctcatacccattctgaagacagtccatgagaagtaccaaggccaggccccttcagtgttcagcgtgtgctgaggcacaatggcagccctgcctgggaggactggaccaggcagtggctgcagagggagcctcctgctccctgctccaggatgaaaccaagagggggatgtcagcctcacccacaccgtgtgccttactcctgtctagagaccccacctctgtgaacttatttttctttcttggccgtgagcctaaccatgatcttgagggacccaacatttgtaggggcactaatccagcccttaaatcccccagcttccaaacttgaggcccaccatctccaccatctggtaataaactcatgttttctctgctggagcctgtgatttttggagccctcttcaagaaagctgggttagctgggagtctggtctcctgtggacagcagctagcatgagacagcgcagaggtggctggattcaactgtttaacttttttttttttttctttttgagacagagtcttgctctgtcgcccaggctggagtgcagtggcgtgatctaggctcactgcaagctccgcctcctgggttcacaccattctcctgcctcagcctcccgagtagctgggactacaggtgaccgcctccatgcctggctaattttttgtatttttagtagagttgaggtttcaccttattggccaggctggtcttgaactcctgacctcaggtgatccacctgcctccgcctcccaaagtgctgggattacaggtgtgagccattgcgcctggccaataactacttgttgaatacacaaagtatttggtcggggcggtcacaagccacatagattagactgccagtttcaccctttcacatttgtgtgacctcaggctaatggcttcacctctctgggccttagtcctccattatgggagcttcacacttgctatctcataggactcat

SEQ ID NO: 25137 - DNA, 51476 bp, Homo Sapiens
actctgtttcctcatcattcagcagcatgttggggatcctgcggctgatggggaacacacgtccagactctgggcactgcagggtgccctccaacacatctacctccagcagcacgtggtgcattgtcctcaccatggagattcctagcaaatactctaggtattttaaatagaagaaatttaatacagggaaatgattacatatatagtagaagaactgagatgtcaaacagaagagtgaggcaatccacattttagcaactgcagtaagtgacctccaatgtcatggctggagggtgcaaatggtgagaaggcagaagctagaatcatggtggaccccacctgcaagagtcacaaagaagatgcatccattcaggtcacagagaagtaaatactctagtgtctaccttctaccttcttattgctctctagtctcccattttatctagactgctgacaagcatgcagtggaaggtgagcaccagatctgagaggaaacaggcagtgtctggtggcacactacacaagaactctcacaggcatccactaggcttgcttggtgactcatttaaggagtaaccctattttatgtatcagagtagtctatggtgtgatatagcatattgctgcttttgatgtttggtttcatttgttccctgtaggcacctaatcactgttttttaaattccccaggagattctggtatacccaatcagctgagaaccactgaatagtggctttcaaaattttgagcatccaaatattgtcttcacagaaaatcttaatctctgaagtctactgtaaaaacatagaaaggcaaggctgttctgcttgaagcatagcttgggagcctagattcctctcaaacccaggccactcctgggaacatggtctggagatttgaatgttcccaaatctagtttatctcattagtcgatatttatgcacatcctctgtgtctctcagtgttctctcatgtgtagacatatgccccattccaaagagtgactgtagtgtaatgtggcattaaaggaaccctggatagacctgtattggaccttacatattagagagctctgcagatagctcacaaatctccaagtcgctagctgtaaattgagtgataattggtgtcaggttattttagcacagtttggggataaaatggtgcattaatctcccagtttgtggcttattaaactttgaaatggaattatttgagacataaaagagatagcaatactttgctggatgttctccattagtcgagattgttacagaggagaaatttttgccactgtttatcaaatattttttcctctagttaatccatatcattccgggagctttgcccaggaaaaggacgaattacttgcgttcctccgatctctttcaagttctactcccgtacctttaaactgtcacacggaatctttggtgacagaggaatagaggtgggcaagcagggcgtttggaaaccatactgaaaacgaattatccataaagcacagattcaccagcctagaaatggctctgtctggatggattccttgagatgtgttttatctccattaaaaacacaacaactttcaaactttcactgtgtctcaaaatgatagagaaaaaaattcagcctttcaagtattcaagaaaagcttgaagaaataaaagaaactcgctgctctctgggccactttaggaggcagagcgttcctggagaacttcaggattcattcgcaagggaacccaaggtgggcattcaaagccgatccaaaggatattcttctttttagaaaacaaaaggagcgcaaggagtaggggactgaaggtgcccaaagctagtgggtcagtgtcactttcttcctccctttcgcccctttcctcccgctcctttctcccctgtggtctctgctcagcacccctttctctccagccccgactgcccatcttcgcccctaccctcgcgcgtcggggccgtgtctacacccaccccaggacctggtccgtccaggctccttcccatcctcacacccgcgcctttctccctgcggccccggctcgctgctccagctgcccagctcttcccaggacaggggatcccgccaagggggccgcccccgccccggccctcccccgcccggccgcaccataaagcgcccggccgctgccgcggagcccagcagccagctccccagcaccgcgcggcggggacgcgagcgcgcccccgacggcagcccggacgccgagcacgggtcacctgcggcgccggcccgggcgccgaccgaggttcaacgcacggcccggggacccccaggcggggccaacgccgccgtcgcccccggcctcgcggggagcaggaagagccaacatgctggccccgcgcggagccgccgtcctcctgctgcacctggtcctgcagcggtggctagcggcaggcgcccaggccaccccccagggtaagtgggttcgggtcgggcctgggagcgccgggcaccgggtgccccatctgctgagtgagtggagggacttgctcggccctgtgctcctgtggccttgctcagcccctctctgtccctcccgggcccaatcaaagcatattgtgattggaggtagtgattagtctagaattttccgaaattcgattatccaatgatgagaacaattgcctaaatagttgggggatgcaaaattgtttcagactatgcaaagatgtggggtggggttgccttcaaaacttgctacacggtcctagacctcttaacatgttaggctctggtgtagggtgaattccgggtcctgcaccctgtgccggttccctccaggcagccttgctccctaaatccttcctcaggcggagcgatgtatgcccagagtctgctcttgacatccctgagaaagacgcagaattactctacttgccctgccacctgcattttctgctctgactttgcttgaacgacaaaaagaaagtttatttcaaggattggcttgatgtcttaatttctgaggtaaataggaagggctgagaaactggtctttttcaatgaaatcagttctttgcagcaagatggatgcagctggaggccattttcctaagtggattaaggcaggaacagaaaagcaaataccatgttctcacaagcgggagctaagcagtggatagatatggacataaagatggaaacagtagacactggggactccaaaagtaggggggaaggttgggaaaactaccaattgggtactacgttcactgggtgatgtgttcactagaagctcaaatcccaccttatgcaatgcacccatgtaacaaacttgcacatgtaccctctgaatctataatttaaaaagaaaaaagaaagaaattgatctttttctatgaaacggtaaaaattcaacaaataatgtgaaaagatacttggacaatcctcaaaccccttggtgaaatggggtgaaatagccattgggtagaaagcagttaaacagaattttttgtaaagaccaaaaggaagacatgatttaagcaaagaaagatcttagggctataactggccctaactggtcaggcgtgagcttcatctgtttgaacttggtgcctgggttgatttattactgactgtggaagtaaaactggaagagacgcacaacttgaagtaaaagttgtttttcctcttgtagccagagcaaagactgcctatgagggcgttctcaacttccctgcctctcgctgctggaatcacccatttaaactgcatttcgccaaataactcattttcattccagaccagacaaccagaactgtggtttcaggggttagagtactgctaacttttagtttgtgttgaagtatttgaaatgctgtagtccgtgccccatacttctaggaaggtaaaaaaggaagcttttaaacacttcaaaagtcttattgtgatgatatttggcaagttcaaatttataggtataatttttttgtgttatatacgttcttgacttttgaacatacagctttatggtgtgccttaggtatgtctcagacatacctgaccattttatggagatttgaactcggcctatacaacctaaattatctgggtaatttagttgctgtagatgatctgattaagttaagtttctgatagattcttttattgcattatctagtctgcaattatcaggcttaacaggataatttgattatctccttcttcccctgagcttcattgttggtcttaaattagtatatattcaatttacataccatggtagctgcgctcattggtagcagtaatttcacctctaacagtagagggttgtgctttgatcctggcacttaaacgtaataacattaatagaaaatggtagtgtctcatttccttttcaaaacactctctatgttcattactaactaatcccatctctgcctcttgagagagatgcaaatgaatcagacgaaccatagattgaaataccgcaagtttagcttgagttacatcatgaacctgatcatagtcaaaggaagaatcaagagtactaagaattttgttttgaatgtagttcccatactttaaatacatatctcttttctgaagatgttttgtcctgaatggaactttaaaacatattgccttatttccctttgccctcattagtggaaatgtaaagtttccaattctcttgaaaattaaaaaatccaatttcccttttgaaatgcagtaggcaacagtgtttatggtttagggatataggcactaagaggagcacagtaaatgttctgctttccaacacatctcatgttaatttcattattgtgtaaggacccctggtacatgtgaaaaatacagtatagatccagtttgaagacaaattgtcttttaaaaggggtaaatattcttgagtaactaggtttttgcctgtttgctttagaacttttattcattcttattacaaaagcaatacctgcccattgtagaaaagattaaagttagataagcaaaaaataaaataaaaagaaaagaggaaatttaaaacttatatttatgcaacccggggatagcttctattaacattaacatgttgttgtattgtctttcatttcaaatatttttctatgcaaaaatatatttcaaatggaattacgttatacatatagttttagaatccttttttcttaatgtatcatgaacatcttttcacatctgtaagtattcagctacattttaaaaataggtagtattctgctttttggaagaatcaaaatgtatttagccagggttgtaatatagaacccttaagttgttttcggttttgatattgtaaatattaatttattgaacaagtgcaggtgtcacaggatggtttgggatgagtttaaccatcccctcaatctcagccaagcccttctctttttttttgctaaggacagttaatgttttcatagcaaaatgctatgccaacagagctcaggtttacctctcttccaattagattttcacctaattctttcctaaatagaaattctagaattaccactagtgtctaatattcttgtacctaaatcatttaccatgttatccattatttccctaggataaattcccataagcagaattgctagatcaaggagcacatatgttttagggcctttgatactgttgtttaaactgtcttcaaaatgtttatactagtttaaatgttacacagtggtacagagagtgcccatttccctgaaccctcacaaacagttgagtactgttgtatttactaattttccaattcgatggtgaaaacaatacgttattgtttaagttagcaactcctgcatcattaggtaaatacatgaacatttatttatatacttaatggtcattgtaattctttttatgtaaattgccttttcatattccttgcccatttttctattaagatgcttatcattttattgatttgtaagaactctttatcaattgtcaatattacccatttaataaccagattattatatccaagagacagctgtaggtgctgaagtttctgcagcctatggaattgttcaaatgatatttgcgtctgctaatagatatactaaataacttccactgagtattacccaaatttggcctttgccttttaaatgactctgggcatactctctcatagctttcataaatattacaaagtttgtgagagaaagtactgcttgcttgatcaaaagcaacttatacaaatacaaatgcagattctgatttttgtagagcaattctatcagtcaagagacagaaaccacatcattttgttttgttttgtttccacattgggatttttttaaacagagaaatgttggagaattgtaaaggcacaaagggaacacttaggtctcacaaaggtggcaaatcactttctaccagcacatctaccaccatagccatgttttctgctgcatttcctgtcatttgtcactgaccaggaaaacacaattggctctggtcctggaggtgcctatgggactccgtgacagaaattcactgcttggggacatcagtaaagcaatggcttggatgctttcaccagtcccccttgtactttaagcctttagtgcttttcctggtgggcattttcagagctacttgttcagccaaacccaattatgtgtttgcaaattcagtcctctctcttgagggctacacccagtgatgaatattgtgctgtatttcttctggctcaaatgtccagccactataaaagtgacagggaagaactggtgagtttggcaatacggaaaagggattacaagattagtttacattactttgtagcttactgtcaaattgcaccccccccaaacaaagaaaccctgttttccccaaaattgaatctttcacttataccccttcttctcccttcttcccagtctttgaccttctcccatcttccagtcagaggctaaacccaggcgctctgctgccagtcctgacagaccccgccctgaatgatctctatgtgatttccaccttcaagctgcagactaaaagttcagccaccatcttcggtctttactcttcaactgacaacagtaaatattttgaatttactgtgatgggacgcttaaacaaaggtaagcaaatttgctgaaattattttcttaaaaatctcctttttctattccaggattaggggtatactgtctttgagatggtttccttgtacaattatattctcactcactagtcatttcagtttttaatactgaattcttcttactgtacatttacctatattggcgggggggtggggggcggttcaggaagaaagtgacattgggagaaaaaaagaattgctgtgaccaagatgctttttgacattgtctcatcctgatgttattctgaatccagttctggaacagagaggacaagggacaattcagccattatcttaggcagctcaggctgctataacaaaataccatagactttgtggcttaaacaatagacatttacatctcacagttctagacagtggtaagtctaagatcatggtgccatctcagtccattttgtgttgctataaaagactaccggagactgggtaatttataaagaaaagagatttatttagctcacagtcctgcaggctggaagttcaagggcatggccctggcttctgacaaggactttcttgtgtcacaacgtggtggagaaggtcaaagagggagcagacacatgggaagaggggaaaacctgaggggcaccgtagctttataataacccactctctcaagaactaattcattcccttgagaactaatccattttcacaagagctgaaactcactgtctcgagaacagcaccaagccattcatgagagatccaatcccataattcatatgcctcccacaaggccctacctcccaacaccgccacattggggaccaaatttcagcacgagttttgacagggacagacataccatatccaaaccataccacccgcagatttggctccttgtaagggcccagttcctggattgtagatggccatctttttattgtgtcctcacatgatgaagacagacagcaagctctcttgtgtctcttcttataaagtcactattcccatcatgagggccacaccctcaggacctcatctaaacctaatcatctcccaaaagccccacctccaaataccatcacactggagattaggagttcagtatatgaatttgatggggcgggaggaaggggacagatacaaacattcagcccatgacagccaccccatactattcttatgttccctttgaagccagtgctcagtagacctagctcctaactccttaagcacctacctggccgtgatggaaagaatatacctcaaccagtagaacaggatgaatagggctcttttctccctgtgcgtgccaatttacacaggcctgtcactggtttgatccctctgctgtcatttgttttgttgccgtagtgagttactataagcactgagaagtgagtcccaaagaaaatggtcactatttttcattgccttctcctccactccttccccgggggacaacacctgttcctgtttattaaggaatgtgacagatgcgtgttcctgctgcttcatgcatttaataaaataggagggctggttcttctggctgggttttatgtttatttcagtttgctttacaaagtggacacttcctagtgcttcaaactctctcttagattatatttgtgattgtacacttaaatctgcaggcattaggaaatgaaagaagtttctaattcttaactttcataggactctaaagttaaaagtataaatgaatgggactttaaccccttcttttctgtcagattccaacatgcttcttgcctgcttccacgctactcccaagtctgctttctctgtatgtgcctcatagcctgtcaggggccttgaggaggtgtcagataataaagtgagtctgaggacatggccagcagatgggtcaaccgttcctgtccccctttccccatcttcagccctaatgaggggggattctgcccatgtctctgccttgaatcaaacagccccattttgcctagcatctgctgaaggaactgctcatcttctgacaacccagctactcagtttgtgatcgtaaaaatcaccgttcttcatctgtggatcagcagcttctcctaacctgtctatttcagaggcattgcaaagatttttctttcggttcatccagcttaatggccagaagttcctctgcagagtaaaaaactgctccaagcttttgccctcactgcctctcaccctctatttctaaattggccagtatgtgtgagcccattgtggaaagtctgttgctgggaaacacaaggaagcaacttcccctgaacggatcctttcagtttgtatagacaagagtaacactggatttaatgggcagtaggtagagggtaaggggatcgttagtatgtttcctctgaagaatcaccagtaatatgagtcagctgtaaataccagttgatcaaatattttaggggctgtaatcccagcactttgggaggctgaggcaggcagatcacctgaggtcaggagttcgagaacagcatggccaacatggagaaaccccatctctactaaaaatacaaaaattagccgggcatggcagtatgtgcctatagtcacagctactcgggaggctgaggcaggagaatcacttgaacccaggaggcagaggttgcagtgagctgagattgtgccgctgcactccacacttcagcctgggtgacagagcgagactctgtctcaaaagaaaaaaaaaattagaggaaaagatgaaagggttgagatgaagaactgaaagatgaacatctccctaccctccaacctattaggaaagataaattgttcttagaaactgtgggggcagaaggagtcctggaagaatctagaaatgagaattctcataaggcaaagagggatttatgctgttattagagcttgaagagttgaagaatgacacagagaagttgtttcactggagcagtcggaaaaaatacgaagatttgccagcactggtgaatataaaagtttcaggaaagagaagtccattctgactggaacaataaaaagaagtcactgggtccatcagatccaaggaaaagacagagcctgtggttgagactccccactgcagtgttcagtggtggccatgctgacttgacataattctccccacaaccctccacaaattatctacctggacatggtaggctccagacagcattcatctggccaaggttcagctgatctcctcttttgctgatttgcgtggaaaacggtgaaacagaagaaatccaagtggatctctactgacttaaaacacctgagtaggaaataaaacacacccttccctccattaaagtccaggactgggagatgaaggagggtgactacacagcatcaaagagcagaatttggtcatctgggcctcatatgacctcctgaaacaaattaaaatgtagctaatgaagactgcaaagaaagagtttgccactgagctctctgcttctactctcaccctctccaagtcagcctaccccaggccacctcattactgttcacaaacataatttggatcaagatacatctgacctctgagacctctagtggccccctttccaaattgaataatgtacccatgtctcagcaaggcattcggggcttccactctgcatggccccaagcagcctttccagtttatccctcattccagcctccatgcagcctgagcttcaccaagataggctattgccattccttggggccgcacatgctgcctctcctccatccttttgttcctgctgtctgctccctcgacacatatcctgcatcacctcttgacacccaaatcctacacattcaagacccatctccagctccttctgatattctttctaatatgactttgtacctcttaaggaagacattcatcttagctcaccttgtacttgaattacttctaggtcttctctccatttggttgggagctctcttgagacagggactatacagcccttatctttgcatctgctgcagcacctagcaaggtgccttgtacatagaagtagttcatggatagattgaaaagaataaatggaggctgagaagagtagacttgtttgtgaaaaatgacatacaccattgtgaaattctgggattccacaatatctgacacatagtaggtaataaaaaaaaaattatttatttatttatgagacagagtcttactctgtcacccaggctggagtgcagtcgctagatatcggctcactgcagcctctgcctcctaggttcgactgactctcctgcctcagcctcccgagtagctggaactacatgtgcgcaccactacgcccagctaatttttctatttttttagtagagatggggttttgccatattggccaggctggtctcgaactcctggcctcaagtgatcctcctgtctcggcctcctaaattgctgggcttacaggtctgagccaccacactcagccaaaaaaagatttttttttttaatgaataaatgttgaagggcttttggaataggatgtaagaggatacaggtagtatttctggtagaagtgatctgccaggttatgagtaatacagcctttaaatcttgatagaaataagcatcctgcagaaaccacctggctggatagaagatatggctgatgctcttctagtatctggcgtaaagacaactttccaatttgtatcctgagtttgagtcacaaactgcatcaccatgaatacatctctgaatctctcttagcccttgttgattgcctataaaatggggataataatagctacctcacaggctggttgcaagaactgaattatataaggtataataactttcttcagactatgaggcttaataaaattttcatactcttaaacagtattagagacagatttccactatttaggcaactgttttctaatgatgatggtttggtgaactcttggcttgccttgatgacaatttcacctttcagaaaaagaaacacaagaactgcttctttagtcttagtatgattgtctcagaacaacttggtgctgtgaagtgaaggaaacccaaagtgtttgctgtaatgaccagagagtgtcagtgaaactccttagcctaaggataggacatgtcaaatagttcagagtagtggttctgtagcttgcaagctaaagagaaatatagattaagagagatggtagagcttaaaaaataaaattatagacacaataataagtggaaaaaatgaggggcctcaaacattaataataatatttatggagtcttttttttttttttttgagacggagttttgctcttgttgcccaggttggagtgcaatggcgcgatcttggctcactgcaacctccgcctcccgggttcaagtgattctcctgcctcagcctcccaattagctgggattacaggcatgcgccaccagacccagctaatttttgtatttttagtagagacagggtttctccatgttggtcaggctggtctcaaactcgcgacctcagatgatctgcctgcttcggcctcccaaagtgctgggattacagccgtgagcaaccatgcccggccctatggagtctttttaatgtaccaggactgtgttaaaagctcaaagcctatttccccttttaactttcacaatattcctatgacatgcccttgaattagcttaattttaaagtggtcatgtgcagaagatggaaagaattttaaaatttgacacaaaactataataattaggacaaaaaagctaaaacctaattgagtcaaagttggtgattcacacataagataataaaatggatgtttttagccatgttcagaataagatatggaagatatggaagaaataagcctacctcctggaataggtaatgggagattaacaggtgatagaggtaagtcatagatggctcttttgtttctgtcttacccatcaaggggagtgttcttcaaattgtcaagaacagttaaaagaaaacaaaaatccaagctagatgaggagatagcagaaaaacgcccactctctttagtgagattaactattcaggagcagatgaattacacattgggatatttagtgaagaaagtcatagtggagccactgttagttcatttagaaatcatggagaacagaaaggtcctaaaagacaggacaggcaaatgtttccatttttataaagaagggaagggtggattctgaaaaccacaggctactgaaatttaggacagagctccagagggttatatgattattcatgtattttgggattgcccagaaaagaaatctgggattttttctaagacaaagtggatttactaagaataaatcatgccaaacttttttttttcagtaaagtttcaaagctgatagattaaaaaaacatgctgtgagcataatgtatctgacttcagaaaagaattggatgaagtcgcttattatacctttctaaataatataaaaaagaacgagctaggtaatagtaccgctaggggttgctaagtcactgtatagcaaattatctagtggtttttgacagggctctgtcttgggtattgaactgtccaacatgtcagtgacttgagcaaagacagcattttatcgtgtttgcaattcaaagctagaaaacagttgaacatgttggatactatcattcatatttacaaagtcctaccagataatacaatgggccaaaatcaatcagatgaaatttaacaagaataaatgtaaagctatcaactaggagtgaaaagcaaattgcagaagttcaggatgtgagacatctgtcctaagagttctctaatcaacaacaaatcctaatcagtgttgaggatagtgcctgacacataatggatactcaaaaatatttgccgaatgaatgaatgaacagatactgtgatgcaactgtttataaaaagctccttacattttaggtttcattagtgcatacatatggccaggttaaagaagctaagagtcccactgtactcttaattgtccaggccacatctaatactgtgtctagtcctggacacatttcacaaggacactgtcaagtcaaagattaccttgaaaagagtcaccaaaagagcacctatctggaccccgtttttttgttttgtttggttttgttttttgttttttgttttctgttttttgtttttaccacatttaagtagaaaagttaaaggaactagagaaatgaagaagccagacagaagacatgaaaaatatgaaaattgccttacaatatttgaaaaaagggctaggtgccgtggctcatgcctgtaatcccagcactttgggagtctgaggcaggagtatcacttgagcccacacattcaagaccagtctgggtaaaaaattaagaattttttttttttttttttgagacagagtctcaccctgttgcccaggctggagtgcaatggcgcgtcctcagctcactgcaacttccacctcccaggttcaagcgattctcctgcctcagcctcctgagtagctggggttacaggcaggcgccaccacacccgcctaattttttttgttgttgtcgttatccttagtagagatggggtttcaccatgttggccaggctggtctcaaactcctgaccacgtgatccacccacctcggcctcccaaagtgctgggattacaggcatgagccaccgcacccagccaaaaatacattttttaaaaaattagcctggctcgctggtacatgcctgtagttccagctactcaggaggctgtggcaggaggatcacttgagcccaggagtctgaggcagcagtgagccgtgatcatgccactgcactccagcctgggcaacagggcaagctcttgtttcaaaaaaataaaaataattaaaaataatttttaaataatatttgaaaaatgtcatttggaatgaagatcagactaaatctctgtctagctctgaagagtaaaattaggatccattggtagaagacagaggaaacagatattggctctgtattaggaaaatcttggagagtgatccaaaagtgaaatggacttctctgcaaagtaatgagttccttgttactggaaatgtgctggtagaggctgcacttttattgaaggaatttgtgaagtgagatattaagctggatgacttataatgctaatattttgtcattgtaccaaggctagagaagtttcataggcacttaagaaattgctttgcacctctttcctgtaacatgaccttgggcttctgtgcacactcactgctttgttgtctactagatagttgcatactatgatgaatctcatactttttcaaaacacaaagtcctctgcagatgtttagcataattgctgtgtttcctttcactagatagatgtgtgtgtgtgtgtgtgtgtgtgtgtgtgtgttactctgtatactttacatttattcaaattgccataagaaaactttgaaacagactgcatttatcacagctaggagtcacccagagtactttcagaaaaagcaatttgctgatttaccttttgtatgtatttccaaagcactaaagttacaaagacctagtgtatagggcatgaagatgaataagcaaaggcaaacaagaatatccatcacaagagacattaatgtcaaggaggcaatttttaaatgtacaattatttaaaaagaagaggaaagattgacaatgatggcttccatcatatgtttaaaagtgccaaagagcaaagccatttgccaaacaaagcaaagagctccagactacctttgtgagtttgctgcctgcaggccaggccactctggactcctttgcccaagcagacaaaatattatcatttccagttctttaaagctggcaccctgcttcataactttgacattcaacatatcataatatttttgactaccaggtccacttttcaaaaagcatcttttgaaaattctttctgaagatagcaatatttcaaatcttcattgcctgggcttgctttttcatctcctgccagtcactgaaatcgtatttaatcagactgggctatgtggttcctgtgtccggctggtcccaagcatggaaatgtagctcttggacagtgccataaaatcaggcaatcctgagtagctggggttacaggcaggcgccaccacgcccacctaattttttttgttattgttgttatccttagtagagatggggtttcaccatgttggccaggctggtctcaaactcctgaccaaattgtcaattacacaaagatgccaagtttagagggaaaggatttatataaccaacaaagtgttccacattttaaaaaagacataattgtgagtaataaaagtcagagtggacacactctattttatctattttttttcacttcccataagtagttgtagtggtgccctcagatactatgggatgtgggaaaatcagtaagatatagacttggcagcatgaagggacttaaggtggtgggaagattagggccagtcctgggataaggagttgaaacattatttagaatccactagggagttattgaaggatttcatttgcttgcttgctttgaggaggcaataacgatcagaacagtcctataagaagttcaatctctcagtccaaaaagtccgtgcagaaagagacctaaagtaggaaggggagtcaggaatctaacagagcagcccagaggtggagcagagtcagagacaccgtttgagatccgagcacccgctgactgacagccttcagttccaatccaatctgcactgcattctgggtactaaccctgcacaataaccagctgcaattgccaagaaaacctgtgcagctggtggtgagtgaaaaccaaggatgtgaactcaatgtgctgcagctgaagaaacagagttgtacctggaaccgcccagtgggttcaccttgcccactgcctacacagaacccatttatcaagacaggggaattgcaatggagaaagggtaattcacgtagagctggctgtgtgggagaccagagttttattattactcaaatcagtctccccaagcattcagggatcagagtttttaaagataattttgcaggtaggggcttgggaagtggggagtgctgattggtcaggctggaaatgaaatcatagtgggtcaaagttaggttttcttaacgtcttctgttcctgggtgtgatggcagaaatgattgggccacattactggtctgggtggtgtcagctgatacatccagtgcagggtctgcaaaatatctcaagcactgatgttaggctttacaatagtgatgttcccccaatttggaggtatttggggagcaatttggggattgctcagactcttggagccagaggctgcatgacctctaaactgtaatttctaatcctgtagctaatttattagtcctgcaaaggcagactggtccccaggcaagaagagggtcttcgggaaagggctgttatcaattttgcttcagagtcaaaccatctactgaattccttcccaaagttagttcggcctgtgcccgggaatgaacaaggaaagcttaagtgttagaagccagatagagtcggttaggtctgatttctctcactgtcataatttcctgagttataatttggcaaagacagtttcatacccagtgactgttttcctgagtgctttccagggtggtggccaggcagaggtgtggtcgagtcgggaggtgggatggttccagcctcaggggcctggcttcttcttccttcctggagggacaaaatggtcatcttcctcctgctgtagtgttttcccctgtgttttgttccttctgctatgtgtggatgtgttgggataagatagggcaagatgagcaccgggaaagggggctggcaagaggaagggaaccctgtctgttctcttccccttcccagtgatgctgcctctggagaaggtgaggaaaactcgcacccaacaggctgcaggctcctggggccagagctttctgctttttccagactccatatgactgatgtgaaaacgttgagtttcctgagcctgcttgccctctgggtagtctaactgctctgataataaaataagcgtagaggcactgaagtaaagaatttgcaataaaaaagaaaatgaaaaatggaagccataagagaaatgagtattggatcaagtgtgaagaatgggaaatgtcaaggcacttgataatttttctgctaacaaacagacattgtgaaggtggaagtttccatggttttccttgcctgcgttttcttttgctattgtcatgagatctaggggcatgagggatttgtcatttgagtgttacattgcaacaaaaagcaaggcagaagtacagaatccacttaaatgagagtatgaacacaataggaggttttgctacctggaattagatgttgaattgctgctctctaaactttattttctatataaaaagctttaaatacaatcatttaattattcatttaaagtttatattaacaacatttagtgtgcacctgctatatgtaaagtatcccactaggtactattcatcaaattaaacccagctatttagttatgaaaataaaccatggcccacataccctgtgaagccctgttaaaagcaggcaacatgcccaagaaaatatgtttcctttgaatttcacagaaatcttagtttaaggaagaaaaatcaagagtttttgttataagccactatgtgtatgctctgaaacagttaatgtagagaacagaggtagtggccataactgaaataaggagatagtgagtgagtgtgtgtgtgacctaattcaagtttggtggtccaagtggtatttttcttggcctgtaaaaactacaggtatttgcaaaactgttctaaatagtaatgtaatagaagttttttaaaaattgagttagtgcatatgtttggactcaatttctccctcttttggttactatatatggttctaatttccagctgtgcagttactattgtaaattctcaacattaaaaaaattttcagatacaaattatttttattgatacatactttttacatatttaaggggtacatgtgaattctcaacaattaatattaaataaaaggagaagaattctgttctatcccagattagaaataccttagaatttctatttgtgtctatttccctccattccattattttcttcctcttcataccacatttatatacgtcttaccatttatttatatttatttaatactttacttcaggaaacttagtattgttctggaatcagaaagcccttctagctagtctgtcttgccaggtctttccgattcttctccctcaagaagcaagtggtggtaaccacgtcgacataagagatttcccgtctgactcctcccaccatctgtgtaggtcacagaacctcacgccaactggctctcttcagactgtggtcaactggaaaatcgagtcagatttcagaagggtgggaaaatgaacctagaaagtctaatgtggagaaagccttaaaatatatccttcatgttccacaatagtgattattatctttggcgatactgcaacataaataggtattcttggctagttcatctctggcggcaccatcttggcatttacactctacagaaaaggtacctgaggagaaagatggtccaagttacttgccacaaatcacacagattaacagcagcacagtctgggtgtatatgtgtaatatatatctttttattatttttatatacaagtaatggttgtttcttgtagaaaagttaaaacaatgaagatgagcaggaagaaaaaaataccatccaaacacccagcaaataaccatactaatgtagacatattttcttctaatcttctaggtatgtatgtatacatatatgtacatatatatacacatgcacacttttttctaaacccatattgacctataacctccttttttttttacttaacaaaatactgggaatgtctttttgtgtttttaatattcagctattccatagtattccattttataattatactgtaatttaagtagccagccctctccttttggacatatatgttgtgccaagtgttgattacaataagtatttctgaaatgaacattctcacccatacatcttggtgctgcttttttttttttttctataacccaggacagtgctgaagtgcttcttttctttaatttcctcagttttagttcctagaagtggcaatgctgggctgttgggtttacacatgtttaaggttctgatgcatgtgactaaattaccctccagaaaagttctgctttaagttctacttaaggctttcccaccctgggacagctgaagactggccagagctttgcagctgcaatgatgtgtttaccacctcccttatccagcaacatttgcaattagcctccgaccttgttcctgggattgtttccggtgaaaattagccatgcctggctaatttttgtatttttagtagagacagggtttcaccatattggtcaggctgatcttgaactcctgacctcgtgatctgcccacctcggcctcccaaagtgctgggtttgggaatggtacctgtggatgcacctagaggtgtgtttagacactagctgaaatcactttggtctttctagcaaaccttagccaatgggctccactcacaaagggtcagcttccaagagcagattttagctcagggcctcttatgttcaggacaataatggagtaaaaaaacaaggctgaaaaccagaagatatgtgggcttaagcagatatgtgaatagctacccacataggaaaaacaaaacaaaacaaaacaaaaacaaaaacagaaaataaggtgggagtccttcttttacaaccatggataccttttcttttcttttctttttttttttttttgagacaggatcgctcttttgcccaggctggagtgcagtggttcgatcatggctcactgcagcctcaatcccccaggctcaagcaatcctccacctcagtgtcccaagtagctgggactacaagtatgtgccaccacacctggccttttttttttttttttttttgaaatggagtcttgctctgtcacccaggctggagtgcagtggtgtgatcttggctcactgcaacctccacctcccaggttcaagcaattctcctgcctcagcctcctgagtagctgggactataggcgaacaccaccatgcctggctaatttttgtatttttactagagacggggtttcaccatattggtcaggctggtcttgaactcctgacctcatgatctgcccacctcagcctcccaaagtgctgggattacaggcgtgagccactgcgcccagcctggccaatttttttaaatttactttttgtagagatgaggtcttactatgttgcctaggttgatttcaaactcctgaactcaagcgattctcccacctcggcctcccaaagtgctcggattacaggcataagcctctgtgcccagccaatacctcttattatctaactgagcattgttaaattcagggatgggttgctgagggacgatatgacagattacactcgatttgatgtgtgctgactaaggcctgtgcatgcctagcattgctttagtcatggaatgaaccacactcaggttcagattctagtcctgccacttcctatgtgcttgagcaagtgccttcatttatctgagactcactttccttgtccatagttattccaattgcatttggttgcagtgagtagaaattaagtatttaggctgggcacagtggctcacacctgtaatcccagcactttgggaggccgaggcaggtggatcgcttgagctcgggatttcgagaccagcctgggcaacatggcaaaaccctgtctctacaaaaaatatataaattagctgggtgtggtggctcacacctgtggtcccaactacttaggaggctaagatagaaggatgacttgagcctaggaggcagaggttgcagtgagctgagatcgtcccactgcactgcagcctgggggacagagtgagatcctttctttaaaaaaaaaaaaaagggaagaaatcaagtatttaaagcacctaaggacagcccccagccccatggtagtgctcagcaagtgtttggtgaatgaatggattcatgctctacgcttatatagagtttactttgctttcagattgggttctgcttgctcattgtacttatcactatatgagaattgtattgtttattttcaaatttgccacatattgtctgtttctccatcaacacaaaacattctcaggagaagagttggttcccagcgcctgaaaacagtgcctagcacacagaagatggtgaatcaatatttgtggttatttctcactcacattccgtccagcaacccagtcttgttaccaggaggctgttcagcacaggacacttatcacaccatttattgaccctccacttccccctctgccacttatcacaccattggttgacctgtgcttgcttccagccatcctccgttacctgaagaacgatgggaaggtgcatttggtggttttcaacaacctgcagctggcagacggaaggcggcacaggatcctcctgaggctgagcaatttgcagcgaggggccggctccctagagctctacctggactgcatccaggtggattccgttcacaatctccccagggcctttgctggcccctcccagaaacctgagaccattgaattgaggactttccagaggaagcctcaggtaaaaacccacaaaccattctctgaagtggaaaaatgagctgccagtgcctagggagtgcagaggagcgtgctgagaaattcctgctgcaggtcagtgggtctaatgccgcttgcacatcagaatcacctgcggagcttgaaaagcaagtgatagggggctgcccctaggacaaactgaatccgaatctgtcgggtggggcctagcatatttttatgctaggggcatcagcatatttttaaaataccaattctaatgtgatgccgaaattgagagcttgtgctttcaatgataagtagagactctggatacaattgtaacgttggaaaggaagggcaaaagtaaaaataactacctcagggtgatgacattatctattttcaattttctataatgaaaataaaaaagaatgattagaaactgccaagctttcataacagcattttcacaggtcttgtcagaacatccactaacaaaagggagcttagcttagctgcatttggtcttaagataccatcacctctgtcttctgttttactccaggttgatggtatttttattattctgtcattgcacctgctgtagaaattgccacatacatttcttttagaattttgtgctaggcagtgctttgttttctataaagaactagtattctttgtcctttccaataatgtataactggttaaagttcctgaatttcatccgctatataagccaatgtcaaatcagtaactatgttcttctgtaatggcccatattatttttgtctgctacctctcaatcctcactttccatttgttaattcattatattaatatatgctttagttacaagctactctgagccctttgtacagagaagcagggtgtaagcaataatttccattgcaagtaggaatgctgtgcagttttagatagtaatataaaaactatgaatctgatcctagaagttttgcccttgaacaacaggaagcatttttaatcagaaattccaagaaagctaaaatccaaggtttttggggatttttgtttttcagtcatatatagagagatttttaatgtagatttacatatggaaaaaaattaatagaaagatatgctaaactctctttctgcatccccatagtagcgcatgtaatcagaatgacagtcagaaattgtgtcactgcttatttcagaaattagtgttcaccaccaaataagtcaatttctaaaagtcaggactcagccctgacaaagtcatcagaaactgtacttactggaattttctcagaagctctacctccttagaccatggtagtgatcacagtggctcagtctcataatcacctactcactcattcagtcagtcaacaaatgggcacattctaggcattagtgctaccatggtgggcaaagccagtcattttcctgactctgcggagattatagtctgatgtccaatacaatatgtgttaaatagcacatgttgcctaaatcttagctaaatcaaaaagcagaattcctctgaaaatccttagctgtgctcatttctaaaataaggatgatgacttcactttggcagttaacataaatgttttgttgtatatagatataataaaggtgattgcaagcagcattcacaagataaaagggcaaggaaattgactttttgactaacaatgaataatatcaacccgtaatgtaaaaatatgataccaactacctaatgatcatagaagatatcatttattcattctcatatcccaaagaagtcagaggctttgctaggcccttgagccaagacaactaaaaaataatactgtttaaaattggggttaacaccttatttattattatctaaattccataaacaaattacagacaattcttaagaggctcctgccacaaaataactcctttaccatgtaggaaaagagcctttcgttttctcagctgtcttggtgacaatgccagcattttcctaggctactggctacttacatattcactttagtcaaaaagatagggctggcaggctttaggaaaaaatgtgatcctacaaaattatgtaagatgtcagagggtccaagtatacaggactacttgattatgaaaattgcgtgagtaggcaagcacattggcttttgaacagtgtcagcaatctgtggtatgaatgtgatttcttccaggacttcttggaagagctgaagctggtggtgagaggctcactgttccaggtggccagcctgcaagactgcttcctgcagcagagtgagccactggctgccacaggcacaggtgtgggcttttgggcagtttgcatgccttcatcaacacaaactccaaagaccctgaataggctgggtcccatcaccgaaaagtgggactgtcaacagagcagcccaacaaaacgtatctatgaaaatcagtctcttgaacaaaatccagggcacggaatattttcattatgcttttatttttatgattcacatggaatttagacttagtcagtggcatcattatcattatttttttttagctgaattaaagaaattaccccaaattaaattcaaagattctgggtttttgaatcatcttgtcaggatgatttcctggggaataatttggttttgagtcacttagaaatgaccatcactggctgaaaactctttgccttttgctgttcctacaggggactttaaccggcagttcttgggtcaaatgacacaattaaaccaactcctgggagaggtgaaggaccttctgagacagcaggtaacaagcgggacatatcatcagaaaagccctggtcttcttagagcagctccccacaagctagtggagctgcaggcctgcccaggcatgggggcagcctctgagccagatctccgggggcccacgcagccccgcacgccagggctctgctggaagttctctggaaatggggtccaagctcgtgatgaacacaccatggctctaagcagagcgggagccatcaagggctgctaacgctactgtaagaagtgttacagagagccaggtgcggtgcctcatgactgtaatcccagcactttgggaggctgaggtgggcagatcacgaggtgaggagctcgagaccagcctgaacaacatggtgaaaccccgtctctactaaaaatacaaaaattagccaggcatggtggtacatgcctataatcccagctactcaggaggctgaggcaggagaattgctggaacccaggaggcggaggttgtagtgagctgagatcgtgccactgcactccagcctgggcgacagactgagactgtctcaaaaaaaaaaaaaaaaaaagtgttacatagatagctccacaaggattctttcattcctggatgatatcaggcattccttttcaatccttttttccccttctcatttttaaaggttaaggaaacatcatttttgcgaaacaccatagctgaatgccaggcttgcggtaagtgcttttctagtaatgggctcgcctgagttggatgatgcaggctgatgaagggcttgcggtgaggctgtgttgaccgcagtttctgaaggtctaccacatagttggaggggagggaggaaaagttcaataggaaaccaaattttgttttgccttctgtatatcttcctggcggtgaatacgcctgtggatgattgtttttctctaggtcctctcaagtttcagtctccgaccccaagcacggtggtgcccccggctccccctgcaccgccaacacgcccacctcgtcggtgtgactccaacccatgtttccgaggtgtccaatgtaccgacagtagagatggcttccagtgtgggccctgccccgagggctacacaggaaacgggatcacctgtattgatgttgatgaggtaaaagttcacttagactgggaggggatccctaagtatcctcctcaccctgcagcttttggaaaaagaagccaagctgatgattaagggctgacttgggctgtcctccaggctccattgaaaccacttgcttggagaccctgagacaagggatggcggaaggagacatgacccaaggttatggctgcgtttgtcatttttcctctgtgtttccaactcttctactggtccattggctacagtgctgaggtttctgctttacacgctgacatttgcattggttatttctcttaaatagtctgtgctacaattttgtttttcccccacttttgcaaatgtggaaggggaggatttttctaagggtatatttcaggagtcaccgtggatttcttcaggcttcctaaaataaaggagcagaggggaatctcacaccaacaagggggaggccctgtaacctatgagtaactaaacgtgcccagggagggccccagaggaggcacatccagcaaataccagctatttgaccggctggcagagccccagaagagactgtttcaagaccctggttaggcaggccagcctagtggctgaagcctgcaatctcaacactttgggaggctgaggcaggaggatcacatgagcccaggagtttgagaccagcccgggcaacaagacaaaaccctatctatctctacaaaaaatatgataattactggggcatggtggcatgtgcctgtggtcccagctactctggaagatgaagcaggaggattgcctgaggcaggaggttgaggctgcagtgagccatgatggcaccactgcactctagcctgggcacaaccctgtctcaaaaaaacaaacaaaaaaaaacatggttaggcaatcaccagtccagttgcaaagcaatgttcatagcaggtagcaaggctgccaccaaaatgtgccttcaatgtgcctttctcctcccacccagcccaaggaaggctgaaaggagaagcgcaggggagagatgcaggtacataacttaggcacactgactccctggggctcctgcaggcccatggtaatgttagtaacactcagctgattaccttcgctagtagtaagcaattaagacggtctctagtaatccctcaattggagaaacaactgcatacatttcactgaactgcatctggtttttatctgtgaggtagaattttcctctttctgaaagggcaggaagtggtcatgttttttacattagttgaagtggtttaaaaaaaacaaaaaacaatctccaagattcctagagccttggaatagcatggacttgacaggacatggaggcaggcacaggccctgagggattacatggtaatgaagaggcaccggccctggctttgccttctcgaggtctttctgattgagtagttggtttgctgatgcttttggaggcatctaacagccagctaagtggtccagggacatagtcctttcacagagatttgcaaattccatgtcagaatatcagggagcttattacattgagaggtaggctggttaatatcaaggaccctttcaacatgcatgtgccattattctacagcacagcaaagcctactaaaaagcaacctcagattgtgtggtcagggattcagtgggtaactggagttggaagcctttatttccttttattattttttccaccaaaagatagttaaatgactaaacaagtatgtgcaaatagatgaagaaaagtttgagagtgttttctcggtgtggctaaagactttgaacttttttgtctccagtgcaaataccatccctgctacccgggcgtgcactgcataaatttgtctcctggcttcagatgtgacgcctgcccagtgggcttcacagggcccatggtgcagggtgttgggatcagttttgccaagtcaaacaagcaggtaggctgaagtcatggtttctattcatttctcatcttaacaaaacaactgtggttggttcccacctctttggtataaacctttacctccatgagcagtcaaggccatgtggaatgtcatggtgcaaaatgagcaaattaggaagtttttcaaccatttctgagtatttacatttataaaatctagaagggaggaagcttttaagaggggataatagagtatcactagaaaaacagtaaatggggtaatatggctattggcataatttcagtcttattttgttgatagctgttgagcattttgtcctgcagaataagttgagaaccacggagacaaaagctttgaaaaattaggtcacttttgtagagtcattgttgccaatcgaagctgtttcagagatgaggggattttaagagtagaaataatcccccaaggcaacctcccctttttcttatgtaagctataaattgccataaagcacttgagtacttcttgacagtctccatttatttcccaatgctctactatattctggtcattatttaactgactgactgtgaaattctttttgatgtttttagcccttaaaaatggttgttctataaatatattttactaccttagggaaattattagctttgaagaagggcaggggtttattatttcctagctgcctatcaaagggttctagagggcatgatttttttaagttattgttatactttaagttctagggtacatatgcacaacgtgcaggtttgttacatatgtatacatgtgccatactggtgtgctgcacctgttaacttgtcatttacattaggtatatctcctaatgctatccttcccccctccccctaccccatgacaggccctggtgtgtgacattccccaccctgtgtccaagtgttctcattgttcaattcccaactaagagtgagaacatgcggtgtttggttttctatccttgcgatagtttgctcagaatgatggtttctagcttcatccatgtccctacaaaggacatgaactcatccttttttatggctgcataatattccatggtgtatatgtgccacattttcttaatccagtctatcattgatggacatttgggttggttccaagtctttgctattgtgaatagtgccacaataaatatacgtgtccatgtgtctttatagcagcatgatttataagcctttgggtatatgcccagtaatgggatggctgggtcaaatcgtatttctagttctagatccttgaggaatcgccacactgtcttccacaatggctgaactagtttacagtcccaccaacagtgtaaaagtgttcctatttctccacattctcttcagcacctattgtttcctgactttttaatgatcgccattctaactggtgtgagaaggcatctcattgtggttttgatttgcatttctctgatggccagtaatggtgagcattttttcatgtgtctgttggctgcataactgtcttgagaagtgtctgttcatatcctttgcccactttttgatggggttgtttgatttttttcctataaatttgtttaagttaagttctttgtagattctggatattagccctttgtcagatggatagattgtaaaaatgttctcccattctgtaggttgcctgttcactctgatggtagtttcttttgctgtgcagaagctcttgagtttaattagatcccatttgtcaattttggcttttgttgccattgctttaggtgttttaatcatgaagtccttggagggcatgattttttagactagaaaagggaggccagctagacatataggaatgataagaagctgttaagagtcctctaaagacaaaatctctaagaacaaaccaaggaaacataaggtacttggtgtaaggtagtaaggagcacttctcaatagatttccagtaacaaggcagacagaactgaagtggaagggagccaccttgctaaatttaacagcaaatgttactgcattccaaagtcaaagaaaataaaaggaaatggcgcagtgtccagaaacaaagagaaaactcaaagccagaactgtgactagagctgatgccacagcagatcctgggaggtgggagttgggtccaggtcttagtaacagggacctggcttttaccacctgtgtggagtggatgcagcaatgtagtctgggaactttggaaaggcctaacacccctgcataagtccaggaccctcagagaaccaccttatcaattacaaggagacaggaaacctttagtagccctaagaaacaacaaagaagctctttagctttaatacatggttgacaaaaatgaaaattgcctacagcaaatcaaagcaccacacttgtaccacatacagttatgagttccaaatctgttatacatataatgcagaaacacaagccaaaaaattaaaataataaccagccatgaagaagtgaaatccccagggctctgactcaagtcaaaggcacaccactctgtaaagacatgccaaaattcagggccaatggaatgcccacaggcaaaatttgggctactgaagatatgcttataaacaaaaatggcagtttatataaagaaactcccatgaggaaacatgataaatgcaaagtaaatataaaaaggtaaagaaataaataccatacttaaagaatagggcaatgccccaactgggcaacatggcaaaatcccatccctacaaaaaatacacacaaaaaaattagccgggtgtgatggtgcatgcctgtggtcccagcaaccttgggaggttgaggtgggaggatcacctgagtctgggaggtcgaggctgccgtgagctgtgattgtgccactgcactccagcctgagcgacagagcaagaccctgtctcaacaacaacaacaaaaaaatatagggcaatgtgagaaaaacagataagtttgtaaaacagacaaataaaacttttatcaatggaaaatcgttgaacttaatagatgggcaaaacagattagacacagcttagcagggagttcatgggctaggaggtgaacctaaagaaatcatctagaatgcagcacagagaaataacgacatggagcatataaacaagaggttaggagtcaaaagaagatattaacaagaaagttcgatattcatccaattgtagttccaaagaaagactagaaagcagtcgggggaagctgagaatgttccagaattgaaaaaagctaagaatcctcatttaggagaactgcattgattcccaagcaagattaaaaaaaaaaataaaactttcctaacctaaaaaggtgatggaacagatgaattatacaagttgtcttttctgaataactttcaataccatgaaagcaattctcatttgcaattagattaagtacaaactggtacaaatgcaagggagatggcacaaataaccctcagattaccattctacccgaaattccgcatcttcacttcacacaaagatagcaaaacaaaggagatttatttgcatttctatttaagcagcatgtctcgctaaactttctttgaacttttctgcactaggtctgcactgacattgatgagtgtcgaaatggagcgtgcgttcccaactcgatctgcgttaatactttggtaagtatttctcacagctgttgttatcaaagcagaaccggttattaaaacaagtgtatgtttatagatcatagcttccaaacacacctagaacatgtgggcataatatatttgattggcagaataaaggcaaaagtttgtgctgaaaaagtgtttaatatgagtaattttaaaagtaatttttatgtaagaataattttataagtgccaagttctttattttctatcaaagttgcaatattaggctattagataactatttattgagtaaataattattactcctgtattttaaaattgtgaagagcttggtagtttatattaatagttcagtattttactggtgactacacaatccccaaatggcattatttattttcataaaactttcaatcatggggtcaggagatcgagaccatcctggctaacatggttaaaccccgtctctactaaaaatagaaaacaaaattagccgggcctggtggcgggtgcctgtagtcccagctactctggaggctgaagcaggagaatgacatgaacccggcaggcggagcttgcagtgagccgagatcgcaccactgcactccagcctgggcgacagagcaagactccctctcaaaaaaaaaaaaaaaaaaaaacttttcaaaacttttcattgtattaaattaaagtgcttagcacttagggatgcctataacttaagtattcagatatgggttttatttctgaaagttcctgtcaaactgtgtccaagatgagagatgtaccagagttgactatcaagaaaagaactactgattacgtgtatgactatttgaaagttatccagcctctaggttccttgtttccttgtaagtaaaaacactttacatttatcaagtcacttattttaatcctcacaacaacctcataaacagggattattattatccccattttacaattgaagaaactgagggacagaaatattacatcattaagtccaggcatggtggagcatgcctatagtcccagctcctcaggaggctgaggccgaaggatcatttgggtacaagagtagtttgaggctacagtgagctgtgatcgccactgcactctaacctgggtgacagagggagaccctgtctccaaaaagaaaaaaaagaaatgttacgtatttagactaaggtcacacatcttccaggttggctacagagcctgagttcttctccgcaatgctatattgcttaggaatagatggggatttattgcttctcagcttttaccaggacaaagtagtctgcaaatagatttgcgagatcttggtgtaaaggtaataactgagccacctagagagaaggaaagtagacagtaaatagaactccaggaaaccccaaaaacgaaggactaggccaaggaaaaagagcagaagccagaaaaaggagcgaactgatagcacagccagggaggctgaaagatcgagacaagtcattggaaagcatgcattggatttggcaactaagaggttgtgagtgacttaaatcattaaacaatatatatacttcaaatggatgtcttttacgacctgtaaatgttatgccaataaaactgcataagatgaaaaagatctaatgtacagcatggtgactgtagttaataatactatattatatatatgaaatctgctaagagagcagatcttaagtgttctcactgaaaaagaaaaaaaggaaggtaactatgtcagttgatggatgtgttacttaactgactgtggtaatcatttcacaatgtatacgtatatcacatcatcacactgcacactttaaatatattcagttttgtcaattatacctcaataaagatgaaaattttaattttcattttttaaacatattgtataatatttattacatatatagtgtgcagtgtgataatatatattatatatataaaagctaaaaaaacctggcccctgaagtgtcattgcagcggagctgacagctcatttgtcagtttctcagcctacctcatcagaaattctcaatgcaggccaccagcatttctctgtgcacccattcctttgtcattccattgtaaaagagccaaaggaacagcaataagaaaaattaacttgctttttaagcagatcatctccctgtccccagagtaaacttctcacaccacctcccaggacttcactggaacttttgacctgtcccctatgccctccacggtggcgcgggcaactcagtgtcattggttcacagtccagccttcttccttcacttctattccttctttgtctgagtggccggacgcagcctccagtctgatggtgttttcatcaacattcacatgatcttacatgtaagcaaagaagaaggcatggatctgatgcctgattcctgccagcaatgagtacctgtgaaaatatacacaataactgtacctttgctcaaactgtacctttgcccacagctttcagctcatcacctgatctttgttccttgcagggatcttaccgctgtgggccttgtaagccggggtatactggtgatcagataaggggatgcaaagcggaaagaaactgcagaaacccagagctgaacccttgcagtgtgaatgcccagtgcattgaagagaggcagggggatgtgacatgtgtggtaagttgttttttgacttcctctatcatttttcctcttccatttttaacaccacctctctccagtttctatgtgcttcagggtaaaagtactccaaaatgaaagcattgcaattaaatgagcatggagtgtaataggaacagggtccaccgagtttgtggggagcagcctgacatccatctaaccatcagctgccttttctctccctcttggctggggggcaaccctgtccacttgggtacctggatgccagagcctccggtgaagccccagctcccaagcaccttctatggaaaggcccagaagccagcagcagggaggtgaaggaacattcttctcccctttccttcttctgccccatctacctgcctgtataatgacaacatacctgctgtcatctctaactgtcctcatccttacaacttccagagtctgtctgccttgacgctcctgttgggggtgggccatcgtgtagaggtggggactgtcatagtccctccgggagaaaccttccgtctttggcaggtgactggcagggccagacggcgccatgctgtatgtctacctccactccaatcagggacagctccatgaatggtcacgcttcctgtgcattctccagccacggagctggtctggggaggggaggctgggaagagagtagagcagtcacagcagggcctgacatgggtcccatgctgagcttgtagtgggccctatgtgaaggagagggcatgctcctgccatccattcccaaatccaaggatccagagtcctcagcctgccatccattcccaaatccaaggatccagagtcctcagcctgccatccattcccaagtccaaggatccagagtcctcagcctgccatccattcccaaatccaaggatccaaagtcctggggatcctaggcactgaaaaatcagcagacttcagctgcccccctcctctgcacttcctgggatgccaggccctcggccggtggcccgtcagactctggggtcactggttcacagtgatcacccctgagtagcaagatggattctcggagcccttttccatctttatctcaaagttatgcttctttatctttatgcatacacaattttccacaatgagcctaccacttttcaaataggaaaaataagagtcaaaaatgagttaataaataaatataatgaagtcagccctccttggcaatacagatattctgtaacaaggtcagatggaagaatgtggtgtatcagagggggaataaccccagcaatttcctgaattcctcatggttgggcttgtttattaccaaaaagcagtcattgagaaacaagtgtatatctctgttgaaatccccattttctgtgaacaaattgacaactcccctgggatgatgggtgatggggctcttaatatgtttttgaatttgtaataaggcacaacgacagatggtaaaggattaataaacttggcgtgactactaaaataattgaatctgccagaaaatagctcattaaaaatgtatttgttcctagaggacattttttcctcattaaagtgagtcaaggatcagcctcgtggatcagccttccaggccttccaaaggccctgctggggcaagtgagcaggaaccaggagcccgggagggtctctctggagttctgcctcctaaatcctggttgcagagggagagcacagatgattgagaataagcaggctgtggctgaggaagtcactggtctgaaagcttttgggtggtgaggccaggaaatttaacctgtgctcacataagtctgatttcccttggcccagactctgctcctcagactctctccctcttccttcctttacctcccgtcccaggtcagctttctctccctctgcgtttccagttccctgtgaccttctgggtcccctcctcccatctcccttctgctgctctgcctgttcctggaagtgggagtgggagggagagttttctctctgagtctccctttatatcttttgaatagtgaaccattacactattcaagtgcaattaaatagtttctaagccccacccaacaaggctgagtgactctgggccctccccctgggattgagcaaaggagcagagaggcccttgtcagccaccagcttcctgccaggctcagcttcccaggcctctgatgggctttccctttacagtgtggagtcggttgggctggagatggctatatctgtggaaaggatgtggacatcgacagttaccccgacgaagaactgccatgctctgccaggaactgtaaaaaggtaaggggtgtggggtggcagtaggcacacatgcactgtggctttccaaagtcacatcttctatggggagaggttctgtggatctaatttaaaattgtacttgtaaagtagctgcatctcagaggaagtgaaacagccaccaacaataaagccacagtgtcttgaggtcagaaacagttactggcttaacacaaatgtaggatgtcactcggaactgcattttccccctaaggacaactgcaaatatgtgccaaattctggccaagaagatgcagacagagatggcattggcgacgcttgtgacgaggatgctgacggagatgggatcctgaatgagcaggtacctgcttcgctgggagggcctgtgaattgccacgtaccagggatgatgggagaaagcctgtgatgtcaactatgtatatgaatcatcccaaatgttagtttccatgcctgcattccacagcactgcagctttttaccctataagattcacagatgtttgaaatataaaactgacaaacttgggccaccagagtgctgatgcttcacaacaatggaggaagtggatttagtaaaagtctgagtgatgttctgtcctttcatcttttaggataactgtgtcctgattcataatgtggaccaaaggaacagcgataaagatatctttggggatgcctgtgataactgcctgagtgtcttaaataacgaccagaaagacaccgatggggatggaagaggagatgcctgtgatgatgacatggatggagatggtagatttatcttgcttttgtcttttatttggaattcagttgaccttgttccattgttctctgagagagtaggaatagaatgactgattcggagccttccagctgtgggtggctcattgtggcctgcatctggaagacccaaggtggacttgtgtctatggaaggagaccccacagcccactccactacctaatggctctggatgtttccaggactctgtatcattgccagaaactttgtatgaccccttcaagcagtgtcttgtcagagtgtgtctttatggggtatctcccttcccatttctacctgtcctcactctccactatcctttctacatgtgagagacccagaagtggagaactgaatgagaaggcattgagcagggtcacagactatgcatcacaggctacacatcccattgtgggcccttgaaggaaaaacctttttgaaataccacctgccccaacacacacatacacacacacacacacacacacacacacacatacaccactccagaacatgcacacccccctaaaacatgacctcaccttctgcaagcctaactgatgacccatttccagtggtatatgctggtaagcaaatcacagaaagccctagttggtagcattttccagtttccatgatgtaactccgcattgtcctcattgctgatttcaagctaccaatgtgacatcatcaaacacaaaactgaaaagagagggacacaatggacccagctccagcacaacactgcctagagccctagggtctcagtcatagctcagatacccacgagatcctccctctccagggtcagccatacagccatcatgatcccctcctcgtggttgctatcatagcccttgacatcttggacaaattagaattcagtcgataaatacctctgagagctgttcatttttaagtctcccagaatccgtcctttgaagctacctctggataactgcagaaaagggtagtctctgtgtgacactggcccaggcagaagcgactcaccatgcgcctgatctctccagcacctagaagaagtcagtgacattcccctgactcaaggtagcatttctttctcacaggaataaaaaacattctggacaactgcccaaaatttcccaatcgtgaccaacgggacaaggatggtgatggtgtgggggatgcctgtgacagttgtcctgatgtcagcaaccctaaccaggttagtaggatactggggaattcaaactccaggctgaattcctctatgcaaagactcatttaagacgggtgtctagaaaaacagcagagcctcttagctgttgccacttacctaacaaagcagaggtggaaaaatgacacactgtgggcctgaagatggtgggatgaacaccacacaagatctgaagccctagggactatctcccaggctgtcgattgcctgtgaggttagtaacacgaacttcatgatgctcaatacaagtatttttcctgcagaaaggaaaacggagcatggaaattaaccattgggagccttgtgtccctttagtccctaaacccctacacagcctatgtatggacatttcagattaagttcagccagggatgtgttgcatctcccttctcactcctcctccctgtctggataattgggtatgatgtgtcatttatttttaaagccctgagagaggggagtcatggttgccctctgtgactcactcatgattttggccaaattgcaaattgcagaagcaaagcaaaatcaacctgccttctccccatgcctatggctggctccctgtgacccgtgccagagttccatgcctccacctgccaccatgctaccccagcgcccctttccaatcagctcatctggtgtgtgggcagcccatccatgtagcttgatattttagaaggcttttttgaaaattcagcattgtgcctacaccaatatggtgttgtccttttgcagttttgcaccaccccggttccagagaaataattccccaaatccaatgatgatgggtgaggtctgccttctctggaacattcggtacatgcaggcccaggaataaataacatgtgctgttctctttgcagtctgatgtggataatgatctggttggggactcctgtgacaccaatcaggacaggtatggcatgtctcccaactgcagagagacagatgcaaacatccggagagggtttttggtttgtttttttttttgaggcggagtctcactctatcacccaggctggagtacagtggtgcaatctcggctcactgcaagctccgattcccaggtttatgccattcttctgcctcagcctcccaagtagctgggactacaggcgcccgctaccatgcctggctaatttttttgtattttcagtagagacggggtttcaccatgttagccaggatggtctcgatctcctgaccttgtgatctgcccgcctcggcctcccaaagtgctgggattacaggcgtgagccactgtgcccagcccggagagggttttaaatttcagaacttcctgctgctccattccttgggatctttctgggtggactgagctgctggtgggataatagccctgcctctggtcagaattaccatgaaaattctccctgaaagttctgtatagggtataacggtgtcagaataggttacttaggcactccagcaagtgagatctatttcaggagaggtaatatagcatcatgcttcacagatgggctctggaataagacagctagatataaatttcagctccttctcttacatgccagctaaccttaggcaaattacctaatacttttgcctcaattttctcatctgtaaaatgaggatgacaatagatctagctcataggaccatcgtgaagattgagttgatccatggaaagtgctcattatggtttctgttatatacatagcactcaatagacattagctcttttatttttatattctttcagctcaggaaaacttcaccatcatcccaaaatagaaggctgtcagtttgctgagggattgctattatttcctggtccttgaaatttttttaattcagttttccttatttaagtggaattgttctgtggaagtgagttttgtgaaccctcctagctcaacacgatggagtcccacattaagactcaaggctggatcaactgatcagattctggaagaacatcaccaaaaacagacgtgtgtcactcagccctagcggcacctgcaacccaaggttctaaacccttttgtctccatagggaattcttacaaaggcagccaggacaaggatgagagggaaaggattctaaaagagaaagcaaaaaaagatgtaatttctctcctgatacctggatcagaggttgccctgcagaaaaccagttcctgacccaaaccttactcaaggacagctcctatgaagccacagctctctctctctttttttttttttttgagatggagtcttgctctgtcacccaggctggcgtgatctcggctcactgcaacctccacctcctgggttcaagcaattctcatgcctcagactcccacgtacctgggattacaggtgtgtgccaccatgctggctaatttttgtatttttagtagagacagagtttcaccatgttggccaggctggtctcgaactcctggcctcaagtgatccacctgcctcatcctcccaaagtgtgcatctctttcattatgctctgtgtccttgctgcaaagtacatatagtcatccctcagtgtcccagggtattggtcccaggatacccctctgcccccaggataccaaaatcctcaaatactcaagtcccttatataaaatgatgtaatatctgcatataacctatacctgtcctcctatatgctttaaaaatcctctctagattacttaatacctaatacaatgtaaatgctaggtaaatagttattatactgcattggtttcttatttgtatttttttggtgttattttttattgttctttttcaaatcttttcaatcctcagttggttgaatctgcggatacggaaccgcggatacagaggcctgactgtactagctaagtgaacttaaacatatttcccagtctcttcacatctcaacttcttcatctgcaaagaggagataaataaatgcatcgcacaggttatggtgaaaaatcaagataatgtaggtaaagctcccggcacagtgctggcccaagggtgacatgcagaaaacaggggccgtgttattattggtatcacagtacaaggaaaggcacatcagcaacagagcctgacatcagatgtccctctcctcttccgagaggaaggtgggactgtatcctgacaactgccctaaatgatgtgcgtcaagaatgttccctggtgcaggtcatcttgcactctgactactatctacattaatttctaaaatatcctgtcccaccagcctctagatatttgcccaaaacaaatgactcattctgctatgttttaattcccacaaagttgaaccttggagaagaggataggaactgcttgtttttgcataaaaatgttcagggctacatagaacggctgctaatggaaatagctcagtcttgtgttttataaagcagacctgctgcatgcacagggattctgctgtttgagccacatcattttctgcttgtcaaggctgacttcactttcactggaccctttctgtccccctgtaccatgtggtaggtgtggccctagagcatggtctggtccctggcttccctctccaaaagggtgcaggggcagctcctggcccaggacaggccgcaggtggaccaggtctaaaggagtgctcattcttttccagagtaaccatgagaggtctcagactccaggacacctcttggaggcagggcagactcatcttcaggtggcccctcagcccagaaagtcaggtggacagagaaggagagttctgagaagtcctttagaccagcactgagcccggcctacacactctcctcgagaaggcgtggccctgttcactttgcccttctccccatggcgttcaggtctgaatcctcattggatccactagccagggattgtgaagagtaatataacggaaaacactgtagggcttcctaagagtcagcactttttcatatattgaaatttaatatgcaacattctgattttcatcatttaatctccataacaactctatgaggtaggtactattctcattttacagatgaggacactgagccatagagaggtcaggtgtcatgcctgaggtcacacgctgggcacagtggctgagccaggatttacactgaggctgtctggttccactgcctgtcattgttcccctcacacatcctctgagttgagtatcatctagcagttcccagggactgactgataggagcatctggtcataaatcatagaaatagacccttatcttctttagtaggaaatgactcacttgttttaagaggttggggatgggaaaattgtctctgaggcccatagggcagccttatctaagggaatgaccccagtgggtttgattttaagagccaaccctggtttaaaaaaaacctcaagcacagactctccttcctaaaaatggatccttcctgttccctgctgaactgtgagccacatcacctgtcctttctcctgcagtgatggagatgggcaccaggacagcacagacaactgccccaccgtcattaacagtgcccagctggacaccgataaggatggaattggtgacgagtgtgatgatgatgatgacaatgatggtatcccagacctggtgccccctggaccagacaactgccggctggtccccaacccagcccaggaggatagcaacagtaagcaggctcagcccagagctgcacagcacccctgggctcccttcagccaggcacatgggggcacgcctctctccaggcaccaactcagaatatccccagctcccatcagctgcttctctacacccagcttctctgcatagctgcagcttgtgtggacagcagatatctggtagacaccagtctccaactcagtcaggactgagctgctttgcatcttcctgaacaaccctaggatgccatcacacaggtcagggaagcagccacacactgtggctcagtccccaaagggcttggagagctgctccaccatcttacctgtcacctgccaccttccactgggagtcccagaaaaggagcaggatagagagaatggcacagtagaagtggtatatgctgggttcacaaacacagatgcctgcaggtgccaggcagataagaaaatgtctgcaccaagccagacatgagacagcagggagtgttggggactgaagtgacctggagagggcatgcccatccacagcagtgcacatgcaaaaatgccagcacgttagctgaacaacacacacgtgggggccaccagaagttagtgttagagatattctggtaacaataatttccctgttttctacacattacagtccagaaagtgctgtagacatttgcttatgtgaggtcaagcttaagatccaccagttggtgaactcaactgtaggtaataagaacttcttgaggacagagtggagggcaactgctcaaattgatctttcaaaaaactctgggaggactggcctggtcacccagtacaaggactccagaatggggcctggcaccagctcagacatgtccccagggctcctctcccaacactgatgggaaatcatggccctggttgtgggagcttgagcccttctgttcctcatgcagcccccttccctgccaaggagtggcggtgggtgtgagcgctattgagctcctgtcctttctccaccccactcaggcgacggagtgggagacatctgtgagtctgactttgaccaggaccaggtcatcgatcggatcgacgtctgcccagagaacgcagaggtcaccctgaccgacttcagggcttaccagaccgtggtcctggatcctgaaggggatgcccagatcgatcccaactgggtggtcctgaaccaggtgagtgtcacatgggcggcaatggctcagccttgcctctcaacagaggcccttctgatagtggtaggtcatgtttagagggtgcagacaataagccaggcattcttcacattcgctcttattcctcaacagccctatgacagactacttcaattatgcccattttacagaggatgaaattgtctgctacagctttcatgattgtagcagctttaatgatggtagcactgtggtaagtagctgagatgactggaattgggacccaggcagtctgaccctagaacccacacttctgatctctgcagcagactgccttctgcatatcctcctcattgtgtaactaagaagtgcaggcacagagaggcttagtagattttccagagtcacagagcaagtcacattgattagaagtatatgttgtatgctccccagttaagggcctgtccaatcagcttaagtgacagtctcagcaaacttatttctattcagctttgagcttttttttaacctttacaagcacatgctttctttgagcacataacacaatagagcaactatttcagataatgaaatctttatatggaggtcagacatcactggccactcactcatatggtgcctgaggttttgagcttccttaaggttacttggccccttcaagactgttctgaactccctcaactctctctgcagggcatggagattgtacagaccatgaacagtgatcctggcctggcagtgggtatgtccagggcctcagttgccactcacatagaattcttccagctactagtgtggtttgtctattgttctaatcttatctggtccctacagggtacacagcttttaatggagttgacttcgaagggaccttccatgtgaatacccagacagatgatgactatgcaggctttatctttggctaccaagatagctccagcttctacgtggtcatgtggaagcagacggagcagacatattggcaagccaccccattccgagcagttgcagaacctggcattcagctcaaggtattggtggtttgaagtcattcatctccctttcttctggacctctcatcttttttcagatattgtgttttcccatgtggtacttagttaatctaaaaaaaattgatgcatttatgctaacgttagagtcagggaagactacagttgacccttgccttcattcctgtgtgccagctacattctaacctctcatggtgggaatcccagcctacatgaggtcagagagagggaaggtttagagtgcatcttcaggcacactgtgttggaaactggctaataaatttcatcgataggtccaactttgtacaggagggctgatgggctacttctgtcactcctgctaggacacaaggctgacttaagtagccagacgtttgataggagccctcattgggcaaatgtagggagcaatggatgtgcagcaggaacaaacatggaatgtgtaatggaatactgggcaaggcttagtagtaaaaggttggggtcacctccatagaaatgacatttaagtgtttatgctttgttctgaatccaaggcagccggattataaccatgactataacctggatcatcacttcagatccaggaagcaggaagggtggtgcctgtgtcctgtcctaaaaccttgcttgtgtcatcatgcaggctgtgaagtctaagacaggtccaggggagcatctccggaactccctgtggcacacgggggacaccagtgaccaggtcaggctgctgtggaaggactccaggaatgtgggctggaaggacaaggtgtcctaccgctggttcctacagcacaggccccaggtgggctacatcaggtaggtagaggccccatctccttaccttgctctagaagcaaagcattctccgttctgcatcccagagccttcatttccctgagcaattctgacctaggatagtccccaaggacatgccaggacttttgtgaccgcaggatggggaacctagaaaagaggtgggagagaagatattcagggtcagaccacccggacaggacagtaggaccaagatggggatagaaggagcagagctgaggggacgacccagcgttgtggggttggtgcatttggatggctgtgcccttctgccatgctctgcagagaagcctgagggtggacatgccaatcggtatgaggtaagaggtgtggcagggtctcttctccacaccctcccctgtggcacctctgggccctgtgtaatcacttactagtgcacatttcaccctgactgcagcactatgtcccttacagtctgtcttccctgctggatcacaaactgcatgagggcagcgcttgtatctttttttttttttttttttttttttggagacggaatcccactctgttgccaggcaggagtactgtggcgtgatctcagctcactgcaacctccgccttcctggttcaagtgattcttctgcctcagcctcccgagtagctgggattacaggcacgcgccatcacgccaggctaatttttgtatttttagtagagatggggtttcaccatgctggccaggctggtcttgatctcctgacctcgtgatccacccgcctcggcctcccaaagtgctgggattacaggcatgggccactgtgcctagccatagcttattattttatcttgatctccccagtgcctagcacaaagcctgacatctactacacgtggcatgaactgatcatcatgtaggccaaagtagtctgacttctttctttataggacttttttgttgttgttttttaagtattctcgggagttaggaggcttagggctgtgtctttgaaatgtagatagtgttcttcttcatttgaacttgcagatcaacacccatcctagcctatgtaggatatttaggaaggagtactgagtgcattctcctcatcagggcaggaaagcagccttgtggaaaaaagaaaatcatgagggcaaattcatgttttgtttctctttgtgacattatgtcaaatgtactctttttgtctcacagtgagatgatcatgttctcagccctattaagcccaatgccccttttttattataaatattttgaaatgcccccttttccgtcccaaaatggaatcatagaaattacaacctacctacacgtataatctagaaaatcaatgtgagccctaacaatatcatagagaaataagaataatttataacaaaataatttaaatatttgagcacagccacaccagaagacaaaatgaaacagacacttgcacccatgcctagaatcactacgaaggtgacattctaacagactgttgtgtcagtgacttaaatgtttgttacactggttgatgacagcaatgtaaatttctcaaatggtacacattttagaatgttaattttcaaacaaattttctcaatttaccctggaaaatatagtttatattaaaatttgtgcaaaatatacttgctgtttacaagtgaaagtgagtcaggttctaggccctgatagttgctctttacctaccctggtgtctgaggaacactccagaagtgtatggaatgcaggacaggttttgattgttctcgccagggcattgctcgccatccagcatccctggctgccatcactcagtgccactgtgacaacccaaagtgtccccacagattcctccaactctacttagggagtgctgtctcctgtggagaatcattgctctgagattccaccaaaagatataaatcagaccaaaggaaaagccaaagtttttaagcatggtatctagacaaggcaactcacatgacaataagacacaaaactttctcactcaagatagcaggtttggtttggtttgatttttaactcaagtttgatagtgtgaccaacatcatgttaggccttgtgagagacagaagttgggaagaaacaccccccacccccctccacacacacacggacacacacggtccctgccctcaaggacttccagtctagtaagtaagtgggaacagctacagtacaatccaggtcagcgaaaaatggagcctaaaacagagcaaagaaagacgcaggtacgtataagaagtggggcccctgggcctcacagtgggcactttaccccgggttggatttcatggaggcccctccggccgtgttgtccgcagggtacgattttatgaaggctctgagttggtggctgactctggcgtcaccatagacaccacaatgcgtggaggccgacttggcgttttctgcttctctcaagaaaacatcatctggtccaacctcaagtatcgctgcaatggtaatgtgcattctcgttactgttcaacattgttactagaattagtcaaacactgccaccttatttttataccgcacttcccccccaaaagcccaacgctcataccacatagtcattaaaacctgatagtccctgtgtaccagaagtaaaaagcagatcgcatttatcctattttatccatgtggaaattaagacccatagaatttaactgcatggtttagggtttggggttcagtgagaaatccagtcagatttaatttacaggaagcctttattttcatgtggttaaaacataatcacagatgcaaaatccattctgcctgctgattttctgcacggccgggaaggagcactcctgggctttaagccaacggtttgcaaagcagcctgcaggagaaaatggcggcgagggcctgcggggcgtcctgggcgggctaacagcgccccctacaggacgcctgagccgcgggcgggggtccggggtccggggtggaaggagcctcgctaacctccctgtgcccattcctattgcagacaccatccctgaggacttccaagagtttcaaacccagaatttcgaccgcttcgataattaaaccaaggaagcaatctgtaactgcttttcggaacactaaaaccatatatattttaacttcaattttctttagcttttaccaacccaaatatatcaaaacgttttatgtgaatgtggcaataaaggagaagagatcatttttaaaaaccgtgttgctcagacattgctctcacgtggctcaggctttgaggtgcccgttctcggagggatccctgttaacttgcagggtggtagtttcttctcagacccggtggccgataagatgagcctatgcgtgaatcacaaggcccaggccagaggtctcagctggggtccccccagtttgctccatacaaaacgcctaaccgttccatgctcaccttggcagcctccttatttcgggtaaggggtctcagaaacacgtgtttggggtggcaccttccctagggaggcgtttttctgacctagtcctgggacagatttgcccaattctttctgatgctgtcatcccatcccacaccttccacagacttctattctggccccttcaacgtaattcttaagcttatttatatatttggctccccctagtggactgtaagcatattgacaataaaggatcatgtcattacaatcaatatccccacagtacctggaatgtagtaaatagccagtaaatgtttactgaattaataaacgaagaatgaatgaatgaatgcctcttaaaggacagtagagtgtacatgatcataaaagtcctcctcaactcaaaaagtcacaacatatcctctatttgtggtaccagtagctggatgtacagcacagaaacttgcctaatttgtacactagcctttcttgtatttcaattgtaaatcaagatccaagcaaatttttataaattctctagaaattttgtttcaaagaatattgctgtgcggttatatattttcttattccagaattcctagagatatattaaatcatgtatgaagaaaaaaacaccacagttttatcatgactttaacagtgagaaaatacaatggtgcatgcatgagatctggaggatttctggacatcctcctctcatgtacagcctggagatgtgtgtggccttgtaatccaggacatctgatctcctacatcaaaaactccaatggggccaggtgtggtggcacttgcctgtggtcccaagcactttgggaggccaaggcaggcagatcacttgaggccaggagttcaagaccagcctggccaacgtggcgaaacccatctctactaaaaatacaaaaattagccaggtgtggtgccacttgcctgtagtcccagctatttgggaggttgaggtgggagaatcacttgagctggggaggcagaggctgcagtgagcagagattgcaccactgtactccagcctgggcaatgagagtgaggctggtgaaaggaggcagcaacccacaccatgcccacccctggggcagcctccctgttgtcggctgtgcaagcccaagaacgcagtatg

SEQ ID NO: 25138 - DNA, 6769 bp, Homo Sapiens
cgggagcagagatctgcggccgtttgcagcttgcggtagggaggcgtggtggtctgaagcctccgagcagccgcggccatggcggatgtaaccgcccgtagtctgcaatacgagtacaaggcgaactcgaatcttgtgctccaagctgaccgttctctcattgaccggacccgccgggatgaacccacaggagaggtgctgtcccttgttgggaagctggagggcacccgtatgggagacaaggctcaacggaccaaaccgcagatgcaggaggaaagaagagccaagcgaagaaagcgtgatgaggaccggcatgacatcaacaagatgaagggttatactctgctgtcggagggcattgatgagatggtgggcatcatctacaagcccaaaactaaagagactcgggagacctatgaggtgctactcagcttcatccaggctgctcttggggaccagccacgtgatatcctttgtggggcagctgatgaagttctagctgttctaaagaatgaaaagctgcgggacaaggaaaggcgaaaggagattgacctgctgctgggtcaaacagatgataccagataccatgtgctagtgaacctgggcaaaaagatcacagactatggtggagataaggaaatccaaaatatggatgacaacattgatgagacatacggtgtgaatgtgcagtttgagtctgatgaggaggaaggtgatgaagacgtatacggggaggttcgagaagaggcatctgatgatgacatggaaggggacgaggctgtcgtgcgctgcaccctctcggctaatctcgtagcctcaggtgaactgatgagttccaagaagaaggatttgcaccctcgggatattgatgcattttggctgcagcggcagctcagtcgtttctatgatgatgccatcgtgtcgcagaagaaggcagatgaagtattggagattttgaagacggccagtgatgatcgggaatgtgaaaatcagctggttctgctgcttggtttcaacacctttgatttcattaaagtgttgcggcagcacaggatgatgattttatactgtaccttgctggccagtgcacaaagtgaagctgaaaaggaaaggattatgggaaagatggaagctgacccagagctatccaagttcctctaccagcttcatgaaaccgagaaggaggatctgatccgagaggaaaggtcccggagagagcgagtgcgtcagtctcgaatggacacagatctggaaaccatggatctcgaccagggtggagaggcactggctccacggcaggttctggacttggaggacctggtttttacccaagggagccactttatggccaataaacgctgtcagcttcctgatggatccttccgtcgccagcgtaagggctatgaagaggtgcatgtgcctgctctgaagcccaagccctttggctcagaagaacaactgcttccagtggaaaagctgccaaagtatgcccaggctgggtttgagggcttcaaaacactgaatcggatccagagtaagctctaccgtgctgcccttgagacggatgagaatctgctgctgtgtgctcctactggtgctgggaagaccaacgtggccctgatgtgcatgctccgagagattgggaaacacataaacatggacggcaccatcaatgtggatgacttcaagattatctacattgcccccatgcgctccttggtgcaggagatggtgggcagctttggaaagcgcctggccacttatggcatcactgttgctgaactgactggggaccaccagctgtgcaaagaagagatcagtgccactcagatcatcgtctgcacccccgagaagtgggacatcatcacccgcaagggtggtgagcgcacctacacccagctggtgcggctcatcattctggatgagattcatcttctccacgatgacagaggtcctgtcttagaagctttagtggccagggccatccgaaacattgagatgacccaagaggatgtccgactcattggtctcagtgccaccctacccaactatgaagatgtagccacctttctacgtgttgaccctgccaagggtctcttttactttgacaacagcttccgtccagtgcctctggaacagacatatgtgggtatcacagagaaaaaagctatcaagcgtttccagatcatgaatgaaatcgtctatgaaaaaatcatggaacatgctggaaaaaatcaggtgctggtgtttgtccactcccggaaggagactggaaagacagccagggccatccgggacatgtgcctagaaaaggacactctgggtctgtttctgagggagggctcagcctccacagaagtcctgcgaacagaagctgagcagtgcaagaacctagagctgaaggatcttctgccttatggctttgctattcatcacgcaggcatgaccagggttgaccgaacactcgtggaggatctttttgctgataaacatattcaggttttagtttccacagcaactctagcttggggtgtgaatctccctgcacatacagtcatcatcaaaggcacccaggtgtacagtccagagaaggggcgttggacagaactgggagcactggacattctgcagatgctgggacgtgccggaagaccccagtatgacaccaagggtgaaggcatactcatcacatctcatggggagctacagtactacctgtccctcctcaatcaacaacttcctattgaaagccagatggtttcaaagcttcctgacatgctcaatgcagaaatcgtgctaggaaatgtccagaatgccaaggatgcggtgaactggctgggctatgcctacctctatatccgaatgctgcgatccccaaccctctatggcatctctcatgatgacctcaagggagatcccctgctggaccagcgccgactagatctggttcatacagctgccctgatgctggacaagaacaatctggtcaagtacgacaagaagacgggcaacttccaggtgacagaactgggccgtatagccagccactactacatcaccaatgatacagtgcagacttacaaccagctgctgaagcccaccctgagtgagattgagcttttcagggtcttctcattgtcctctgagttcaagaacatcacagtgagagaggaggagaagctggagctgcagaagttgctggagagggtgcctatccctgtaaaggagagcattgaggaacccagtgctaagatcaacgttcttctgcaagccttcatctcacagctgaaattggagggctttgcactgatggctgacatggtgtatgtcacacagttggctggccggttgatgcgagcgatatttgaaattgtcctgaaccgaggttgggcacagcttacagacaagaccctgaacctctgcaagatgatcgacaaacgcatgtggcagtccatgtgtcctctgcgccagttccggaaactccctgaggaagtagtgaagaagattgagaagaagaatttcccctttgagcgtctgtacgacctgaatcataatgagattggggagcttatccgcatgccaaagatggggaagaccatccacaaatatgtccatctgtttcccaagttggagttgtcagtgcacctgcagcctatcacacgctccaccctgaaggtggagctgaccatcacgccagacttccagtgggatgaaaaggtgcatggttcatccgaggctttttggattctggtggaggatgtggacagcgaggtgattctgcaccatgagtattttctcctcaaggccaagtacgcccaggacgagcacctcattacattcttcgtgcctgtctttgaaccgctgccccctcagtacttcatccgagtggtgtctgaccgctggctctcttgtgagacccagctgcctgtctccttccggcacctgatcttgccagagaagtacccccctccaaccgaacttttggacctgcagcccttgcccgtgtctgctctgagaaacagtgcctttgagagtctttaccaagataaatttcctttcttcaatcccatccagacccaggtgtttaacactgtatacaacagtgacgacaacgtgtttgtgggggcccccacgggcagcgggaagactatttgtgcagagtttgccatcctgcgaatgctgctgcagagctcggaggggcgctgtgtgtacatcacccccatggaggccctggcagagcaggtatacatggactggtacgagaagttccaggacaggctcaacaagaaggtggtactcctgacaggcgagaccagcacagacctgaagctgctgggcaaagggaacattatcatcagcacccctgagaagtgggacatactttcccggcgatggaagcagcgcaagaacgtgcagaacatcaacctcttcgtggtggatgaggtccaccttatcgggggcgagaatgggcctgtcttagaagtgatctgctcccgaatgcgctacatctcctcccagattgagcggcccattcgcattgtggcactcagctcttcgctctccaatgccaaggatgtggcccactggctgggctgcagtgccacctccaccttcaacttccatcccaatgtgcgtcccgtccccttggagctgcacatccagggcttcaacatcagccatacacaaacccgcctgctctccatggccaagcctgtgtaccatgctatcaccaagcactcgcccaagaagcctgtcattgtctttgtgccgtctcgcaagcagacccgcctcactgccattgacatcctcaccacctgtgcagcagacatccaacggcagaggttcttgcactgcaccgagaaggatctgattccgtacctggagaagctaagtgacagcacgctcaaggaaacgctgctaaatggggtgggctacctgcatgaggggctcagccccatggagcgacgcctggtggagcagctcttcagctcaggggctatccaggtggtggtggcttctcggagtctctgctggggcatgaacgtggctgcccacctggtaatcatcatggatacccagtactacaatggcaagatccacgcctatgtggattaccccatctatgacgtgcttcagatggtgggccacgccaaccgccctttgcaggacgatgaggggcgctgtgtcatcatgtgtcagggctccaagaaggatttcttcaagaagttcttatatgagccattgccagtagaatctcacctggaccactgtatgcatgaccacttcaatgctgagatcgtcaccaagaccattgagaacaagcaggatgctgtggactacctcacctggacctttctgtaccgccgcatgacacagaaccccaattactacaacctgcagggcatctcccatcgtcacttgtcggaccacttgtcagagctggtggagcagaccctgagtgacctggagcagtccaagtgcatcagcatcgaggacgagatggacgtggcgcctctgaacctaggcatgatcgccgcctactattacatcaactacaccaccattgagctcttcagcatgtccctcaatgccaagaccaaggtgcgagggcttatcgagatcatctccaatgcagcagagtatgagaacattcccatccggcaccatgaagacaatctcctgaggcagttggctcagaaggtcccccacaagctgaataaccctaagttcaatgatccgcacgtcaagaccaacctgctcctgcaggctcacttgtctcgcatgcagctgagtgctgagttgcagtcagatacggaggaaatccttagtaaggcaatccggctcatccaggcctgcgtggatgtcctttccagcaatgggtggctcagccctgctctggcagctatggaactggcccagatggtcacccaagccatgtggtccaaggactcatacctgaagcagctgccacacttcacctctgagcatatcaaacgttgcacagacaagggagtggagagtgttttcgacatcatggagatggaggatgaagaacggaacgcgttgcttcagctgactgacagccagattgcagatgtggctcgcttttgtaaccgctaccctaatatcgaactatcttatgaggtggtagataaggacagcatccgcagtggcgggccagttgtggtgctggtgcagctggagcgagaggaggaagtcacaggccctgtcattgcgcctctcttcccgcagaaacgtgaagagggctggtgggtggtgattggagatgccaagtccaatagcctcatctccatcaagaggctgaccttgcagcagaaggccaaggtgaagttggactttgtggccccagccactggtgcccacaactacactctgtacttcatgagtgacgcttacatgggatgtgaccaggagtacaaattcagcgtggatgtgaaagaagctgagacagacagtgattcagattgagtcctgaggcatttacttttgggtaaaggagagttgagcctgaattaggaatgtgtacattgtaggaatcctggttgtggggaccaggtctgtgggcctcaggtctggccagccagggctggtgctgtccccgcctacctccacttcctttcccttgctcactctggatccagtgacagcaggtgtcatgggtcaagcataaatcatatatagcattttcaggcatgttcctggtagttcttttgagtctgacattctaataaaataatttgtagaaacc

SEQ ID NO: 25139 - DNA, 1566 bp, Homo Sapiens
atggcttcctcgcgagcctcttccacggcaaccaaaactaaagcacccgacgacttagttgctccggtcgtgaagaaaccacacatctattatggaagtttggaagagaaggagagggagcgtctggccaaaggagagtctgggattttggggaaagacggacttaaagcagggatcgaagctggaaatattaatataacctctggagaagtgtttgaaattgaagagcatatcagcgagcgacaggcagaagtattggctgagtttgagagaaggaagcgagcccggcagatcaatgtttccacagatgactcagaggtcaaagcttgccttagagccttgggggaacccatcacactttttggagagggtcctgctgaaagaagagaaaggttaagaaatatcctctcagttgtcggtactgatgccttgaaaaagaccaaaaaggatgatgagaagtctaagaagtccaaagaagagtatcagcaaacctggtatcatgaaggaccaaatagcttgaaggtggcaagactatggattgctaattattcgttgcccagggcaatgaaacgcttggaagaggcccgactccataaggagattcctgagacaacaaggacctcccagatgcaagagctgcacaagtctctccggtctttgaataatttttgcagtcagattggggatgatcggcctatctcctactgtcactttagtcccaattccaagatgctggccacagcttgttggagtgggctttgcaagctctggtctgttcctgattgcaacctccttcacactcttcgagggcataacacaaatgtaggagcaattgtattccatcccaaatccactgtctccttggacccaaaagatgtcaacctggcctcttgtgcggctgatggctctgtgaagctttggagtctcgacagtgatgaaccagtggcagatattgaaggccatacagtgcgtgtggcgcgggtaatgtggcatccttcaggacgtttcctgggcaccacctgctatgaccgttcatggcgcttatgggatttggaggctcaagaggagatcctgcatcaggaaggccatagcatgggtgtgtatgacattgccttccatcaagatggctctttggctggcactgggggactggatgcatttggtcgagtttgggacctacgcacaggacgttgtatcatgttcttagaaggccacctgaaagaaatctatggaataaatttctcccccaatggctatcacattgcaaccggcagtggtgacaacacctgcaaagtgtgggacctccgacagcggcgttgcgtctacaccatccctgctcatcagaacttagtgactggtgtcaagtttgagcctatccatgggaacttcttgcttactggtgcctatgataacacagccaagatctggacgcacccaggctggtccccgctgaagactctggctggccacgaaggcaaagtgatgggcctagatatttcttccgatgggcagctcatagccacttgctcatatgacaggaccttcaagctgtggatggctgaatag

SEQ ID NO: 25140 - DNA, 77573 bp, Homo Sapiens
acccatagtcgcagaggtagattttatgtgttactggtggggaggccaatgagggaaacagaggccagctcttgagaagtcagaagcagggcagggtttgaatgaatggaacaaagctatgggacgtaaagcccccaaacctgactctgaacctggtatatttctgagtttctctgtgatcttgaaaatgtcatattatgttgtctttagttttctatcagcggataatatggcctctcctatctgctattcatgattgtgagaaagaaaccaggcagggagtgtataaggtgtgtaagtgctttgtaagcagtaaatcactaaacaaatcctagaccctatgttatcagggaggcagttggccgcacgggatagcgtagttacaagagactataggcggagatgggggatatctgtcctgtggtgtagataaacagcctaatcaatacacacacactctacaggtaaatacagcaatttccatactgagctgtgtctaccagagggcaataggaggttctcaattctcaccaccagtgaccctatgaattgccctgtagatgcctctgtccctcattggatatgaggtggtacgagcggtctgaatctgtagacttagacaggcttcaggtatctggggaaccatgtgagtaaaaccttgtattgtttctggggctagaatctagtctccttcaaacactcagaaggatctgtgactgccttcaaaggttaagagtcattgatttttctcactagaaattaataagaacagctatccttggggagaaggaatgatgggggtagggaaagattttcatttaatatttttgacctttctgaacggtctgcattttctaaacaggaacatgtattaggttcattgaaaaaaaatatgtcaggggttagctgagcagtgagataatgggtcctttttagatttttgtctttatacctgttcgtattaaacaaacacaaatattaataacatatttttaaagacccaaaaaaataaaaattaaaaaccctgatagtatcagcacatacacagaaatcactccattatgcaaagttcatcctctattatgaaaggcaaaatgtctacatttcctatcaaccactggcttcaattcagtaaaacttgcataccaagtaggcaaggtggaaaagaaaaaggcagaacatttcatgtatttcaattcagacgcataaaaatgtcaagccctacacgttatcagctttcgtatacaccgtcttctgcattcgcctgtacgggccaatgggctagctggtcggcgtttgatgcttgaagtgatggaacggagtacggggttaaatccactaccctctccccacgcactctagtaattactctatttccacgtcatgtttccgggtgtgtgtgtccctgctcacgcagaaactgaagttcaaagcaggcggagtcacccatgttctttttgttgtccccagaacccaattcaggagttgggtccccagaggatctggagatacctggggactatctaactagctgattcccgcgtggtaagaggctctcaacctcgccaccacgtggtgccaagggccgggaaaagggagagcgggcaggagggagctgtatcaggggcatttaaagtgccttgacgtcacgcactgccaggaactcagctgagttttcagcaggacattccggtcatcttccctccctccccccgggcttctgtgcccaagtcctcggctcttccctcgctgtggcggagggaggagcaccgaactgtcggaacagccagcacaggggcgtatcagtctcctcttggctccgccctttctcctagctgctctcctcattggtcagtgggcggggcttcggctgtaccgcacacgcactgggacctctgggtggccgaacgagctggcctttcatgaattatgcatgacggcgtgcctcggccaggctggggctgggcgaggattggctgaaggggctgtaattcagcggtttccggagctgcggcggcgcagactgggagggggagccgggggttccgacgtcgcagccgagggaacaagccccaaccggatcctggacaggcaccccggcttggcgctgtctctccccctcggctcggagaggcccttcggcctgagggagcctcgccgcccgtccccggcacacgcgcagccccggcctctcggcctctgccggagaaacaggtgaagggggtgcagggtggggccgttggggaggcctggggacccgggggctccgcagcggcagggggcctctgggaccttggggatgttgtgatggacgctgcagtggggccgggagagatgaagagacgcggagggtcgccctgagggaagactcttcgggatgacaggagcgggcctcggaagggactcggggcgctggagggaagtttcgttcttcggagaaacagaacgcgctcgaggggggcaccgtggggcgagggcgcactcggttgcggcggcaggagtgagggacagtcccccgatttcctgctccctggggccctggggacgttccggccaccggagcgactgtcacgccgacggggatcaccggcgcgagtggggggtcggaaagcgcctcctccccgcccggtcggcggctcccgctgagccacttcctccgcttgccctgttcccgctccttcaggagccagctgtgcccttttggaggcaggaataggtgtgtctgtcgcctgcagccttacgggctggctggtcgtgggtaggctttattgcataagaatcaagtttcctgtagggaaattgacagaccggtactctttctaaattccctcgcatctttttctaggttaaattatgctccccccacgtccccgccttgtaaaaaagagaaaaaaagacaaaataaaatccccatcaacccgtcaagccagctctagagagagaaataaacctcttgacattgtccttttccaaatacctggtaaagtcggccagaagataaataattgagccattgcatttactggattgtggtgttgcttaattgcataggacggaatgaaccaattgagagtgggagttttctgtctcagagccaagatcttgggtaaatgcagaggagagggaaacaaagacaggctggccttgaaaaaaccatgtgtgcaaactttacatgcatttggggggtgtggttgcactgaagttaacaagattcaaaccgtcgcccaagttggtatttccatgtttggtacacatcactctgtgccatatcaggtcgttgttaagtgtggtgacaaaatcagtggttagtcatttttttaattaaaaatgtgtatagtgtgtacctgctggtcttactgtatgtgcaactaaaggtttacatagtctgtgtatgggttgtaaatttttggctggctgtgctgataaagcattgggcttgaataaagcaaagcagaaaatcatctcaatcttttatatgtggatttagactgtgttatgacttggttcagccagttttctatcttattttatattaaatatgtctgtgttctctgagtcagcacatttatttccttattacatgttccagacaggagtgctagcccagtttttgttcagtttgcacagtgggatggggaaacaagtctggaatttaaaaaaaaatgttttagaggttggagccttgattttagtctctatattagcacatccatcacaaagaaccattagtaaattcatgaatcttttgttttttatgtagttcatttgagaagaataatcacttagaaatatccacagtgccaggcatggtggtgcacacctctgatcccagctaattgaaggctgaggtgggaggattccttgagtccaggagttgagtctggtctgggcaacatggtgagaggccaggaattgggtctagagtctagtctaagcaccataatgagaacccatctttaagaaagaaagaaaggaaaggaggaagaaaggaaagaaaaagaaatacccacagcacagttatgaattaacccacaaaggacttgtgaggtgggtagttcacataacaattaccctaatatcgtagataagaaaattgaggccaaaggatcaagacacttggccaacgcagcagagtgccatagtggtggaatttgtgcctccttctgtatattttgtgaaaagtatcagtgaaattctttttttttttttttttgagtcagagtcttgctctgttgcccaggctagagtgcagtggcgcaatcttggctcactgcaacctctgcctcctgggttcaagcgattctcctgcctcagcctcccaagtagctgggactacaggcgtgcgccaccacgcccagctaatttttgtatttttagtagagaccggggttttaccatattggccaggctggtcttgaactcctgaccttgtgatttgcccacctctatctcccaaagtgctgggattacaggtgtgagccaccgcgcccagtaagtatcagtgaaattctaacatatatctgaacagtaaaataccaccaataggctgaaagacttcatgggaggtaaatattcaataaacaggtgaaaaaagaaatacaaatggagcttgcttagattatttttctaattgctatgtctaacttgggaagtgaggaactgtttttggtcagcataatttaccatcagaatttagctatttactaatgaaaagaaatactaatctaggtttgttttagattaaggacagtcatgacctaaatgtcatttaaaccagagtgcattgtggcttgatcagtggtcatttctgtctctagaaagttgctttaacttctctgcctctacgtgtctcttgacattcagatatgaggtggggtagaggtggtgaccaactttccagacgcctgagtccaaaccttcttagcttatggttttcttaggtgatgtgcaaatcaacaaatatatacttttttttttttttttttgagttggagttgcactctatcacccaggctggagtgcagtggcatgatcgtggctcactgcaacctcctcctcccgggttcaagtgattctcgcacctcagcctcctgagtagctgggattacaggtgcccgccactacgcccggctaatttttgtatttttagtagagataaggtttcactatattgaccaggctggtctcaaactcctgacctcaagagatctgcccacctcagcctcccaaagtgctgggattacaggcgtgaaccaccttgcctggccaacatatatataccttttgcaactttgtcagagttgctatgaagaataagttgtatcttgttcacagaaattgcagtctactgggggagctgataaatgttttaaccatccaatgtaacatgttgtcatcaaagagatggtgagactttacacttgtgctaacaaggtagctgttctacataaaagaacatacagtacagatgtagaacttttctgttatcatagaacgttctattggacagtgctaggctgaatgctacagatcttcagagaaaggagaggttatgaggcctggagttgtctagaaagtctttttgccaaagagggatttcaactgggtcccaaataatgggtggaatttgataggtgtaaagaatttgcggtggtttatgcctgtaatcccagcactttgggaggctgaggcaggaggattgcttgagcccaggagtttgagaccagcttgggcaacgtggtaaaactccctctcccctaaaaataaaaaaaattagccaggcctggtggcgtggacctgtagtcccagctactggtgagactaaggtgggaggatcacccaagccccgggggttaaggctgcagtgagccgtgatcccgccaccgcactccagcctgggtgacagagtgagaccctgtctccaaaaaaaaaaaaaattcctggtagcccggtagactaggagggtaagtaggggagaagtgattacttacaaaagacattgaatacaggaccaaggaatttcagttctgttcttttgtaggggaagcttttaaaactttcggggcgccgggcgcggtggctcacgcctgtaatcccagcactttgggaggcccagacgcgcggatcacgaggccaggagatcgagaccatcctggctaacacggtgaaaccccatctctactaaaaatacaaaaaaaagtagccgggcgttgtggcgggcgtctgtagtcccagctactcgggaggctgaggcaggagaagagcgtgaactcgggaggcggagcttgcagtgagccgatatcgcaccactgcactccagcctgggcgacagagcgagactccgtctcaaaaaaaaaaaaaataaataaataaataaataaataaaactttggagccgaagcactgatgtttaatcatagagtgcttactatgtgttaggcacaggcctgattgcctgatgctggttaatttgtacaaagtaaatcagtgcatatgccctctgccctaggggagttattaactggagtctgacattgtacaaaggtaggtatcctgactagtttgatttggtactttgggtgaaaaaagtatagtgtgcttaagtgcagaagtgttttttgaggatttttgattggatacaaaccaccactcatattttatgtctttggcacttaaaaatttcaccataacttttgagtcatttataaaaaccactgaaagagtacttgagggacatccccgaatcctgaagaacttctggtgttctggagcagcctcagtgagatccaggaggatggcattgctgggctggcccagcccttattgattatggtgtaaagaattaatatggtggttatatactctttgttagacaccttggcttacaagacgtaagcgtaaagtgtagtgcgctttagtcagtatggccacatggtcctttggtggtaaattgtttgagatgcctccagtttttaaaaggagtagcatatcgggccaggagcagtggctcatgcctataatcccagcactttggaaggccgaggcaagaggattgcttgagcccaggagttcaagaccagcctgggcaacatagtgagaccactttgtttctttaaaaaaaaaaaaaaggcaaaaacaggctgggcatggtggctgatgcctgtaatcccagcgctttgtgaggcagaggtgagcggatcacttgaggtcaggagtttgagaccagcctggccaacatggtaaaaccccgtctctactaaaaatacaaaaattagccaggtgtggtggcacacgcctgtagttccagctactctggaggctgagccaggagaattgcttgaacctgggaggtggaggctgcagtgagccaagatcctgccactgcactccagactgggggacagagtgagacattctgacagtgctacactgaatgctacatgtcttcagaggaaggagaggttatgaggcctgggaataacatatggaagaatgaatttctgttatggtcagttctcatttgtcatgttaggattactgcaactcttacccagccgggtgtggtggctcatgcctgtaattccagcactttgggaggctgtgggcggatcacgaggtcaggagatcgagaccatcctggctaacacggtgaaactccgcctctactaaaaatacaaaaaattagcccagcgtggtggcagacgcctgtagtcccagctactcaggaggctgaggcaggagaatggcatgagtcctggaggcggagcttgcagtgagctgagatcgtgccactgcactccagcctgggcaacagagtgggactccatctcaaaaaaaaaagaaaaaaaaaaggattaccgcaactctttaattcagatcagcaaacatgttgagagccaggtattgcgtcaggcaggatccaaggataatgaaatattgtccgttttcatgaaactggagatgttgcagggaccgaggtgtgtgctatgccagtatggaagtaggacaggggagacgacagggcagtgagtggttcaagactctggctctgaagtcaaacagatctgggactgaatcctggatctgccacttcctagtcagaatctgagcctctattttcttatctgtaaaagaagattataacagtgcttatcttgtaggtactgttgacgattcaataagataatgtggataaaatgcttagcatagtgcctggcacatagtaagagctcggtaaatctaagttcttactaaatatccaagaaaagagattaattcttttcaggagtgagagaaagtcatcattattgaggggctttatcagatgggaacacctgaatagggttttataggatgaataggaattctttccacgaagttgcgttacaaaaagttgcattcaaggctgaaggaacatgagggtgcagaggcttaaaacagccttgtgtgttcagggagctataagtagaagttcttaatttaggagaactaaaccaaggggaaaggaggccaaggaaccacagttcttatcccttttctgttaataattgggtttaaatgtcattaaaataagttattttgtcctttttagaaaagtaataacatgctattataaaaaaaaagacttgtaggaatataaaatgtgtgttttacatgtatcctgttaattgacttgcttttattcagattttttgcagccctttctgtttaccaggttatcttggagacatatttattccaaattcctttttttttttttttttgagatggagtctcgctctgtcgcccaggctggagtgcagtggcgctatcttggctcattgcaagctccgcctcccgggttcacgccactctcctgcctcagcctcccgagtagctgggactacaggcgcccgccaccacgcccagctaatgtttttttttttatatttttagtagcgacagggtttcaccgtgttagccaggatggtctcaatctcctcacattgtgatccgcctgcctcggcctcccaaagtgctgggattacaggcgtgagccagcacgcctggccttccaaattccttttaacagcctagcaaaagaataataaggaaggtaaatctgcccctacaagaaaataatgcttcgacgatccggctttccttcctgctacccccagccataagaataaatgaccttgctcatcactgaaattttacctgacctttgaatttttaactgcgtcagccaaagaacttatattttgagtattcctaaggtgattgctattgtagttttgaaacacttggttggtatgtttgagggtttcatggtccaaagttactatagcagttaaaagagtggactatcaggtcagacctattgggctttaatcccagttctgccttctcttagaccttgggcctgttgttttcacttctctggttttcagtttctctgtccacaattgtggaaacgaggtccacttgtagagtaattgagaggatgaagcaagatgatgcatatcaagtactttgcatagtgccgggcagacaggtaacattcaagtgctaataattactattattactatttattttttgagacaggttctcactctgtcacctaggctggagtgcagcggtgagatcacagctcatgacagccttgacctcctaggctcaagtgatcctcctgcctcagccttcggggtagctggggctacaggtgtgtgctaccaccctcagctaattttctaatttttttgagtcaggatctcgtcacgttgcctaggctgaattactcttattaaaaactataatatcaggccgagtgcggtggctcacgcctgtaatcccagcactttgggaggccaaggcgggtggatcacctgaggtcaggagttcaagaccagcctgcccaacagagtgagacacccccccgtctctactaaaaatataaaaattagccagttgtggtggtgggcacctgtaatcccagctactcgggaggctgaggcaggataatcgcttgaacccgggaggcggaggttgcggtgaaccgagatcgtgccactgcactacagcctgggtgacagagtgagactctgtctcaaaaaaaccgaaaaacaaaaagcataattagggtggtaacgcttatacataggggcaggtggaataaaacataattaggaggtcgggcatggtggctcacgcctgtaattccagcactttgggaggccgaggcgggtcaggagttcaagaccagcctgcccaacatagtgagaccccgtctctactaaaaatataaaatttagcctgttgtggtggcgggtgcctgtagtcccagctacccgggaggctgaggcaggagaattgcttttgaacccaggaggtgggggttgcagtgagctgagatcgcgccgctgcactccagcctgggagacagagcaagactccgtcacaaaaacaaaaaacaaaaaactgtcatatcaaaaactaaactaaaatggtaatatctgttagatattacaaagtcaggcaaattatgattcatggcagccactaatgacccaaaggagagaaagaataattagcagattctaacctaatgggaaaaaaactaaatgaatagggatgggggacttacattctgttagaggaaattgaggctgtcatataaaaggaataggtaaggcaaactgtaaattcctgtttacacaaatgcccttctgataaatctctgcattgcccacagtccatgattacctctcccttattttaagtaatatttaacacattaaaaatggattaccacccaaggaattgctcccgacccagaaagtgcaggtagtgttgaaggtttgaggggaagaggaatgattagagttggttgtgtctcaggaagaagccaacaggaggaaccttattttgagtcaggtaaagaaggtgggagtgaggaggcatcccggtggccaggtatgaagctgggagctgattgctgcacattactcagctgaattaaatgtgccctcacatctgtgtgtgtgcgtacatgcaaatgtacatgtgtatgagttagttggaggggtagacctttattttcctgtcctgtaactttcctttgcaaactaatctgtattcagaacagtgttgcagttaagaaccacccagcttgtccatgaaacaggttctctcaccccatctccccagttttagagaaggcaggaaagaaaaggcagtgcttttcttttttcctggccgtatgcggggcaggaagaagccagcagagcttgaaagagaaagtaaaccttctgggaaataaacggcttggcttccctattgtggaggaggagtgcaaattattagggggatgtttgggtagtttttgtagaagccatttctgaaaactgatttggattagtgaaggtaagcccaatttaggaaaaccctgcccagtctggtgtcagccacctgtttcccgctttgtttgattgatttgattagtttgtggtattctgacctctcatttttattacaagagttggaagatttgagtctgaacttgagcacctgcttcggtgaaagcttcctaaaatgcatgttttttcacattttttctcatgttcattttgttttgctttttagcaaacactttttctgacagaatctaaaagcattagacttttcttgttttccccttctctccccacaatgtaatcttgaaaacccaaatgttagctgtgtaaattacctctcccgtaaaccaaacaaagtgcaatattgcattgagttagcattgaaatagtcggcctttgaatttttttctacttgtggtttagacataataaatatttcatctcagactgactttctcgacaaatcagttttgcatttgggcctcttttcatcagtatgtttagggaaagcacatttattgaaacattaaccaaaatgaaacataattaggaggccgggagcgatggctcacgcctgtaatcccagcactttgggagaccaaggcatgtggattgcttgaggtcaggagttcaagaccatccttgccgacttggtgaaatcctgtttctactgaaaatacaaaaaactagctgggtgtggtgacgcgtgcctgtaatcccagctactctggaggctaaagcaagagaatcgcttgaacctgggaggcagaggttgcagtgagtcgagatcgtgccactgcactccagcctgggcaacagagactccgtctcaaacaaccaaaaaaacaaaaacaagcataattagggtggtaacgcttatacataggggcaggtggaataattgaagcattctggagccagaaataatcaactgattaagaataatctggctgggtgcggtggctcacgcctgtaatcccagctactcaggaggctgaggcaggagaatcgcttgaacctgggaggtggaggttgcagtgagccgagatcgcgccattgcactccagcctgggctatggagcaagactccatctcaaaaaaaaaaaaaaaaaaaatcctgtttctgcagaaatatcccaggtgtcctgggtcagcagtgccccatagattccacggacgtttaccctaagttttccaatgggagttcatacctctatacccagtgagaatattttctgagtaatgggaatgagattggagatgtagggtagagaagatccatacagtctttgggttaaactttttcctctttgcctaggaaagattaatgctaatcttaaccacagatttgtagtaagaatgtatcagttttgtcattcagttctagactccagttttctttattgtaataccaatattttagagtaaattttgaaatgaatcagtacaaaagatatgtagtaagtggaaagttagtccgcaccttatccttgggactctttcccagggacagctagttacctactatttatctctcctgagttacttcatatgtatgcatgcaaacatgttattctctgggtgttgttccttccatatatagcagcaaatacaccaaactctgtattttgctttttgtcactttatcttagagaatactcaatgcaaatacatgtgtatatacctcatgtttaaaaaatctacatagtaaaattagccaggcatggtagtgtgtgcctgtaatcccagctactcgggaggctgtggtgggagaatcacttgaaccctgagatcacaccactggactccagcctgggccacagagcaagattctgtctcaaaaaacaaaaacaaaaacaaaaaaactacagagtagtattctaggctatgcatatcataaatttgatttcctaatgataggcatagatgatttgcctgggcggcaaattagcgttggctgtgtctcaggaagaagccaacaggaggaaccttattttgagtcaggttccaaagacagaaacattgtctgacatttgtttttgggcttatatgaataaatctgtacacatatatttttaatgttttaatcgtaatatgtatactatttggaaatgtggctttttagttaacagagtgcatgttttaccccattgcacttaaacattaacttggggataattaaatgagtctgtcacttggacaggcaggaattgtaccccccacaaacccataaaccgccaattttttttttttgagacagagcctcattctgttgcccaggctggagtgcagtggtgcgatctgggcccactgtaagctcagcctcccgggttcatgccattctcctgcctcagcctcccaagtagctgggactacaggcgcccgtcacaatgcccggctaattttttgtatttttagtagagtcggggtttcaccatgttagccaggatggtctctatctcctgaccttgtgatccgcccgctttggcctcccaaagtgctggaattacaggtgtgagccaccgcacctggccggtttttttttttttttttgagatggagtcttgctctgttgccaggctggagtgcaatggcatgatctccgctcactgcaacctccacctcccgggttcaagtgattctcctgcctcagcctcctgagtagctgggactacaggcgtgtgccaccacgcacagctaatttttgtaattttagtagagatggggtttcattaataatcattaatattagacaactgtcagactcacagtggtggatacaaactttctcaaattctgatttttactctaaagctcaaattttatcattggcaacaaatattgtcagttgctttccctgaacagacagcttcccttctttcatttttgagaaaatatctgccagtatcccagttggtttatcaatcattctttctctttttttttttgagacggagtctcactctgtcacccaggctggagtgcagtggcatgatctcggctcactgcaacctccacctcccaggttccagcaattctcctgcctcagcctcccgagtagctgggattacaggggctagcagccacacctggctaatttttgcatttttagtagagacagggttttaccatgttggccaggctgatcttgaactcctgacctcatgatatgcccaccttggcctcccaaagtgctgggattacaggtgtgagccattgcgcccggctctattatttcttttctttctttctttttcttttttttttttgagatggagtttcgctcttgttgcccaggctggagtgcaatggcgcgatctcggctcaccacaacctccgcctcccgaattcaagtgattctcttgcctaagcctcccgagtagctgggattacaggcatgtgccaccacacccgtctagttttgtatttttattagagatgggggtttctccatgttggtcaggctggtctcgaactcccaacctcaggagatctgcctgcctcagcctcccaaagtactgggattacagttttgagccacctgacccggtttgcttattatttcttttaaatttaaaaaataataaataaaggggccatgagagcgaagagtttgagaaaggttggtctaaaggttttaacataagaatccctgggttatttgcttaaaaagaagaaagaatctatggatctgcctgagagggtctgatgtagtttatctggggtcatcctcacaggcatagcagatattctgattcagatggtccttggtccttagtttgagaaatgtggctttacaaggcccatagaatataaagtcttctttggattagtgaagtcatgtccacagggtttagaaaatgtttttgttttagagataaaggtaagtggaagagtagacatgtagtgaatgagggaaaatgttttagagatttctttttattctgtttactcttcttggtatgcacgtacctgaatattaaggatattttatgaagtcatgacattaccagattaatgttggttttgttttaaggtactttctgactgctcgggttaattcctacagacgattctggtaaagaatagcctttaagttttaaaagtgttgacttatttcagatgtcttaataaagttaacttccagttattacatgtaacgtatataaagctctcattttcctttattctcgttaattgtttgcataacaaattcaaagggaaatttgcttggcagagatcagatagcagagatgagatttaaaaacaggtaatttggctactagcctgggagtttgaagattccaagtttgcatccatgtgtagtcacttaacatttctgtccttatctgtaaatgggaataacacctacttgatagggttgttacattatcttggccacctcaggttctctttggctgagtgattgactggaaaacgcaatgtgaattcatgcttcagactgggttcttttttttttttttttttgagatggagtttcactcttattgcccaggctggagtgcaatggcacgatctcagctcactgcaacctctgcctcccaggttcaagcgattctcctgcctcaggctcccgagtagctgggattacaggcatgcaccaccatgcctggctaatttttttgtatttttagtagagacggggtttcactgtgttggtcagactggtttcaaactcctgacctcaggtgatccacctgcttcagtctcccaaagtgctgggattacaggcatgagccaccgcacccagcccaggctaggttctatatgggtgtgctttttagaatttagatcatgggctatccccaacacaaactggataatgtttctttctagattctctctaagcgtgtattctctttctttcctaggcacagccaccacttcacttacattgtgggattataatttcatgagtagtggaatttccttaaccttctcttgtgtgggagctgaaggacaaaatgagatattctctgaagagtggttacatcatgcaaaactatgatgtgtaatgaggtcacttagttttctaagtacattatacattttgataagattttcatagaaaagcttgtctccttggggagatcactcatcttccatcttgactattatttaaactttatgggtcagatttatctttttaaaaacttaaccataaagctcaattaattttttttttttttttttgagacggagtctcgctctgttgcccaggctggagtgtagtggcgcgatctcggctcactgcaagctctgcctcccaggttcatgccattctcctgcctcagcctcctgactagatgggactacaggcgcccgccacgatgcccggctaattttttgtatttttagtagagacggggtttcaccgtgttaggatggtctcgatctcctgacctcgtgatccacccgcctcggcctcccaaagtgctgggattacaagcgtgagccaccgcgcccggctcaattaatatattttaaaaattaatagactttattatttttattttattttatttttgaggcagagtctcgctctgtcacccaggctgagtgcagtggtgtgatcttggctcactgcaaactccacctcccgggctcaagtgattctcctgcctcagcctcctaagtagctaggattacaggtgcctgccaccatacccggctagtttttgtaattttagtagatacgtgttttctttcttttcttttcttttttttgagatggagtttcactctttttgcccaggctggagtgcaatggcatgatctcggctcactgcaacctccgcctcccaggttcaagtgattctcctgcctcagcctcccaagtagctgagattatagttgtctgccaccacgcctggctaattttttgtatgtttgatagagacagggtttcactatgttagccaggatgtctcgatctcttgacctcgtgatccgcctgccttggcctcccaaagtgctgggattacaggcgtgagccactgcggccagtctagactttattttttaaagcagtgttagttttacagaaaaattatgtggaaagtacagagagtttccatataccccttactttctcccacaacttctattattaacatcttgcattagtatagtacgtcccttacaactaatgaaccaactcgatacattattattaaccaaattcctgagtttattttatttctatttttattttattattattattttttagaggtagggtctcactgtgttgtccaggccaggttgcagtggcatcatcatagcttgctatagcctgaaactcctgggctcaagcaatcctcctgcctcagtctcccaaagtgttggaattacaggtgtgagccactctgtccagcctgaagtccatagtttacattacatttcactctgttgagcattctatggattttgacaaatgtgtgatgatgtatatttgccagtacacaattatataaaatagttttactgccctagaaaccccctgtgctccacctattcattcctctgctgaaccactggcaaccactgatcttttataatatctccatagttttgtcttttccagaatgtcatatagttggacatacagtgtgtagccttttcagattggcttctttcagtaaatgatatgcatttcaggtttcttcatgtttttttgtggcttgataggttgtttcttttcattggtgagtaatactctattgtatggatataccacatgttgtttatcaaacattcacctgaaggatagacatcttggttgcttccaagtttgagcagttatgaataaagctgctataaacattccagtgcaggacttttcacctcctctggataaatatcaaggagtgcaattgctagatcatatggtaagagtatgtttagttttgtaagaagctatcaaactatattcaaagtgactgtaccattatacattcccatcagcagtgagtgagagttcctgttactccacatcttcaccagcatttagtggtgtcagtgttttggattttagccattttaatgggtgtataatggtatacctattaaaattggttttttttggagacagagtttcacagtttcactcttgttgccctggctggagtgcaatggcgcaatctcggctcactgcagcctccgcctcccagtttcaagtgattctcctgcctcagcctcccaagtagctgggattacaggtgcacgccaccatgttctgctaatttttttgtattttagtagagatggggtttcactgtgttacccaggctggtcttgaactcctgagctcaggtaatccacctgcctcagcttcccaaagtgttaggattacaggcatgagccaccgcacctggcctcaatttttttttttttttttttgagacagagttttgctcctgttgaccaggctggagtgcagtggcacaatctcggctcactgcaacctccgcctcctgagttcaagcgattctcctgccacagcctcctgagtagctgggattataggcgcccgccactacgcctggctaattttttttttttttttaattagagacgaggtttctccatgttggtcaggctggtcttgaactccccgttctcaggtgatccgcctgcctcagcctcccaaagtgctgagattacaggtgtgagccaccgtgccccgcctgttttggcttttactgtgaagacgtgttagccgctgtgatgactagcaagtgtggccctccacccagtcgctctgggctcccagctcctgcatcctgctgcaaacttgacatcttccctcaagtaacttgtagttgtctcctgtctacttgcccaaaatataactcttaaacttttctctctgcaagtttgtgcctctctccctgtctgacttccccatctaaataaatggtagaccaccatctactcctttgtgcaagccagaaatctaggaatcatccttaaattccctgttctgtcttatctctgctttcattcaaagcatcagcaaatcctgttggttctacctctgaagttttctcaaatactgttacttgactcatcctgacttttgtttctgctttatgttaggctaaatgccctgaaaactcttttgtacaaaacacctagaaatactggataaactgggcttaacagggaggcccggtgtggtggctcacgcctgtaatcccagaactttgggaggccaaggtgggtggatcacctgaggtcaggagttccagaccagcctggccaatacgtagtgaaaccccacctctactaaaaaaaaaaaaaaaaattagctgggtgttgtggtgcacacctgtaggtggtgcatgcttgaacttgggaggcggaggttgcagcgagctgagatcgcgccactgcacttcagcctgggtgacagagcaggattctgtctcttaaaaaaaaaaacaaaaaaagaaaaacaggaaaatcttcagaagcaaaaaccaaacaatctcaccaaagaaatgagaagatggctgggcgcggtggctcacgcctgtaatcccagcactttgggaggccgaggcgggcagatcacccgagatgggcagatcacccgaggtcaggaattcgagaccagcctggccaatatggtgaaaccccgtctctgctaaaaatacaaaaattagccaggtgtggtggcaggcgcctgtaatcccagctactcaggaggctgaggcaggagaatcgcttgaacctgggaggcggaggttgcagtgagccgagatcatgccactgtactctagcctggacgacagagcaagactctgtctcaaaaaaaaaaaaggctgggtgtggtggctcatgcctataatcctagcactttgggaggccaaggtgggcggatcacttgaggccaggtgaacatggcgaaaccccatctctactaaaaatactaaagttagctgggcatggtggtgggtgcctgtaatcccagctactcgggaggcgaggcaggagaatcgcttgaaccaggaggtggaggttacagtgaaccgagatctcgccaccgcactctagtctgggcgacagagcaagactccgtctcaaaaaacaacaacaaaaaaccaacacatggccaaagtgcagtgacttacatctgtataatcccaatgttttgggaggctgaggcaggaggatcgcttgagtccaggaatttgagaccagcctgggcaacatagacctcatcaccaaaaaaaaaatattttttaattagctgggtttggcagcatgtacctgtagtcctagctactcaggaggctgaggtgggaggatcacttaggcccaggagtttgatagttcgaggttatagtgagctatgatcctgccactgcactccagcctgggccacagagtgagaccctgtctcttagaaacaaaacaaaacaaaaaaaagaaactgaattaaaaacaacaagaacaaaaatgctgctttttgttattgagttgtagcccaagtttcttgagggtaaagcattgaaaagcaggcagtaatagatttgctgtttaaagagatttacttgcagcactattcacaatagcaaagacatggaatcaacctaaatgcccatcagtgacaaattggataaagaaaatgtggtacatacactgtggaatactatgcagccataaaaaacaacgagatcatgtttttgtttgtttgtttgtttgtttgtttttgagatggagtcttgctctattgcccaggctggaatgcaggtggcacgatttcagctcactgcaacctccgcctcccaggttcaagcaattctctgcctcagcctcccgagtagctgggattacaggtgccctccaccatgcctggctaatttttgtatttctagtagagatggggtttcaccgtgttgggcaggctgttcttgaactcctgacctcatgatcctcccacctcggcctcccaaagtgccgggattacgtgtgagccaccgtgctcggctgagatcatgtttttgcaggaacatggatggagctggaggctattatccttagcaaagtaatgcaggaacagaaaaccgaagaccacgtgttctcacttataagtgggagctaaatgataaggacttgtgaacacaaagaaggaaaccacagatactggggtttacttgagggtggagagtgggaggagggagaggaacagaaaagataactattgggtattgggcttaatacttaatattttatcaaaataagctgtacaacaaacccctctgacatgagtttacctatataacaaacttgcacgtgtaaccccaaacctaaaataaaagttaaaaaaaaaaaaaaaggctggttgcattgggaggctgaggcaggcagagcacttgaggccaggaattcgagaccagcttggctaacgtggagaaaccctgtctctactaaaaattcaaaaattagccaggtgtggtggtgcatgcctgcagtcccagctaccagggaggctgaggcaggagaattgcttgaactcaggaggcagaggttgcagtgagctgagattgcaccactgcattccagcctgggcgacagggcgagaccttgtctcaaaaaacaaaacaaaacaaaacaaaaacctgtcactttgggaatatctcaaacctagtcatccaagtggttgtacgattttagtgtctgcatatcaatatttagtgtgatctactttcttagattctcaaatactgccaatgggcacatgtcatgaaataatgtcttttagaggacaagagagtgctaaagtctcattattgcagtttaagaaaaacaattctgtaacagtttaactttataggaaatgccttttgtttatttattttttttcttttgaggcttagatttttatttttatgtttttagagatggggtcttcctatgttacccaggctggccttgaattcctgggctcaagtgatcttcctgcttcagcctcctgagtagctgggactagacgtccactactgctcctggctggaagtttagattttaatttaaactcttctattgggaaactttgtatgtttgctttaccacttaacatttgcatgcattattgtacctattgtctcctacttaaggaagggcagtttatgctgttatatgaagtgaattaacctcctatggtacttcagttttctctatgctaaaagtgtgttctagatttttgaaaaacttacttaattttcattcatttattcaaatatttgagcattctgtagttgctggggaaatagcagtgaactgaagaatgtctttgttcttatggggcttaagttcctagttgatcatattggaaggagatacatgaaaaaagaaatatatgaacaatggagggcgatgagtactgtaaaggagaattcagcaggggagatgttgctgttttagatagaggggtgtcaagagacattgtgcagagacctgaacgaagtgagggagcaagccatggagatatctagggaaagagcctatcaggtggagagaagagtcctagggcagaaacgggcaaggtgtgttccaggagcagagaggggacagctgtgagcaaggggagagttgtagggaaggaggcaaagagagacatctggggcaaaatggattgactggtgggccgtggtaggactttggattttttcctgagtgggttttgagcaggggaatgaaatgatctgactctggttttttttttttttggagacaaaatcttgctctgttgccgaggctgaagtgcagtggcgcaatctcggctcattgcaacatctacttcctgggttcaagctatgctcctgcctcagcctcccgagtagctaggattacaggcttgggccaccatgccggcgaatttctgtttttatttttattttttatttatttttatgtttatgttttttgagacggagtctcgctgtgtcacccaggctggagtgcagtggcgcgatctcagctcactgcaacctctgcctccccggttcaagcaacttctcctgcctcagcctcccgagtagctgagattacaggcgcctgccactacacctggctaatttttgtatttttagtagaaacgggatttcaccttgttggccaggctggtctcgaactcctgaccttaatttatctgctcgccttggcctcccaaagtgctgggatgacaggtttgagccaccgtgccagccaggactcttattttgaaaggatctgtaatgtggagaatagaaggtagagggacaaggatgaaagcatccaggccagttagcctagtccagctatctaggtaagagatgctggtggcctggattaaggctgcgtcagtgggaggttgtgagaaaggctcaccttccttttttttttttttttttttttttgagacaggatcttactctgtctcccaggctggagtgcagtggtgcaatctcagcttactacaacctccgcctcctgggctcaagtgatacccccacctcagcctcccaagtagctgggatcacaggcttgcgccactatatccggctaatttttgtatatttcgtagagacagggttttgccatgttgcctaggctggtctcaaactcctgagctcaagtgatccacccgcctcagcctcctaaagtgctgggattataggcctgagccattgtgcccggtcacttccagatacattttgaagatagagccaacaggatttgttaatggattaggtgtggcaggaggagggggaggaagagagagagagactggagttgaagttaaggctcatttcaaggtttttagcctcaacatgtgcaggaatggagttgtcacttgctagaatgggggagactggaggagaagccggctgggagaggtttttaatgaaggggttggctttggatacattaagtttgacatgcattttagacatccaggtggagatattgaagaggcagttggctataagtgtctgatgttcatattagcggatggggctagagacataaatttgagaattgtcagtgtataaacgttgttttgaaagaaagtggggctgaataatttagaaaggagtgcatagagaaaataagtttactattaaaatagctttaacaggccgggcacggtggctcatgcctgtaatcccagcactttgggaggctggggtgggcagatcaaaaggtcaggagtttgagaccagcctggccaatatggtgaaaccctgtctctactgaaaatacaaaaattagccaggcgttgtaccgggcacctgtagtcccagctacttgggaggttgaggcaggagaatcacttcaacccgggaggtggaggttgcagtgagccaagatcacgccactgcactccatcctgggcaacagagcaagactccgtctcaaaaaaaaaaacaaaaaaaaacaaaaaaaaaaaactttaacagcaaagcctcttcctttaaaattatgaatttttttcttatggaagttggactctttcattattaagtctacattcaatcactatgttagtaaaaatgttgttctagttgccgaatgcaataaaccagctcagacttagtggcctaaagcagcaatcatttgactatgttcgaagatgccgtgggcaggaatttagataacagcagggatggcttgtctttgctctgcgatgtctgaggtctcactgagaaaactcaagcggctgggggtaataatcatctggaattttctttactcctgtatctgatgtctgggctgcgatgactcaaaggctgatttcagctgagactgtagaccacgtgcctacttgtggcctccccttttgccttgggtttctcacagaatgtggctggttctggagaatgagacttccaatgaaatcaggtggaaatgacatctcgccgctttcagcatgctctattggttggaacagttatggacttagctagattcaaaggaagggaacaaagaccccctcctctcagagagtggggcataatgagagaatttagggccatgttatccaaccaccacaaatgccttctgaatttgaggttctgcctcaaaagttcatagttcctttgactgaaggacttctatatatccaagcatcgtcagccccaggtatattgttccatgtaagtgaccaggactaccttagtatttcgtatagggaaagtgacctgaataaatttgagaaaagaatcttccttctctccagtaagcactgaggtaagcattgagccatattataggtttatgactttgagactcagaaatttaaattcttggccaggcgcagtggctcacgcctgtaaccccaacactttgggaggccaaggcaggcagatcacttgaggtcaggagtttgagaccaacctggccaaaatggtgaaactccatctctacgaaaaatacaaaaattagccaggtgtggtggcgggcacctgtaatcccagctacttgggaggctgaggtaagagaatggcttaagttctctttatctgctttatttcagttgcctctcttagatgaatattaatgacttacatagcattttagatcagtggatgtttttgtgattcttttatttgagctttggccaaagataacagtacccacaggttttttccagctactcgctcttctcccttcagtggccctcgagcctggaaaatctgacatgacaatgtgcttgctcaacctaccactgtttttcttttgaaaagtttggcagcctgtttctgactcctatgaaggtgaattcctcagcattcacagtttattagaaaaatactttgcttctctccaaactcgaaattcaagataaccaaacctatatataggctgatctttcaggatgcagttgtcatgttgatgccatgcttttcagtatcgtggccatcatctgttcagtaggggaggtgtacttctgtaatgggaggtggtggttatgtgtgtgtgcaagtgtttatttggtgtcttaagttagcctgtgggaagttctaaatcaggatggtacgtggttgccagcagagagctgctcctcaagtgaaggaggtagaatcaaagccaataggaaagagcctcagatgcttatatatgtaccgtggggattcagagtgaaagcagtcattggactaggggtggggttagggagagcctgtctgacagacacaagaaagggatggataacgccacccagagaaaaaagcattttaggcaagaacaaatatgaaaaaggaacaaagtctgtgggtggggggcaaggaggagataagttgacttgaaggaagacaacacttatgaaagtcacctggaggctgggtgccatggctcatgcctataatcgcagcactttgggaggccgaggtaggaggacaacttgagcccaggagttcgagaccatcctgggcaacatggtgagactgagtctctaccaaaaaaaaaaaaaaaagaaaattatccagacatggtggcatgtgcctgtaatcccagttactcaggaggctgaggtgggagggttgcttgagcccaggaggttgaggctgcagtgagctgtgatcgtattattgcactccagcctgggtaacagagcaagaccctgtctcaaaaaatgaaagtcatctgtaggctggagagaggaactggaaggggctaaagttggctgagtagttacagagcctgagataagggtaaagattttgcattggacaatgagatgttagtgtgtgtttttgagctggggagtgctgtgattttactcttattgaagaatcactgaaggattattcttgaatcagtgattcttgatcattcttgaatttttcaaacagcaaaactggaagagttggcctattcctcagaatattttctaattgggcgcagtgtcctcacttgggagaacctggctacacactttagttgtaattcactccagtcgttcattcattcaatacctattttttcagcacctattatgagccagacactatgctggatgccagggttcagggtaggacacgctagtgagcaaaagccaagactcttcttgtcttcatggggctttcagtccagcatagtggttatgagtccaagttaatggagtcacagtacttgggtgcaagtcatggtgatggtgatagaaggaaggcatgtgtgagggccagtggcaggcaggagcctggtgtttttgaggacctgaagaaggagcagagtgagtgccaggaacttagccaccagctggtaccagccatacgagaggggcagagccagccaggatgtcggtcatgctagtaatgagtacaaacacttacatgctgcacgctattgggctcctgagtgctacgtgttcattagctcgatgaatttgtacagcaaccctgtgaggtaagcactgttctctcccctttctatagatgaggaaattaaggcacaaagaggataaataactggcaccagctacacgctaagtgatcgaagtggtggaaccaggattcaaatccatgctattctgccttaagataacaaatcttgttttttagcctaagaacagagcagtcatcaggagggttttaagtaggggtgtggcaagatcaagtttgtgtcttgaaaaggtctctctacccacagtgtggaaaatggcctggaggcaagcacacagatgttgggagacagttaacagctcttgccatggccccctatgcattttggctctgatgtttctgcctgatttttctcttgcctctgcctcttttcctgaggggatggcaggttttaccattcagctggagtacaaaccctgaaccctttttggttaaatatctacttgcttttcctacagtattattttgagttgctgtggctgtaatgtcttgagggaatcgagcttgacagtaatttatagaacaaacagtttttagagactgtgtggcccaattgccctctcaatgttggcactcctgccatgacatttaccatgctgagcatgtgaccgccatctgaataccaaatgccacaggaacctgggaggttgtcacttactcctccctttctctgagtcacctttgcccttcagtcagtcaccaagtcccatcacatgtagctctgtaatgtcacagaagatggatgtctgcctcaaaacacttacaatgctgctacctaaattgggcagccacgacctcccaccaggattattgcagcctgagggatctttttgaaatgtaaatcaaactatcacttgtctgtttaaagcttttcaaagacttaccccattgcccttggaagaaagtgcagatatcttgacaggagagccttctccagcctcctcttctgccgtggtctccttgtacagtctctacagtgtactgcttcattagaaccctggagattattatttgctagttctgggctaagaactggcacctggctttgtagagctcctcaggagattctgaggcgtattcagagttgagccctgatctctgctctgatttcgaggttctcgttatatttattaatgatcacgaaaaaatttattattattctttggcctcactttagcatcatctgaggaatttttttttttttttgacagagttttgctcttgttgcccaggctggagtgcaatggcgtgatctcagctcactgcaacctccgcctcccgggttcaagagattctcctgcctcagcctcccaagtagctgaaattacaggcatccaccaccatgcctgctaatgtttttgtattttttagtagaggtgggctttcacagtgttggtcaggctggttttgaactcctgacgtcagctgatccacccacctaggccccccagagtgctgggattacaggtgtgagccaccgtgcccagccgtagctttcgaaatttgaaacctggtcccactgtcagaggttccaatttggcactggtttggttcccaggcatctttcttgctgtatatattttttagtgtcagccagggtggagacctctgtattacttcatggggaagaatttgggagaagatgttgtgaggagacaggttctagtcctagagtgatttatcctttctcgtacagatttccaggtatttgaggggccactcttctgtaattcatgtttttctctcctaacctcactcctgttgcctgcatcttcttgctgagcaaaatattcaaggtcttcaactcctcacaccctggttgtccctccctggatgtgtttggttgttttagtgttccatttcaattttgatacacagaattagaatagcatccagatgtgggtctgttacagctagactactagatccttcaaaatccaagtactagtatgtctattaaaataccataagatcacattggctagttacaatggttggtttgtgggttacttaaaaatcaactaaaattctttttttttttttgagatggagttttgctcttgttgcctaggctggaatgcaatgacacaatcttggctcactgccacctctgcctcccaggttcaagcaattcccctgccttagcctcctgagtagctgggattacaggcatgtgccaccatggccagctaattctgtatttttagtagagatgaggtttttccatgttggtcaggctggtctcgaactcccgacctcaggtgatccacctgcctcagcctcccaaagtgctgggattacaggcgtgagccactgagcctggccaaaattcccactttctaatactcctgtagtagctgggtacggtgggtcacatctgtaatcccagcacttttggaggctgaggctggaggatcgcttgagcctaggagttcgagaccagcctgggcaagatggccagacgccatctctaatttaaaaaaaagaaaaaacaagactcctatagtggtgaagaacagacattccgaaaacagactgtgcgttatgattccagctccatgcctttactacctgtgttgtgactttggataaatcacttaaaaatcttttttttttttttttttttttgagacggagtcttgctctgccgcccaggctggagtgcagtggcgcgatctcggctcactgcaagctctgcctcccaggttcacaccattctcctgcctcagcctcccaagtagctgggactgcaggtgcccgccactacacctggctaattttttgtatttttagtagagacggggtttcaccgtgttagccaggatggtctcgatctcctgtcctcgtgatccacccgcctcagcctctcaaagtgttgggattacaggcgtgagccaccgcacccggccaaatcacttaaaattctgtgcctcagtttctcctctgtaaagtgggataaaaatagtacctatctgatagggttgttacaattatgaaatgagcaaataagtatgtcaagtgtttaaaacagcgcctggcttcttgtaaaaagtgctatataaatcatagctataatcattacttatttcgactgctctttaaccaaggttcttatttttcatctttttcttttgttttgaatatcacttagtgttttcaccttttactctttttaggacctagagccatcctaggtgaaatacgtatggagatatttgatcaggtcaccacccagctctcctgacctcccttctctccttaaattaacatgccaaatcacagcatcactgactccttccctcccgatatgataagagtgtgcattgaaatgcatgtattttacttagcagggaaagctgattagtgattatcacacttaacccctagtgaatctgatggattaacctgctttccaggacactaaggaaatgggtttaagataagaaatatctggctgggtgcggtggctttacgcctgtaatcccagcactttgggaggccgaggtgggcagatcacgaggtcaggtgattgagatcatcctggctaacacgatgaaaccccctctttactaaaaatacaaaaaattagccgggtgtggtggcgggcgcctggagtcccagctactcgggaggctgaggcaagagaatggtgtgaacccaggaggcagagcttgcagtgagctgagattgtgcccaccgcattccagcctgggcaacagagtgagactacatctcaaaaaaaaaaaaaaaaaaagtaagaaatgtccatgaaagggagaccctgggggaaaggaacaataactgcagctctgaggatctggcaccagcagcaccagcacagagggatgctgtacaaccattattgattttaactttacaacagttcttcaaaggagagagagttccctgttttactgaagagaaagcccatttggtagtgaaataccattcccaaagacaaatagctaataaatgtcaggcagggttttgcacccaggcccatccagctcccgtctctactgtcctttcccccacaccacactgatacagaggaatgtgtctggttggggaagtggaagtgttcccaagtggggaggtcatctgatgcacaaatttggtctgttttgtgggttttcttgttttagttttagtttttgtagagctcagacctgttcttaggcagctttaacaatcaactgtgcactcagtaattgacaaatcatgtttgttacttttaatttagagggaattaggtttgttaagctcttgctccttctttagagatggggtctagctctgtcacccaggctggagcgcagtggtatgatcacagctcactgcagtctcaatctgctcaagtgatcctcctgcctcagcctccatgggactacaagcatgggccaccatgctaggctaattttaaaaaaatttttttgtagaggcaaggtctcacggtgttgcccaggctggtcttgaactcctgagctcaagcaatccctcttccaccttggcctctcaaagtgctagaattataggcatgagccaccatgcctggcctttacttctttcatatattcaaattttgtcatattagtagggaactataactcaagttttcttatagattgatgttcatttttacaagcttgatcgtcattggtttttaattttaaagcaaatcctgttatatgtaattgaacattacagtaattatagtaatttgtttcagattgggcactcaagtgttaatattttgtctctttaggaaatcaaaactagatttatatatagacttcttattgcaagtatctagtcttaaatcttacaaaggtactatttggacttaaaactatgaaattgtgtgcttactatataagtgtacttattttgagttatgttttaaacttgaaattccattcttaatgtctagagtaattatgaatggttaaattatgaatgactctaatagtttaaagctacagtatttatttatttatttatttaatttattttttgagatggagtttcgctcttgtcgcccaggctggagtgtagtggcaccatcttggttcactgcaacctctgcctcgcgggttcaagtgattctcctgcctcagcctcccaagtggctgggattacaggtgtatttcaccatgcctggctaatttttgtatttttagtagagacaggcttttgccatgttagcctggctggtctcgaactcctgacctcaggtgacctaccctcctcagcctcccaaggattacaagcatgagccaccacacctggcctacagtattttaatgtggactctctgtcatccattatgctgtttatcctgtggtgaaaattttatgaagattgaatgtttttctctagcgtgaattgctttctcttacttttctcatttttttccttcctaatctacttgcagatacttcagattatttttagaacgtggtatggtgagaacaaataaattggggtttccaaatcttaataaattatgtggccctcagtgggattagcagggttgtattgaaaacaccaatagaaacaaaatagttcttttatgcgctttaaataaaaatttcttttcaggccaggcgcagtggctcacacctgtaatcccagcaccctgggaggctgaggcaggcagatcacctcaggtcaggagtttaagacaagcctggccaacatggtgaagcgccgtctctactaaaaatacaaaaattagccgggtatgatggcgcatgcctgtaatcccagctactccagaggctgaggcatgagaatcacttgaactcaggagatggaggttgcagtgagctgagatggtgccactgcactctagcctgggcaacagagtgagattctgtctcaaacaacaacaacaacaataacaaaacatctcttttcaggccaggtactgtggctcacgcctgtaatcccagcactttgggaggccaaaacaggagggtcgcttgagaccaggagtttgagaccagcttgggcagctggtctctatttgaacaaacaaacaaacaaacacaatactcttttcatagaaaaatgtttactacacaataaactttaaaagaatatgcagctgtattaatgctatgactccaatgtaaaaaaaaaaaaatatatatatatatatacacacacacaaacacattctgaaatagatttaaaggaattacatcaacatgtcaatttttattttttcggagacagggtctcgctgtgtcacccaagctggagtacagtggtgcaatcacagctcactgcagccttgacttcctggcctcaagtgatcctcccccctcagcctcccaaagtgctggggtcacagaccaccacacctggcaacatgtcagtttttgttctgcatagtgggatggtgggatatggatgtttttatcttttattttcttttttatatttttctaaattttccacattgaacattattttataatctttcaaacatatctcttaaaaggactggttcctatagaattcagtgcaagaaatcttctgtgtttctttatactttggttgccttgatcactgggcctttcctgacagcaaagaagaggttagtgtaggcagcagataaaacacaggtatgctctatttaaaatgcatgtatttataataaaagtataggtggtacccaaaggaaaatgtcatgacacattgcaaagtggaacagaagttatctttagatcactttctgttctggattattgtatgagcctgattttcgtctctctttccgccttccctcaccctcgttgtaaatccactagtgcatggatgtgaagtacaagtcttaactttaaaaagttttatgaagctgtgtagtaaatcccttttgtaagtggtcttgactgcgtttctcaatatatcttttggtttcattagattcaagtatataaatgagaactgtaactttggacagactttttcagtcatctttacggtaataagttcccaattagacaatagttatttgttttatgacttgctgttggtaggttatccccaagggactgagaaattcctgttttgaaaagtccaaaaagtctttgatgacttgctgtttcatttttttcttttctcttcagttatagaaaacaggattacacccaccttgcctttgtacagtgcatctactatctgctgacttaacctgagtaaatgctttgaattgagccccatataatgtcctaaggcagcctatatggagtaatgaattgtcttctctcttatgcacccagagtggtagttggcactcaagttgttcctcagataactttgtgtgttctggggctcaatgaagtagttattaagtcacaggcttggggagaacattcatcctatggcattgaatgaagtgttgcccaattctagaatgtctaataaaatttttttaaaaacccacaggcttagaattattccgtagatatgaagtaatgtagttagaacttagtggagttctttagattaacttgtaatttgaaaaaccaaaattgaaattgtgaaataacatgggctctttgaggtcttttccagtaaaacagttacagtaaagctgcttggcagtgattttcctagacactttggctagtcatctcctgtgactgctgttaattaaatatggtttgtagctaagcagcctgtaaggagaagactatggaagtatttgcatattctctccttgaaaatactacctggtctttggctttaagttatacttttattttcccctgtagaataactattaaagtattacctatggtgattagactaagaagtaaaacatgaaatcagtcattgttggtgccctggtgccttcttttttttttttttgagacagagtctcactctgttgcccaggctggagtgcaatggcacgatcttggctcactgcaacctctgcctcccaggttcaagcgattctcctgcctcagcctcccaagtagctgagactacaggcgcccaccaccacgcctggctaatttttgaatttttagtagagacagggtttcactatattggctaggctggtctcaaactcctgaccttgtgatccgcccacctcagcctcccaaagtgctgggattataggtgttagccactgtgcccagcctggtgctttaattttatggaaaaaactactagctggtttctgttttaagaaataacacaggccgggtgccatgacttgcgcttgtactcccagcagtttgggaggccgaggcgggcggatcacgaggtcaggagtttgagaccagcctggccaacatagtgaaaccccgtctctactaaaaatacaaaaattagccgggcgtggtggggcatgcctgtagtcccagctactcgggaggctgaggcaggagaatcgcttgaacctgggaggtggaggctgcagtgagccaagatcgccccactgcacaccagcccgggtgacagtatttcatctcaaaaaaaaaaaaaaaaaaaagaacacaattattgtactacttactagccctcctctgtccccagctaaaaataagaacagcaacaaccaaaaaatccttagttatgtactggaaatgaattagataattttcaataacttacacgtttttaggatatgttagtttgaaaatgcaaatattcatgcatgaccccagtgttaatctatgatggagcaggtatagtgggatgctgtttcatgatttaatttggaccttcagggagtagactgtgatgcctctgcatttgtatccaagacaaataattaaatagtctatttttggctgggcatgatgcctcatgcctgcagtcccagcactttgggaggctgaggtgggaggatcgcttgaggccaggagttcaagatcagtctgggcaacaaaatgagaccttgtctctacaaaaactacaaaaaattagctgaacattgtggcttgtgcccctagtcccagctactcaggtccctgagttaggaggattgcttgagcccaggagttggaggttacagtgatctatatttgccactgcactccagcctgggtgacagagagagaccctgtctcaaaaaataaagtctgtttttaaaattaattttaaacactggagtttattacaaaaagcagttggttctttttttaaatcatttttttttaggagaaccaccgctttttggctacattgtctagagtagcagtgttcaataaaaataagatccaagtcacatatgtaatgttaagttttcttttagtttctttttcttttcttttcttttctcttctttctttctttctttcttttttttttttttgatatgcagtctcactctgttgcccaggctggagtgcagtggcacgatctcggcccactgcaacctccgcctcccgggttcaagcaattctcctgcctcagcctcccgagtagctgggactacaggcatgtgccaccatacccagctaatttttgtatttttagtagagatggagctttgccatgttggccagtctggtctcaaactcctgacctcgggtgatccacatgctttggcctccctaagtgctgggattacaggcatgagccaccatgccctaccaatgttaagttttctagtagccatattaaaagaagtaaaaagaaatgggtgaagttaattttaataatatattttatttaacccaatatatctaaaatattatcatttcaacatgaacaagatactttacattcttttgtttttcactaagtcctcaaaatccagtgtgtattttatattgacagcatagttcagtttgaagcagccacatttcaagtgctcagtagccacatgtggctagtgactccatactggactgtgtaggtttagagtttcagtaaatttgtatgcaatagaatctacataaattggcatattatgcagatttctttgtatgcacatcagttcttgcatagcataagtcaggtcatgatgcttttagtctatgaggcagatttttttttttttttttttgagacagagtctcacttggtcacccaggctggagtgtagatgcacaatcttggctcactgcaacctccatgtgaggcagattttaacttggccctaatgcaaatattgtaagagagatctaatggcctttgatttcttacagagggcaatcaatacatgccatggttacaatgcttcagcatatagtatgcacgtcagccactgcttttactctggctagtgcttagtgtacctgtaccactgcccaggcagcatttgtcctgtggcaggtgaatcttagggtggaaggtggcaagtaacattgcttttttttgagagggagtcttgctgtattgcccaggctggagtgcagtggtgcgatctcggctcactacaacctccacctcccgggttcaagtgattctcctgcctcagcctcctgagtagctgggattacagacggccaccaccatgctcggctaatttttgtatttttagtagagacggggtttcactatgttggccaggctggtctcgaactcctgacctcgtgatccacccgcctcggcctcccaaagttctgggattacaggtgtgagccaccgtgcccagcctacatttttaaattaattaattataagcaggatctcactgtgttggccagactggtcttgaactgataagagttcaagaccagcctaggcaacatggtaaaaccctgtctactaaaaaatacaaaaaaaaaaattagctgggcatggtggtgcgtgcctataatcccagctacttgggaggctgaggcaggaaaatcgcttgaacccgggagactgaagttgcagtgaggtgagattgcaccactgcactccagcctaggcgattccatctcaaaaacaataacaacaaaataacattgttggaatatttagttaatttatagaagcgtattggcctaattggggcaaataccttattctgacattctctctatttgctttactgagctttttcaccagtggaatttaagcccttgatacatgaggagggaaaataccttggagctgtgctgcacatgtaaagtacacaggagatttagaaaacttcgtagcaaaaaaaagagtgtaaagtatctcattaatagtttttgtgggctggacacggtggctcaagcctatactcttggcacattgggaggctgagatgcatgagtctaggagtttgagaccagcctgggcaacacagtaggaccccgtctctacaaaaataatcagccagatgtggtgcgcatctgtagtcccagttacttgagaggctgaggtgggaggatcgtttgagctgggaagttgaggctacagtgagctgtgattgagccactgcactccagcctgggtgacagagtgcctgtctccaaaaaataaataaataaataataatatgttttgtatgttcatatgttgcaataacattttggatatattaaatgaaataaaatacattaaaattaatttcacctgtttcttttcttttcttttttttttttttttttgagatggagtctcgctatgtcatcaggctggagtgcagtggcacgatctcggctcactgcaacctcctcctcctgggttcaagcgattcttctgcctcagcctccctagtagctgggattaaaggcatgtgccaccacacccagctaatttttgtatttttagtagagacggggtttcaccatattggccaggatggtctcgatctcctgacctcatgatccgcctgccttggcctcccaaagttctgggattacaggcgtgagccactgcacccagcctcttttaactttttaagtatggctaccagaaaatttaaaatgcatgtgtggcctgtattctatttctgttggatgctgctgccttagattattaattattcaatgtaaagactgctgggaggtactacctgcacttccctgaatatatgcttgagagctccaccagccgtcttcacagtagcaagaggggtattctgagtctgtcccccaaagagggagggagaagtgcagccctctcaggttctgtcagaaaacctgatcccaggccaggcgtggtagcttacgcctgtaatcccagcactttgggaggttgaggcaggaggattgcttaagcccaggagttcgagaccagcctgggcaacacagtgaagaccctatctctacaaaaatttttttaaaaaaattagccaggtgcagcaatgctgcctgtactcccagctgcttgggaggctgaggtaggaggattgcctgagcccaggagttagaggttgcaggagttagaggttccacgatcgcacctttcattccgttacatttgctgccttgagaacagaagacctgctggttttgttgccagtttgctcagtcatttttatgaaaaagccagtgctaactaggtgcttcttcgtgccttctctgagaatcaagaactctagtatgtttgcgtgtgttcagtctctcattaaatgttctcactatcccagagaaccatctcattggaccttggtctgtacataccttcatctttggctctgacttgtaattatttttagaacttctctttttttttttttggagacagagttttgctctagttgccagactggaatgcagtggcacgatctcagctcacctcaacctctgccttccaggttcaagcaattctcctgcctcaacctcttgagtagctgtaattacaggcatgtgccaccacgcctggctaattttgtgtttttagtagagacagggtttctccaagttggtcaggctggtctcaaactcccgacctcaggtgatctgcccgccttggcctcccaaagtgctgggattacaggcgtaagccactgcgcctggcctaattttagaacttgttaaaacaacttggcctctattgatatttccatgacccatgctattcagaaagaggattacaggtaattagctggctgggtttctcataccagagcatttcactgggatgttcctgaacctgggacaacttttatgcctggcatttttctttccttctctgttgtcccagactaagcaatttttaaaatagttattatttgttgagtaggagaatctcaggcagatcttcctggatcctcatttatacttttaaacctgtagtcttggaattagtgctctgtcccccaaccccaaacatccaatttctacattttggctacagtacaggtttactgtgtataactaaaagggctgtggaggagaaagaaaggaaccgacatttgttgggcatctgttatgtgccatgcactgagctggatgctgtaggaatatctcaatacctctgaggagtgggaattattatctctattttatagacaagggaatagaaatctgggagttaagtaattttttaatttcacacacttctggtagataatggattctagaacctggcataatagccacttgtcatcccagtgtaaaagagatgtgtggccagatggggtggctcacatatgtaatcccagcactttgggaagccgaggcaggaggatgacttgagcccaggagttcaagaccagcctgggcatgttttgtttgtctcacgaaacattttttaaaaaatgagtgtggcatggtgttgtgtgcctatagtcccagctcctcgggaggctgaggtgggaggatctcttgagcccatgatcatgccattgcactctagcctgggccacagagcaagactctgtcttcaaaaaataataaaaaggagctgtgattatcccaaggtggggattgtgaatgtgtttgtattgttctaaactgggagaaacaggctgggtgtgttggcttatgcctgtaatctcagcactttgggaggccaaggtgggaggatcacttgagtccaggagttcaaggccaccctgggcaacaggcaaaaaatagagaccccatctctattttttaaaaataaaataaactgggagaaagaagcagggtcctccccagagcatctttatccctagtcacagacctgacacctgtgttgggcaatggctacttctagattgtttacccctactgggacttgtggtgaacatatgcacactttggtttacagttgggacccctgattttagcaggatggcccaatggaatcagctacagcagcttgacacacggtacctggagcagctccatcagctctacagtgacagcttcccaatggagctgcggcagtttctggccccttggattgagagtcaagattggtaagtccttcttaagtgactctccaaattgttaggtttcagtttgagtcaagagacatgaactcttaatgtcatgccttgctgttccattaaaaaatgtatgggtacaggtgatggggaaaatgagatcaggagataaagtggcaccctttggtcttgtaaagccttttttatcttagaagggcatgtgggcaactgtctttgacacattgaaaccgcctgtatggtggtggatgtcttgaaggttgatttggacctcatttacttgggcagatcctctatatattctgataatccagtgatgtggtagacatattttttctctgaatgtgaattctgtcatagctagaactttgggttgatacttgtaattcccctttagttaaaggaaggagccacaggggtgtattagtctgttctcaatttgctataaagaaatacctgagactgggtaatttataagaaaagaggtttaatcggctcatagttctgcaggctatataggaagcatagcagcatctgctgctggggaggcctcagcaagcttccaatcatggcggaaggcagagagggagcaggcaggtcacatggccacagcaagagcaagagagcaagggggaggtgccacacacttttaaactatcagatctcacaagaactcactgtctcgaggacagtatcaacagggatggtattaaaccattcatgagaaacccacccccatgatccagtcaccttccaccaggccccacctcaaacagtgggggttacatttcagtatgagatttgggcagggatgtagatccaaactagatcacaggataagggaagtagattccattcatagagcagataatggcacagatgtccagcaactattttcttcactttaatatgctcaggctcactactgattttggtttaattcaggccagtgttaatatgacctggtttttccagaatgcatactctgatttggtgaagggccaggaggtgattcacagatgttggagataggccatcccagcctgggattacttatttgtactaataaatctgaccagagttaattgagggtttaaagcaaaacagcatatctgtctactttgctcaaatattttacaaatacaacagattatgagagtgggtaataatatctggaataattgtttttttgttttgtggtttttttttttttttttttgagatggagtctggctgtagcccaggctggagtgcagtggtacaatctcggctcactgcacctctgcctcttggattcaagcgattctcccgcctcagcctcccgagtagctgggattacaggtgcccaccaccacacctggctaattttttatttttagtagagacagcgtttcaccatgttggccaggttggtctggaactcctgacctcaggtgatccgcctgcctcagcctcccaaagtgctgggattacaggcatgagccaccatgcctggcctggaataattgttaataattattacattgatggcattttattgctgagcaagaagaatctaacatgatgaatgggttatagcatcaggtttgctttgtttttttgtttttttcctctttcttgatggtgatttctgtgtttgtgtgtatgcgtcggcttcagagccattctttatcattcttccttttcctagggcatatgcggccagcaaagaatcacatgccactttggtgtttcataatctcctgggagagattgaccagcagtatagccgcttcctgcaagagtcgaatgttctctatcagcacaatctacgaagaatcaagcagtttcttcaggtatgatgagaaactgaggacaaggagaaacaggacccgcagagtcgggtgttagtgttctttcctggaagcatctcttttctcatttggctaagtaacgagaatctatcttgtattttcaatcacaggagaagtaattagccctttctcaaagctctgtatacttacccgtgagcatcattacctgagaatcacttctcttgtcacagttgaagtaataaagtgattgttatgttaatcatacatgttagcatgttaacgcggtccactgataggaagatgactctcactgttacatgttaaatgtttgaccataatgggatacttcttgactaagtcagtagcttccctgcaagaccaggatagtatactgtgtaaagactcagacaaggccaggcatggtggctcacgcctgtaatcccaacaccttaggaggttgaggtgggaggattgcttgagcctgggagttttgagaccagcttgggcaacataacaagacaccatctctacagaaattttttttaaaaactagctgattgtggtggcatgcacctgtagtcccagctactcagaaggctgaggtgagaaaattgtttgagcctgggaggtcgaagctgcaataagccgtgattgcgccactgcactccagcctggcggacagagtgagagccagtctcaaaaaaaaaaaaaaaagactcaggctaatgtgccttctgttacagaaatagtaacgacctccccttcgccccccgccgacagagagccttcacccaggctctgaagcctttgttccgttgtttcctagaataaatgctttccttgatgaatacattagttttaaggtgccacagttcagtccacatctccatggtctgctgctgatttttattctctttctctcctacttatagagcaggtatcttgagaagccaatggagattgcccggattgtggcccggtgcctgtgggaagaatcacgccttctacagactgcagccactgcggcccaggtgagacctgagacaaaacaaatccctggtctgggaggaatggaaaatcaaacaactttataatgagataaattattagatctactaaaaaagaaggaaaagaaattaaatagatcaataatcataaaaatacattgaaaaactctaaaaaaaaaagaaagttccaccccccaaaatacattgaaaaactctaaaaaaaagaaagttccaccaaaagaatccaacagacccaatggtttaaaagttttgttttgttctgacaaattttctttgtttttctttttttttttttctgagacagagttttgctcttgttacccaggctagagtgcaatggcgcgatcttggctcactgcaacctccacctccagggttcaagtgattctcctgcctcagcctcaagagtagctgggattataggcgtgtgccaccacacccagctaattttgtatttttagtagagacggggtttcttcatgttggtcaggctggtctcgaactcctgacctcaggtgatccgcccgcctcagcctcccacagtgctgggattacaggcgtgagccactgtgcccggcctgttctgacaaactttcatagtacagattattccaatatcattcaaacttttccaaagtataggaaaacaagggatgttttcagcttattttatgaggctggaaaaatcctcatatcaaaacctaaaaaacagccaggtgtagtagctcacgcctgtaatcccagcactttgggaggctgagacgggcagattgcctgagcctcaggagttcgagaccagctggggcaatgtagcgagacctcatctctctttttttttttttttgagacagagtctctctctgtcgtccaggctggagtgcagtggtgccatcttagctcactgcaacctccgcctcccaggttcaagcgattctcttgcctcagcctcccgactagctgggactacaggtgtgtgccaccaagcctggctaattttttgtattttttttagtagagatggggtttcaccttgttaggcaggatggtcttgatctcctgacttcatgatccaccggccacagcctcccaaagtgctgggattataggcatgagccaccacgcccagccttttttttttttttgagacagagtcttgctctgttgccaggctggagtgcagtggcgtgatctcagctcactgcaacttctgcctcccaggttcaagctattcccctgcctcagcctcccaagtagctgggactacaggcgcgcgccaccacacccagctaattttttgtgtttttagtagagatggggtttcactgtgttagccaggatggtctcgatctcttgacctcgtgatccgcccgcctcggcctcccaaagtgctgggattacaggcgtgagcaaccgcacctggcttaattaaggatctttctaaacacaagaaagaatatttatcagaaaccaaagggagcatgatgcacagtggtgaaacactattctcagtaaaaacagcaaaagataaggatgtcttttaccattgatacttttctgagggatccagcctatgcaaaaagaaaaagaaatgagggtacaaatattggaaagcaagggacagaactcttattatttacagatagataggtcttcctcgaagatccaagagaaacaaaactaacaataacaattggaactagcaaggtttagaaaggccattgtatacaagataaatatttttagaatctgcagttcccctaatcagtagcagcagtaacctgttagaagatgtaatgaaagtaaagatctgggccaggcacgatgtctcacgcctgtaatccaagcactttgggaggccaaggtgggcagatcatgaggtcaagagattgagaccatcctggccaacatgatgaaaccccatctctactaaaaatacaaaaattagctgggtgtggtggtacgcgcctgtagtcccagctactcgggaagctggggcaggagaatcgcttgaacctgggaggcggaggttgtagtgaaccaagattgcgccactgcactcctgggcgacagagcgagactccgactgaaaaaaaaaaaaaaaaaaaaagaaagatctgattcatagtagtaaaactaaatgtatgcaatttgcatatactattggtatgtatgggaaaatatctggaaacacatatactaaatcattaaagtagtcggtcataggagacttttttactttctgtgaggggttttaccgtctttaatatcctataatcagggacattttttctttttctccgtgaccccctgctttttaaaaaattgtggtgaaatacacataacattacatttcaaatttacctttgtaacctttgttttttttttttttttttgagacagtctcactctgtcacccaggctggagtgcagtggtgtgatcacagctcactgcagcctcaaccacctgggccctagcgatcctcctgcctcagccttatgagtagctgggactacaggcacatgccaccatgcccagctaattttttttttttttttttttggtagagatgggctcttgccatgtttcccaggctggtgttgaactcctgggctcatcaactgatgagaaagagctctccaggcagaaagaagatcatgttcaaagacagaaacagaaatgtgtattcttgggagaagtgtagaaagttcagcatctgattgggtcggggaagacaagctagtcaaggccacatgatgttttaattagtcatgcctaacagtggggccctggaagagcagtttaccacaaggggccaactgcttcggtttgaacccgcagccctgccacttgctctgtaaccttaagtaaacaatttttactctctctgttcctccaatgggagtgataacaataccttcttcatagaattaattcatacatgtaaaatgcttagaacagtatctgacacataaatgcaaaataatttaactgctttctgctgctgctgacatcactatcatcaccctcaccattactgtaggaaatggggacccagtgaagaattttttttttttcttttgagacagagtctcactctgtcacccaggccggagtgcagtgacgcgatttcggcccactgcaacctctgcctctcaggttcaagcgattctcatgtctcagcttcccaagtagctgggattacaggcatgagccaccacactgggctaattttttgtatttttagtgagatagggtttcaccatattggccaggctggtctcaaactcctgacctcaggtgatccatccacctcggcctcccaaagtgctgggattacaggcataagccactgtgtccggccctagtgaggaattttaagcagaaaactgatatgctcaggtgtgagcgaggtggtaggtaacacttactgtgcagtgccctgtagcccaagaggttagcacacaggcatttgctcaggcagcactaggattttctgctgtggaaaacctttgtattttatcctgctccacaagataaaaataagtggtttaagtcaatttggatagaggctccaacttaccatgggaggtaggaaagccaaagttatcccaaggatgttttcaatcgtacggattaggggtctgcaaactgtgagcgtggcccaaatccagcctgctgcttgtttttgtaaatgaggttttttcggaacccagccacactcatttatttatgcattatctgtggctgctttggtgctgcagtggcagggctatttgtggcagggactgtatgacccaggaaaccaaaaatatttaccctctgtcccttagagaaaaagtttgcaacccctgatataaagctataagttggttatttgtggcctcaacccaggcctcactgctattttttctgtttacaatacctggcatgctcttaagtgtctagaattggttaaagatagaagagtggatgtaatccctgctaccaagggctgtcaggctagttgggattataagtacacaaacactcaaagtgagaaaaacacagaaaaggatgtgtgtcattttgtctaaggaagttgaataagatttctcaggaaaagaaacatttgaactgaatttgaaggtgagtgagttcaggtgtgtttgggctgaagcccaggccatgctgagtggatagcgggtgggaagagagtgtggaaacacactgcatgcagggaagagttgggagtctggggtgaccaaggcacagggagggaaagttgaagttatcaattgtgtgaaacagctttctgtgttggcctgagatgtttatagctggaagcagtggggagccaatacagttttttacgaaggtattagaggtgggtttctgtgggtgatcgttaatcatgttttctccctttaagtgtagtcctgcttgagaaatagacatgagaaaggaatgaaggttaaaacatcagctgtattgttggtaaaactagaatggaaagtgtggcttgagctggtaaccataggggctttccaatgcctgtgccctgagttagatcttggggtagagagactggatgtgcagagcagcacccccaccccaccccagccatccatatggagcttcagctgccatagaccaacaaggcagagggataggcctctagacctgcttctagaaaccaggctgctgctcttgcttgtggtgggccctaggaaggcaagagtgagaggagggaggcaccagcttaggtgctgggttctttgaagatctgtgtgtacacagagtctttctctccatcttaccaatcagatgagtcactgtcactgtgggaagaagtaggggcatgggtcaccttcccaaaacttctaagaagtttgtattctgtgggcttggatagggaccatgggaaaggaagagaatggttgcccataaaactggctgtagtgtggcctcaaacttctggacttaaatgatcctcccacctcagcctcccaagtagctagaactacaggtatatgccaccatgcccagctagttaaaaaaaaatttttttttttttttggttgagatgaggtctctttctatgttccctgggccggtctcaaactcccagcctcaagtgatcctcctgccttggtttcccaaagtgctaggattataggtgggagctaccatgcctagcccaagcctgtaattttttttttttttttttgagatggagtttcacttttgttgctcaggctggagtgcatggcgcagtcttggctcaccacaacctccacctcccgggttcaggcgattctccttcctcagcctcccgagtagctgggattacaggcatgcaccaccaagctcagctaactttgtatttttagtagagatgggtttctccgtgtcggtcaggctggtctcaaactcctgacctcaggtaatctgcccaccttggcctcccaaagtgctgggattacaggcatcagccaccgcacctggcacgaacctgtaatttttaagtttcatatgctatttattttttgttatttctttaattcattcattcatttattcattcgagatggggcctcactatgttgactaggctagttttgaactcctggcctcaagcagtcctcccacttcagccttcccaagtgctgatattataggtgtgagctgctacatccagccttctttcttctttttctttttccatgtgctatttgacattttccaaggtaccagcctccccttctccccaagataatatcttttaatatggaatttcatccctagggcaggactttttttttattatccctcagaaatatactggacaccacgtttaagtagacatccaacatctgctgtcataaattgttttgaattttttgacatacttgcccatgaggtttttgaaggcatagaccatgtcttagctgaacatgtggtctcttagtgccataaagggggtttatggtatgacctgtgtagtgtcacctgtgtagtgacagcaccactgcctctgtttcccttcctcttgtgatggcagcagcgtctcaagccaaacaagaagggtagttagggtgggatggaagctgggtagaggtattcctctccccatagttctgtgttcacatgtgcattgacctcctttttggcagcaagggggccaggccaaccaccccacagcagccgtggtgacggagaagcagcagatgctggagcagcaccttcaggatgtccggaagagagtgcaggtgatgcaagttacaagcctcgggcagggagctttcattaatttttttttttttttttgagacagggtcttgctctgccactcaggctgggctgcagtggcatgatcacagctcactgcagcctcgacctctcaggcccaagcgatcctcctacctcatcctcccaagtagccgggaccacaggcatgcaccaccacgcccagctaattaaaaaaaaaaaatttgtagagatgggggtctccctgtgttgtccaggctgatcatgaactcctgggctcaagtgatcctcccaactcagcctctcaaagtgctggcattacaggcgtgagccactgcacctggccaacagggagccttctcttggggatactgcctgcaggtcctgcatgtatcttttttgaggttttggcttcatttgaattctcctcagaaactttatattttctgttcccaaggaaatctttctttacttctgtttttttgtttgcttattttaaacaggatctagaacagaaaatgaaagtggtagagaatctccaggatgactttgatttcaactataaaaccctcaagagtcaaggaggcaagtgaatattagagatgttaaaatctctagaaagtgagtttgtgttgttgagttgaaagactcatttgtcttaactctgtttagatcttaaggcgggcggggcgcaagggaggtacgggtcctcaaaggagcctggtcattaaggacaggagtattccctcaggtccaggagtattccctcaggtccaggagtattccctcaggtcaaggagtattccctcaggtcaaggagtattccctcaggtccaggagtattccctcaggtccaggagtattccctcaggtccaggagtattccctcaggtccaggagtattccctcaggtccaggagtattccctcaggtcaaggagtattccctcaggtccaggagtattccctcaggtccaggagtattccctcaggtccaggagtattccctcaggtccaggagtattccctcaggtccaggagtattccctcaggtcaaggagtattccctcaggtccaggagtattccctcaggtccaggagtattccctcaggtccaggagtattccctcaggtcaaggagtattccctcaggtccaggagtattccctcaggtccaggagtattccctcaggtccaggagtattccctcaggtccaggagtattccctcaggtccaggagtattccctcaggtccaggagtattccctcaggtccaggagtattccctcaggtccaggagtattccctcaggtcaaggagtattccctcaggtccaggagtattccctcaggtccaggagtattccctcaggtccaggagtattccctcaggtcaaggagtattccctcaggtcaaggagtattccctcaggtcaaggagttttttcttccttcgcagacatgcaagatctgaatggaaacaaccagtcagtgaccaggcagaagatgcagcagctggaacagatgctcactgcgctggaccagatgcggagagtaagggcataggtcggaccacttcccccatgtgtctcgctcacttgcgggatttcagcgtcttgtggcagaacttgcttggtttctaagaagttcctgctctggagttgactaaagaatgtggttagagacagtctgaggaaatgttttctgactttgttttggtttccaaccagagcatcgtgagtgagctggcggggcttttgtcagcgatggagtacgtgcagaaaactctcacggacgaggagctggctgactggaagaggcggcaacagattgcctgcattggaggcccgcccaacatctgcctagatcggctagaaaactggtaaaggatgaaagaagcttttcctttctttctcgaaagctagattgaattctgatcttaactgcaggcccacagaattggtactatatctccaacgtggggacttttccatattcaaatttagcccaagaattaaagtttttactttatttcggccaggcgctgtggctcacacctgtaatcccagcactttgggagaccaagatgggcggatcacttgaggtcaggagtttgagaccagcctggccaacatggtgaaaacacatctctactaaaaacataaaaaaattagccgggcgtggtggtgcgcacctgtagtcccagctactctgggcggctgaggcaggagaatcacttgaacctgggatatggaagttgcagtgagcggagatcttactaccgcacaccaaccagcctgggagacagagtgagactccatctcaaaaaaataaaaataaaataaagtttttactttatttggagaaactttgttttaaaaaatgtatttatattattatattttaagtatattttacttaataattcaattaaggcttttggtttaactgtatttaacagatagacaaaccttttaattttagttattttagtaatctaaaatgacacatgccctttttaagggaaaaaattcaaatacagaaaattaatcaagagaagaaaaaatttttaaatgaaatcatcagcagtactagtagttaaaattttagttgatgctcaatctagacatctgtcattatgtatatacacattatgtatatacacataaagatagaaatttatacagtttatattaggatcatttttttttctttttttggagtcagggtctcactgtgttacccagtctagagtacagttatgcagtcatggctcactggagccttgacctcctgggctcaggcagtcttcccaccttagccttctcagtagctgggactacaggcatgcaccaccacacctggctaatttttaaattttttatagagacagggtcttactttgttgcctgggctggtctcaaattcctgggctcaagggatcatcccacttcggcctctcaaaagctctggaattatagatgtgagctgccgtgcccagcccaggatcttcctttatatgcttttctgtaatttgcacttttaccttcatccagcatatcttactgcaacccttcctgtgcaaggccctatagtgagcatgttgcaccagcttgccttaggagaaacttgagatacagagcctgcactggaaatttagcgcaactctacatgagaatgcctgtctattcatatcctcactaaccctgagtgttgttaatttactgaaagcagttttaaatgcttcctgaccagggaacgaagaagcttaagttctgggaatgggaggatagaagtgccagaaaagagctcaggagttcagaaatccctgcagcggtccccctccctctcctttcactttctgtctttctggtcttttggtctttgttacactagtgataaaccatcaaagaatgatggaatgatgctaacttctctctttttttaatttttttgagacagagtctcactctgtcacccaggttagagtgcagtggcatgatcttggcttactgcaacctcctcctcccaggttcaagcgattcttagtcacaaccttccaagtagctgggattacaggcccatgccaccatgcctggctatttttttgtattttagtagatcgacctgcctcggcctctcaaatttttgggattacaggtgtcagccactgcacctggcctaatatctctattcttggagatagatttaatgagctttttctccctctctattcacttattccttgtgcatgttatcaatattttgaaacataatgtcatgtcctttgatcagttgaaggctgacattgaaaaggcttatggggattgggtgttgtggctcacgcctgtaaatcccaatgctttgggaggcagagtcgggaggatcacttgaacccaggagtttgagaccagcctgggcaacaaagtgagatcccatccctacaaaaatttaaaaaactagacatgtgccattacacttcagcctgggtgacagagtgagactccatctcaaaaaactaaactaaactaaacaggcatggtggcacacacctatagttctagctactcaggaagctgaggtaggaggatcactcatgtccaggagttggaggaggcagtgagctatgatcatgccattgcactgcactaggccacagagtgggaccctgtctcaaaaaaaaaaaaagaaagaaagaaaagaaagggctcatgtagttcaagcccttctcttcatgcaaggggatgctaaggcccatgatggtgaagggcctggcaaagcttgcacagatagtgtgtgacagagctggctcaaacccatctttgggagctgtctaatctctttttctgagtctttatgttcatagacaagttaggatgagtaaagtaagtgctaaattccatatttcgtgttctgcatatctgggctcagatgcttgtcattttccagtgataactccatcaatgcctcctagtggtataaattttaatacttcttgtgtgcccagccccctcttagaaatttgagattttaggaagggactagtaataaaaggtaaaataaattattttctggccaggcatggtggctcacacctgtaatgccagtacttcgggaggtcgaggcagatggatcacctgaggtcaggagttcaagaccagcctggccaacaaggcaaaatcccatctctactaaaaatgcaaaaattatccgggagtggtggtgggtgcctgtaatcccagctacttgggaggctgaggcaggagaatcacttgaacttgggaggcggaggttgcagtgagctgagactgtgccactgcactccagcctgggcaacagagtaagactctatctcaaaaaaaaaaaaaaaaaaaaaaaggccaggcgcagtggcttacacctgtaatctctcaggaggctcaggcaggagaatcacttgaacccgggaaatggaggttgcagtgagccgagattgcaccactgcactccagctcaaaaaataaataaataaataaattattttctttttttatttattttttcagcatccacccaacatggtgaaaaattcctcttttcttaatgtcactgaactgtaaacttaagatgaaaaattgtaaatttcatgctatatatatttcaccacaataaaaaaattccttgttcttattgtagtggtctccatgtcttcagtatttccttccccttctccatctcacctgtatacattcactttggtaattagcatctttcttaatttattggcaggataacgtcattagcagaatctcaacttcagacccgtcaacaaattaagaaactggaggagttgcagcaaaaagtttcctacaaaggggaccccattgtacagcaccggccgatgctggaggagagaatcgtggagctgtttagaaacttaatgaaaaggtaatttagcatccttgtccctttccctcatctaaaaaatacctaaagactcacgtggtagagtgagaggcgggctgacttctggtcatggccgtggcgcgtgagcccatcttctctttcctcagtgcctttgtggtggagcggcagccctgcatgcccatgcatcctgaccggcccctcgtcatcaagaccggcgtccagttcactactaaagtcaggtaggccatgccacttccatttccagtagagattttactgagggacactgttagggtgagggtagagttggtggccagggtcattctttccaggtgtggtgtcacaggcagtacactgttgcggggttgaaatttgttgccatactatctgcttgctctctgattctgatgtcaaaagcaaaagagcagtcatctttttgaaggtacctgggcatattcctatgattgtagacctggagtctcaggccacagcttctccttctgcccaagggacaaaataatgtcatctattttctgttctttgaggctactcttccctgtggattttaagggaaagagtaaggcttagtgatggggaagctgagaggccccagggcaggtgggtggtgggcctgtagggtgaggtgttactttcacactcaagtcagaacaggtgtgctggggttttgaccttctgcagcaaaatttccctcctcagaaacttagtatggtgttcggtttcaggattaatagaacaaaatgccagctgcacagcatgtgttcctgtaatatttttcattatatggctttgattatccttttgtgaatctctcacaactttaagttgttagttcttagatgttttctcagtacctttggcttgaaggagtgatactcatcttttgtttttgtttgagacagggtctcactctcacccaggctggtgtgcagtggcatgatctcagctcactgcaacctccatctcccaggttcaagtgattcttgtgcctcagcctcctgagtaactgggaatagaggtgcgtgccaccacacccggctaatttttttttttttgagacagagtctcgctctttcggccaggccagagtgcgtgttgcaatctcaactcactgcaacctccacctcccaggttcaagcgattctcctgccttagcctccctgagtagctggaccggcacactccaccatgcccggctaatttttgtatttttagtagagacagggtttctccatgttggccaggctggtctcaaaactcctgacctcagtaatccacccaccccggcctccaaaagtgctgggattacagatgtgagccaccacgctcggcctttttttttttttttttttttttgagatggagtctttctctatcacccaggctagagtgctgaggtgtgatctcggatcactgcagcctctgcctcctgggttcaagtgattctcctgcctcagcctcccaagtagctgggattacaggtacctgccaccatgcccggctgatttttgtatttttagtagagacggggtttcaccatcttggccaggctggtctcgaactcctgaccttgtgatccacctgccttggcctcccaaagtgctgggattacaggtgtgagtcaccgcacccagccctattttaatttttttaaagagagagataggggccaggcacggtggctctcgcctgtaatcccagcactttgggaggccaaggtgggtggatcacctgaggtcgggagttcgagaccatcctgaccaacatggagaaactctgtctctactaaaaatacaaaattagctgagcgtggtggcgcgcgcctgtaatcccagctacttgagaggctgaggcaggagaatcacttgaacccaggaggcggaggttgcggtgaacggagattgcgccattgcactccagcctgggtaacgagagaaactgtctcaaaaaaaaaaaaagagaaagagagataggatctcgctctgtcatctaggctagagtgcagtggcatgatcatagatcactgtagccttgaactcctgggcacaagtgatcctcttgcctcagcctcccgagtaactgcgactacaggtacatgctaccacaccccgctaatttttaaattttttatagatgtgggctctcactttgttgcccagactgttatggaactcctgggctcaagggatcctcccagcttggcctcccacagtgctgagattatagatgtgagcctgtaattatagacagcttggcctatttacctgttggaaatgaagaattatgaattttacatttcttcaagaaaaggttatgggagagttactgactttttttccttggattttttctttttaaataggttgctggtcaaattccctgagttgaattatcagcttaaaattaaagtgtgcattgacaagtaagtactcctatcttagctctgtttttcaaatgaggaatagaaaaatgagaactttgacagacatcatttgaactagagactctgtctttattcagagatcttcattttgtggacaaaagttttcaaaagccttggggtgcattgtcatttacgtgtctgaacaaagccacaaagctgggggtacagatttgatttgtggttgctattgtgacaaccagtccctcttttccttgtttagttttttacttgtacatgtcattcatgcatattatatataagactgagatcatgtgttaattaacgactgggatacgttctgcaaaatgtatcattaggcaattttgttgtgcaaatgttgtagagtatatagtccttacacaaacctgggtggcagaacctactgcacacctacgctatgtggcagagcctactggtcgtaggctgtaaacctgtacagtatgttactgtgctgaataccgtaggcaattgtaacacatctcaatgaagtaggaatttttcagctccatgataatcttatgggaccaccatcatatatgcattttgttgttgaccgaaacgtcgttatatattctttccatacatagcatgtggaaagaatagatctcttttttttaattgttccacactttaccatataatggaatacgcaaaatttcacaatacctttcaggatgtaaaatacatataccctttgacgacattagaaaagagaaaatgtgggccgggcgcggtggctcatgcctgtaatcccagcactttgggaggccgaggcgggcggatcacgaggtcaggagatcgagaccatcctgggtaacacggtgaaaccccgtctctactaaaaatacaaaaaaactagctgggcgtggtggcgggcacctgtagtcccagctactcaggaggctgaggcaggagaatggcatgaacctgggaggtggagtttgcagtgagccaagatcacaccactgcactccagcctgggcgacagagactccatctcaaaaaaaaaaaaaaagaaaagaaaagagaaaatgtggctgggcgcggtggctcacgcctgtaatctcagcactttgggaggctgaggtgggcagatcacctgaggtcgagagttcgaaaccagcccgaccaacatggagaaaccttgtctctactaaaaatacaaaattagccaggtgtgttggcgcatgcccgtaatcccagctacacgggaggctgaggcaggagaatcacttgaactcaggaggtggaggttgtggtgagccgagatcacaccattgcactccagcctgggcaacaagagcgaaactatctcaaaaaaaaaaaaagaaaaaagaaaagataaaatgcattcttatttttagttgatgtaattatgtggaaatttcatgaggatgcactggaaaataatgaaataagggagttgacgaaggtggtaggtttaataagtacatatgcaatatgaaacataggttccccttcctatggggaggcaaccaactgtgcctgctacgcagaggtgttatgttgcgctgatcaactgtaactgaatagtttaaagaaatgcccaggagcacagaggttttttcatgacagtaaataacaggtggtcaaagtaggctttttgaagaaacacagagcctattttattaacaacagtctgtgttcttacagagactctggggacgttgcagctctcagagggtaagttcagcctagaggcttccttttgttccgtttaacctaacttcatcctccggctacttggtcacctacatagttgattgttcccctgtgattcagatcccggaaatttaacattctgggcacaaacacaaaagtgatgaacatggaagaatccaacaacggcagcctctctgcagaattcaaacacttggtatgtgggaggagctccccttcacaaagggcctctggctgcgggagagggctagggagagcctcacaggacacctgcctttttcttttcttacagaccctgagggagcagagatgtgggaatgggggccgagccaattgtgatgtaagttttgttggggatgaaagacaactggggtgttttccttgagggagagaggggtaaagatccttcttaatccccagaattagaaacatcaacctgttctttcagctgtagttattccaaaaagtcacttcaggccaaagtgacatgaacagaagttccatgtgccatggagctctctggcttggaacatttccgtgaatatctgggagttggctcctccttaaggagaagtggaaagtcccttgctgagttgttctccacacccatgtggtataaagcagctttccaccttgcctggggctttccaaattccccatccagctcctgcggctgaccctgcttggctccatttttagtgccctgtttttctctcccactgaggtgggatagagggtgtaaaagcaacagatttgagttaaactttaaaataaatgaccaccttgcattagcttgcttaggaaaagagtacataaaataaaatgaacaaacaaaaacccatcttgttctttatcccccttattttctgcttttcattgattcagattattggattcttattgtcaagaataaactttaaacaaacaaacaaaaaaaggtaaatgtgacggaaggctagttttcagtcatttttaaaaattgtgatgccccgttctttttcttacatttgtcccctgaacaattcttcctctttaaaatgtagcagtcctagctgggcgtgctggctcacaccccgtactttgggatgccaaggcaggctggtcacttgaggtcaggagttcaagaccagcctggccaacatggtgaaagcccgtctctactaaagatacaaaaattagctgggtgtggtggtgcacgcctgtagtcccagttactggggaggctgaggcatgagaatcgcttgaacctgagaggtggagcttgcagtgagccaagattttgccactgcactctagcctgggcaacagagtgaaactctgtctcaaaaaaataaataaaataaaatgtagcagtcctttttaaaaatgtggaattttacttgacagtagagtgaagtagcctgtatgcaatgatatgggaaaatgtacatgacatattaagaaaaagcaaaatgtaaaataatttgaatagtattattagtatatgtgttttaaaaatacactatactcttatgtgtattcatatgtatattaagaaattctggaggaatataccagcagtgctatgtgtattagtgctgctgttggtatccatggctattctagactgtctctgtgatatttgcattttaaactgaatatattacttttataatcagaaaaatagtattaaaaatgaattataatttaatttcttttttcttttttttttttgagtcggagtctcgttctatcggattgcagtggtgcgatctcagctcactgcaacctctgcctcctaggttcaagcgattctcctgtctcagcctcccaagtagctgggacgataggtgcatgccaccacgcctggctaatttttgcatttttagtagagacagggtttcaccatattggtcaggctggtcttgaactcctgacctcgtgatccacccatctcggcctccgaaagtgctgggattacaggcatgagccgctgtgcccagactagaattcaatttttgagaattcattgacaactcttacttaaaataaggttgctgtactgatgtgagacattgttgtagtcagtttggaaaacaatttggcagtataaaaatgaacatacctgtaaaccaacggtgccattcccaggatttaatagcagagaaatctttgcatatatgtcccaggagacatatatataaagtggacatcagcctgattataagctctaaatgcaacccaaataaatacccatcaacattagaatgaatacattatttgtggtatagacacaatggaatactccgcagctgtgaaaaggaatacactgcagatacacataaccatgtggattcatttcacatcaagtgaaaagtgaatcccaaaagaattcattggagtccataagtgtaaggttcacaaatgtcccaaactaaacaatacctgcattgcttagataaacaaatatggtaaaactgtaaaaaaacaaaacaaaacaagacaaaaagggctaggaaatgataaacccaaaagacaaaatagcagttatttctgagggaggagggaaggggatggggttggggaagggcacccagagaattttaggagtgatggacttttccttaaattgaatggtgggttcatattgttttgttattctttgtgccttacgtattttacaaataaccaattggatctatgtaatattataatacaaactgagtaaaggattaggttgaggatcacagcattggaagttcttggtgttgaagagagtaagtgccgagcaagttgtgtccctggcagtttgtttgtgaccacctggtggcttacccttcttggtgtggtgaggcttggcatgtcactttccttggctgtggctgttagtactgaatgccattctctctgaggaaaagtgtccttctcttttttattgattgactgattgattgagacagagtctcactctgtcacccaggctggagtgcagtggcgtgatctcggctcactgcatcctctgcctcctgggttcaagcgattctcctgcctcagcctcctgagtagctgggactacaggcgcccactaccacacccagctaatttttgtattcttagtagaaacggggtttcaccaaattattggccaggctggtctcgaactcctgaccatgtgatccacctgcctcggcctcccaaaatgctgggattgtaggtgtgagccatcacgctcagcctttttttttatttaatttaatttttttttaagacagggtctcactctgtcaccccagctagagtgcagtggcacaatcatagctcgctgcagcctccatctcctaggctcaagccatcctcccacctcagcctctcgagtagctggggctataggtgtgcaccaccacacccagctaatttttgtattttttgcagagatggagttttgctgtgctgcttagactggtctcgaactcctgggctcaggcaatcctcctgccttggcctcccaaagtgctgggattacaggcatgagccaccacacctggcctaagagtgtccttctcgttactgtaggcttccctgattgtgactgaggagctgcacctgatcacctttgagaccgaggtgtatcaccaaggcctcaagattgacctagaggtaagttctgcagcagaatcggtgagaggctacgtacaggggtgactcaggacaaaaacttccactgggatttttacaagagaaggtggaatgattactgtttgcttaacactgtgtttatttttgcttacttttctccaaaaaaatccttggcatcccatctggcaataaagtcttgcttgaatgcttagaagatgtgtgtatattcagctttcagcaaacttgatatgaaaatctctatttagaaattgattggccgggcgcggtggctcacgcctgtaatcccagcactttgggaggctgaggcgggtggatcacgaggtcaggagttcgagaccagcctggccaacatgacgaaaccccgtctctactaaaatacaaaaattagctgggtatggtggcggacgcctataatcccagctactcgggaggctgaggcaggagaatcacttgaacctgggaggcagaggttgcagtgagctgagattgtgccattgcactccagcctgggtgacagagtgagactccgtctcaaaaaaaaaaaaaagaaattagaactgactttataaagtttgggcataagagtcttagcagccagtgtgtttagtatacagaaaattgtggcaatgacattctcctttcccaactttcttgatttttaaattaagatatacctagaaaagcaggaatcctggtctttgattcctgagacctccctgtttcatgtgaagatacagcttcaagtcttggagaatgcctccaaggtcttaaaaatggggaatctgtggattgtgagtcaagctttgagcaagtcaggttttacaagggaccggtatattccgactgcagcctgagttgtgtggccacgctgggcattctttccactatgagtgctcactgagctgactcactcacactcctcgcctagagttggcagcaggtgtggtttatggcatgtcctttcattctgagccccgtgagatgcgggtgaagagatttccaaggctgtgagagcccctctgcctccccagctcagtccccactccctccgcagacccactccttgccagttgtggtgatctccaacatctgtcagatgccaaatgcctgggcgtccatcctgtggtacaacatgctgaccaacaatcccaaggttagtgccccctccttttagttggtgccccgggatctcttgcgacttaggggtacctagtatagacaatgagcaccatccctcatctaaacaagcaaatgtgttctttccaatagaatgtaaacttttttaccaagcccccaattggaacctgggatcaagtggccgaggtcctgagctggcagttctcctccaccaccaagcgaggactgagcatcgagcagctgactacactggcagagaaactcttgggtccgcatttcaccccttctccctcccgcccacccgcccagaaaagggatccggcccatagggctgttcatttgggccatgtctactgagcattaggccatgtttctttcctgagcaaggcgctgtgctggtgccaggaaacaggggagttggggagttggggtgcagagacagtttgcagttttcagtcgaggtgatcatttttgaggtgggaggtagatttcttttctcctggttgctgtctcattcacccactctatctaactttagaagatcttttaagtgtgtgttggaaggtggcactaaaggcttgacattccctgtccatttttttaataaactataggctagttggttttttttgtcttattttatttatttatttatttattttttgagacgagtcttgctctgttgcccaggctggagtgcagtagtgtgatctcggctcactgcaacctccgccttctgggttcaagcgattcttctgcctcggcctcccgagtagctgagactacaggtgctcaccaccacgcccagctaatttttgtatttttagtagagacggggttttaccatgttggccaggatagtctccgtctcttcacctcgtgatccgcccacctcggcctcctaaagtgctgggattacaggcttgagccactgtgcccagcgtaggctagtttttaaaaaagaattagtggaatattttatgtgccacctgggctagaagtagctttgttctaataaagctgttgccaccaaatacacctgtctgacacccgatgtcagcttgttagtgagtgctgctgttggttcccagcctaccacccgaggttgggaagagcagggggacttgttatatcaccctccatccctgctgggctacccagcaacacaagtgagtcaaatgatgggatagtgtttgtcctcatgtgcacacacacaacagtgcctaccttcaaagatgtgaaagctgattattttgtggcccattgtgggatgaatgtgtgtgtgttctgttttaagaaataacctcttgaccccaagctgaaaatgtactacttgactctttttcttttccttcaggacctggtgtgaattattcagggtgtcagatcacatgggctaaattttgcaaagtaagcaatcttgttaaattctcgtgggaatgggaatgctcacctgcacggctgtcgttgagggctctggcttgaaggccctgaactcttggtccagcggccagtaggacctgcctgaaggtagacgggcctgaggatttgggtgatgcactgcacccctaggaagggaagggctgggatggcagtagacttggctttcccattactcttttctccaggaaaacatggctggcaagggcttctccttctgggtctggctggacaatatcattgaccttgtgaaaaagtacatcctggccctttggaacgaagggtaggttggacagagtgtgcacagatgtaaccaagtcccctgctctcagcaagccagtggcaggggatggatgccctgttagcaataacaacattgttcctcctccttggctccaggtacatcatgggctttatcagtaaggagcgggagcgggccatcttgagcactaagcctccaggcaccttcctgctaagattcagtgaaagcagcaaagaaggaggcgtcactttcacttgggtggagaaggacatcagcggtaagggaggctcccacccaccccacctgctggtggctgctgaggcctcatcactgcttctagttgcaagcacctactgccccctggtgggtggagatggccttgactccctgtttcactcagactcgcaaaacacatttgcgtgacttctaaatccttccagctgaaggattggtttgctttgttttgcttgctccagtgactatttgttgagaattttgcaatttaaattgtattcttcatctctttttctacttaaccctgttaatatatcttacgcaagtagttatattcaagtttattttctatgacccaactagtagcctcttcttaattagaagccagcctgaatatttccacagtgccaggccactgaacagggtgttcagggtctcaacactagggtggcttaagtcttttccccttcgaggaaagaaaaaatgggcagttttctctgagatgacctagctgtaggttccatgatctttccttcccatgtcctgtgacaggtaagacccagatccagtccgtggaaccatacacaaagcagcagctgaacaacatgtcatttgctgaaatcatcatgggctataagatcatggatgctaccaatatcctggtgtctccactggtctatctctatcctgacattcccaaggaggaggcattcggaaagtattgtcggccagagagccaggagcatcctgaagctgacccaggtagttgttgattttccatgttcctggcatttaatttttgggaaaagttggaaattttgggatccttggaggatagataggcaaatgcctgaataacctgggggataattatttctccttatgggaaagaattgtagtgagtgcttttgttggggtgaccgatgggatttgagaggagaatcagaatcacttagagtagtgtagttcctgctccacagagagtgcatgagtctaaagaggggatacagcctgggcaatatggtgaaacctcgtctctacaaaaaatccaaaaaaattacccggtgtggtggcacgcatttgtagtcgtagctacttgggaggctgaggtgggaggatcacctgagccaaggagttcaaggctgtagtgagcggtgatcatgccaccgcactccagcctggctgatagagtgagatactgtgtcaaaaaataaaaataaagaggggatcaatacacatacgtcccccaaaacatgcctgaaacacgagaagggaaagtgagggcagttaacaggatgccctgctggcacagtgcttcttagtagatgctagaaggtttgaggcccagatttcagcccagcatatggctttttgcctgtaactgaaccatgtcagtgtgccagatggtctgaagaaagggtttctggaggaaattattattagctgcatgggagtatggtttacactagagtagaagagctgggagcatcacgtttgaaggggaagacagtgactgggtggaggggcaagggattagtatttagagtgtgcaactattgaaaataaggtatattttaatgtgtaagaggacatgtacttatatgttatatataaattattttagctgggtgaagtggctcatgcctatagtcctagcactttgggaggcccaggcgggaggatcacttgagcctgggagtttgagaacagcctagacaacatagtgagaccctatctatacaaaaataattttttttaaattagccacgtgtggtggtttgtgcctgtagtcctagctactcgggaggctgaggtgggaggattgcttaagcccaggaggttgaggctgcagtgagccatgatcgcaccactgcactccagcctgggtgacagagcaagaccttgactcaccaaaaaaaaaaaaaaaaaaaagagagagaaattaaaaatactgtaatctcagctgggcatgggggttcacacctgcagtcctagcactttgggaggctgaagcaggaggatcacttgaggccaggaactcaagaccagcctggcaacatagcaagaccccactacacacacacacacacacacacacaaagaagagaaagaaaaaaacgaaacaaaactgtaatctctgcagctgtcctcagtgtggagggggtagccctgtctgttccccttcagcacttgctgttttgactctctgggttctttgtgcaggtcttgatggggagtctctggtttgccattctttgtttgatttaactttctgtaatcataaagccaatgatgggctttttttttttttttttttttagactaagtcttgctctatcacccaagctggagtgcagtggcaccatctcggctcactgcaacctccacctcccggttcaagcaattctcctgcctcagcctcccgagtagctgggattatgggcttgtgccaccatgcccagctgatttttgtattttttgtagagaaagggtttcgccatgttggccaggctggcctcgaactcctgacctcaggtgatctgcccacttcagcctcccaaagtgctgggattacaggcgtgagccactgtgcctggcctaatgatgggctctttaatgtgatcctttagggttggcgccttgccctagttgctgttgaaaaaactatttttgtccaaatagcacacacacagaaacctaccaacttccctcccactttttcctaggaattccttctgagggatttcttgagatggggcagaatggggcttggaagagggagttggagctaattgaccgttgcctttctcctttgttggggtcctgagtcttgttcctgctgtaagagttactcacttcctgtctgccacctatctccctttgcatgtgtgcttcagttgggagatctgtttatcagcccctgccacacggctctttgttccttctgcagaggacgttggggtcccacggctggtccttttgactcattttgctttcaaggtcccacctcccagtctgaggctgcatcctccattaccatcgcccttcctgtgggctgggaggccaggtcctttcctgcccagcgatgtcagcgtttcctcaggggccaggcactcatcaggagaaaggaactaattacttgagtaatttgccttgccttgctgagaggagtgtgccctgagggactccatgtgagtgtggtgacgggtgtgggggtgtccctgtgttattttaaaatgggtgccttcaggacgatgagcatgtgaccatttcctctctatttccatcacaagagtattatggtatgagggtctcaggttagattatcctcccaagactcttctctcttccttctctactggaagcccacatagcatttccttatggcttgagggagaggttcggagccacttacaaattagataaagtacatttacaatcttgtacaaagccacacaatgaagtcatttttctcagctttttttttttttttttttttttttttgagcctgagtctcgctctatcgtccagactggagtgcagtggcgcgatcttgcttcactgaaacctctgcctcccaggttcaagagattctcatacctcagcctcctgagtagctgggattacagacatgcaccactatgcctggctaatttttggatttttagtagagaccgggtttcaccctgttggccaggctggtctcgaacccctgacctcaagtgatcttcccgcctgggcctcccaaagtgctgggattataggtgtgagccacagtgcccagccttgtttttgtttttgttttgttttgacagtctgtcactctgtcacccaggctggagtgcagtggtgcgatctcacctcacttcagcctctgcctcccaggttcaagtgattctcctgtctcagcctcctgagtagctgggattacaggcgtgccaccacgcccagctatttttgtaatttcattaaagacagggtttccccatgttggtgaggctggtcttgaactcctggcctcaagtgatccacctgcttcagcctcccaaagtgcagggattacaggcatgagccactgtgcctggcctcagctatcttgaatgctggagaattaaatccttttctgtctagggtgtcagctccctaagggctgggccaaaacagttggatttataagacactagagtcttgcctcagtagctcctttgaattctgcactgaattgatcagtttcttggcccaaagtaaactcagatggcagcccaagagccactctgcagtgccttctttcacatggtcatcatgctctctgatccctcaggttctgtctaagcctcatgttttatgaccgtgctgttctcagcccacctcaccctgccccatgccttctcaatggtttgttcacctgaattccccagatttcatgccagtatccccaaggttccttgacctcttggtgtaagcattcagcatctaaaattcattttattcccgtcaacgcatttctaactgtagaacaagaattataaatgacaaagctcatagaaaattggcaccttgtcttccccctccctcttattttatacataaaagagaatatgggctgggcattgtggccaaggctgggcatgatagctcatacttgtaatccagcactttgggagggtgaggcagatggatcacctgaggtcaggagttcaagaccagcctggccaacatggtgaaacctcatctctactaaaattacaaaaaaaaaattagctaggcatggtggcagatgcctgtaatccagctactcaggaggctgatgaaggagaatcacttgaaccctggaggcagaggttgtagagagccaagatggcgctactgcactccaacctgggcgaaagagagcaagactccgtctcaaaaaaaaaaaagacaaaaattagccaggcatggtggtgccacctgtagtcccagctgcttgggagcctaaggcaggagaatcgttttgacctgggagtaggaggttgcggtaaccgagattgtgccactgcacttgagcctgggcaacagagtgagactctgtctcaaaacaataagaacaacagcaacaaaagagagagaccatgccttgctccaggtctcttagctattgaagatgtacctggacccaggtctccggtcttctagttgaagcaattgtactgccttacaaagtcacattctctttggtgctttttgattgacgtatttatccaactagaaagttactcatgccctcatccaaaaatgtggtagaggccagattagtgctggtaggaataagagatataacctttggctttggaaccacaagcattagcagtctccatgttctttaaagacttggtgatattggtatttaggctggacaccatgcaaagactacacaggctcggttcctgcatgcagagaagttatctaagagatatgaccaggccggaatagaatgctcagaccacgtggaggctgttaaacttttacataatctagggaaagaagggacacaaggtggcattagtctagggtcaggtgggaaaaggttatgctgaaaagtctctgcagctcaggacagctttgtgcaaagaactgaagttcacagctgctagtgcctgggagatcaaatagtataaatgagggcagacaaccctgaggggcagatggagctttccagacaatcttggcatgaggatgagtgagtttcaaatcagtcctgccgaggcagatggcttcctccagctctgcttactgaatgcgaagtcacagtcagtaagaaaactggttttcttcttcccaggcgctgccccatacctgaagaccaagtttatctgtgtgacaccgtaagtggcttcctttccccgttttgccttcatttctaatatcctcagttatccctgggaatgggacactgggtgagagttaatctgccaaaggttggaagcccctgggctatgtttagtactcaaagtgaccttgtgtgtttaaaaagcttgagcttttatttttctgttggagaccagagtttgatggcttgtgtgtgtgtgttttgttcttttttttttttccattgtgtcttgtcaaccccccgtttcccctcctgctgccccccatttcctacagaacgacctgcagcaataccattgacctgccgatgtccccccgcactttagattcattgatgcagtttggaaataatggtgaaggtgctgaaccctcagcaggagggcagtttggtgagtatttggttgacagactttgtccctataagggaagttggtcccctttgtgtgatgctctcacatgtacacaccgagagctggtcactcggaatggtaggagattctagagctttgctttccaaaagagatggtatgaatgccacatgtgtgagtataaatcttctagcagccacactggaaatagacgaacttaatttttacaatatattttatttaacccactaaatccaacatactctcaatttaacatttcagaaaaagttgaggctgggtgagtggctcatgcctgtaatcccagcactttgggaggccgaggtgggtggatcacttgaggtcaggagttcgagaccagtctgaccaaaatctctaaaatataaaaattagctgggcatggtggcgcatacctgtaatcccagctactcaagaagctgaggtgggaggatcgcttgagcctgggaggtggaggttgcagtgagcagagatcgtgccactgcactccagcctgggcgacagagtgagactccatctcaaataaacaaaactaaactaaaaagaaaaagttgagacctttttttattcttttttttcatactaagcctttaaaatccagtgggcttttgacagccacagcacagctcagtttggacaaaccaaatctcaaatgcttggtggccacgtgtgtctcggggctcctgaattaaacagtagatcaagggcagaagatctcaggacagccttagagcttctgtaaacatggagctctgggaatcagttaaggtgggaatgagaaaggacccttcccgaggcagggtcctccagggaggagggtaaatctggcttttctgaccatccctgggccttaaggggcaggagattggatagcagtggtagcctgggccctgtcctctgaagggctgggggcgtggcctgccagttgcagagggtggacaactgaactagttttccctgtctgtccctccagagtccctcacctttgacatggagttgacctcggagtgcgctacctcccccatgtgaggagctgagaacggaagctgcagaaagatacgactgaggcgcctacctgcattctgccacccctcacacagccaaaccccagatcatctgaaactactaactttgtggttccagattttttttaatctcctacttctgctatctttgagcaatctgggcacttttaaaaatagagaaatgagtgaatgtgggtgatctgcttttatctaaatgcaaataaggatgtgttctctgagacccatgatcaggggatgtggcggggggtggctagagggagaaaaaggaaatgtcttgtgttgttttgttcccctgccctcctttctcagcagctttttgttattgttgttgttgttcttagacaagtgcctcctggtgcctgcggcatccttctgcctgtttctgtaagcaaatgccacaggccacctatagctacatactcctggcattgcactttttaaccttgctgacatccaaatagaagataggactatctaagccctaggtttctttttaaattaagaaataataacaattaaagggcaaaaaacactgtatcagcatagcctttctgtatttaagaaacttaagcagccgggcatggtggctcacgcctgtaatcccagcactttgggaggccgaggcggatcataaggtcaggagatcaagaccatcctggctaacacggtgaaaccccgtctctactaaaagtacaaaaaattagctgggtgtggtggtgggcgcctgtagtcccagctactcgggaggctgaggcaggagaatcgcttgaacctgagaggcggaggttgcagtgagccaaaattgcaccactgcacactgcactccatcctgggcgacagtctgagactctgtctcaaaaaaaaaaaaaaaaaaaagaaacttcagttaacagcctccttggtgctttaagcattcagcttccttcaggctggtaatttatataatccctgaaacgggcttcaggtcaaacccttaagacatctgaagctgcaacctggcctttggtgttgaaataggaaggtttaaggagaatctaagcattttagacttttttttataaatagacttattttcctttgtaatgtattggccttttagtgagtaaggctgggcagagggtgcttacaaccttgactccctttctccctggacttgatctgctgtttcagaggctaggttgtttctgtgggtgccttatcagggctgggatacttctgattctggcttccttcctgccccaccctcccgaccccagtccccctgatcctgctagaggcatgtctccttgcgtgtctaaaggtccctcatcctgtttgttttaggaatcctggtctcaggacctcatggaagaagagggggagagagttacaggttggacatgatgcacactatggggccccagcgacgtgtctggttgagctcagggaatatggttcttagccagtttcttggtgatatccagtggcacttgtaatggcgtcttcattcagttcatgcagggcaaaggcttactgataaacttgagtctgccctcgtatgagggtgtatacctggcctccctctgaggctggtgactcctccctgctggggccccacaggtgaggcagaacagctagagggcctccccgcctgcccgccttggctggctagctcgcctctcctgtgcgtatgggaacacctagcacgtgctggatgggctgcctctgactcagaggcatggccggatttggcaactcaaaaccaccttgcctcagctgatcagagtttctgtggaattctgtttgttaaatcaaattagctggtctctgaattaagggggagacgaccttctctaagatgaacagggttcgccccagtcctcctgcctggagacagttgatgtgtcatgcagagctcttacttctccagcaacactcttcagtacataataagcttaactgataaacagaatatttagaaaggtgagacttgggcttaccattgggtttaaatcatagggacctagggcgagggttcagggcttctctggagcagatattgtcaagttcatggccttaggtagcatgtatctggtcttaactctgattgtagcaaaagttctgagaggagctgagccctgttgtggcccattaaagaacagggtcctcaggccctgcccgcttcctgtccactgccccctccccatccccagcccagccgagggaatcccgtgggttgcttacctacctataaggtggtttataagctgctgtcctggccactgcattcaaattccaatgtgtacttcatagtgtaaaaatttatattattgtgaggttttttgtcttttttttttttttttttttttggtatattgctgtatctactttaacttccagaaataaacgttatataggaaccgtctgatagcatggcagctctgtttggctggtggaggcttccttttcccctgcataagttctgagggggcctcacacacaggtggggcctgggataagggccggaaagggtcttgagaggaggtggttgccttaatcccccccgccaacccccttatgttagccaccagcccggaggtaaggggtgcctggaggagcaggaggtcaatagtccaacggcagaaaggtgtcagagtggaggcctccctccccggccccctcctaccccccagagcggcctcgtcctgtctggggtcagataagccacctaagcggggtggggggtagatactcccaccgcaccaaggcctccccttccacagttggctcctttatcactttcccttcagttcac

SEQ ID NO: 25141 - DNA, 15377 bp, Homo Sapiens
gtggtgacagtaggaacaagtggtgcctatgtccctccccattcagtttaccagctgagggtaaagacagacatctgggcttcacaggatttcagaaggcatgtctagggcaacactaaacacatggcttgacagaaatttgaaccaaagcatcgaacccagtgaacgaggcagaagggcagagagaaggcaggtagaagccacagaccagaggctgggacccagggcacagcagaaggtttagaatcagagggaaggcggtggtgcctcagtagagtccttgggccatggaactcaccccaggagcttttccaggctgcctgcagcctgcaatgtgggtgtagagtgtggctaagggagctgcctgctgggaccagctctactgctcaggacactcaaatccatctgtatgccactgtcatcaccccacacatactctctccaatcccggcaaaatcagtgctaatgtctcaccaacagattaaggcctggattgaagtacaagaaacaggatttttaactcaagttaattcaattccccagcgacccttgttaacttattcaccctcagagacgtattaatagttctgtcttatattgtatagaaatttgtgcagtgagttttctggtagctttacattttttttctcacttcagttagacatgtaatctatttaaaagtaatatgggaataagataaatcagtgtaggaataacttcctggcagaaatatttttactagtttctgagtgtaatatcagcccagcaaaagttatctgcaaatatagaagttctcatgtacatcaaagacactcaagttttttttaagaaataaatcattttatgctactgaaataactctgtgatgtgctattggcatttaaggagctaaacagactctatgggccagccaacttctactgcaagcattagacatgcacaggctttagactcaggcacaccttagaagttctggctttgctacttattagctatggtaactcgggcaggtcatttatcctctctaagcctcaacttcctcatctgtgaaatgggaataatatcagtcacatgccagggataaatccagggagaatggccagggggctgtgtcaaaggccagacacaacttccaccccaggtgaatgtcgggaccaggacagtgagcaggcaaaccttgcccttgccctccttccctccacaatcttaaagctccttgaacaacccccatccccaccccctgagaatgtctgtgccctcctgctgaaagggtttggcctttcagtgttcccctccaccatgagctgtttccatgaaaagatctcaagggtgacttgaggctacggtcatcactaccacaagccttttcccatccctgcctctacctattgccctctaaataaggaagccagcgctgccaggcaaagaacttctgcccaatatgggtcctgggtggcctctcgcctctctctttccctgggcccccagccagctcccccctcccccagagatgctccctgctcacttcattcctgcctcatagttggaatgacagtggctcccagaacccctggggagtgtggagggtgatgggggtctggggaggcagccaggcccaagagcaggttaatgttacagccctggataagtgagctgggcgggttgacgtcagggcgatgatgggtggaggggagggccgggctgctgaagcaactataaagataggtcaaatcaaatatcatcaactagggacggagcaagcgggcgagctagagagcgtccccgagccatggtctctaccggccgcggctcagcctgggtccctctgctctcaacccgagtgcccgatggaggctttggtttcatgtcagcagccttcatctgccttccaaaaataagcccctgccgccatgccggagggagaaaaacaagaagggcggtatttttagggccattaattctgaccacgtgcctgagaggcaaggtggatggccctgggacagaaactgttcatcactatgtcccggggagcaggacgtctgcagggcacgctgtgggctctcgtcttcctaggcatcctagtgggcatggtggtgccctcgcctgcaggcacccgtgccaacaacacgctgctggactcgaggggctggggcaccctgctgtccaggtctcgcgcggggctagctggagagattgccggggtgaactgggaaagtggctatttggtggggatcaagcggcagcggaggctctactgcaacgtgggcatcggctttcacctccaggtgctccccgacggccggatcagcgggacccacgaggagaacccctacagtgagtgccagctgcagccagtcgggacgcttgggggtttgggctcatgcagggctaaaaggtgaaggggccctgctctagcggacaggatgcacgataaagggggcagaaatgctgctcaccacttagatgattccacgtgaccctgcctgggtgcaagctcaatatactgcggtccaagcatcctggtgttctttgccatcgccttggttagatcctcagtggcactaactatttcagcattactggcccatctgatgccttgtaagaccattaggaaccattagtctgggaagcccccaaggcctgggtagggagaatcagttagtatacttggatcaaatttgacacaagctcatttttattcagcttctttcttggagaaggaagggaaattcaattgcaaaatgtccaactgaagcacatccttctttttatttcagcggctccctctgtccccaggttcttatcctgcaagctgcctgcaagctgccagcttgctgtatggttagtctcctatccaagaaaggatgggggctgcaggatccaagaaagccatcagctatggtgtggctgctgtgttttcaagattaagtgggttgagatttgttgaaacatgtagagtacacattaagaagaagaagaagaatcagaatttatttttttactcaagtcaaggacctcaagtaattatgtcactgaaagcccagattcaaagctcatcttaaacagatagctaagtggtcactgcagcccctaactctgctatcagaaccttcccttgcagaactggatttctaacagcacaatggcagcactcgatgagtccagcagccagggtctcctagagttagagggatcatggatagggcgatggagagtctggctttctaggagaagggggatggactgagatgcccttgtcggctcaagttcccactctgatttgcacaagccttaggtaatgtggcccccctttccttgtcaggcctgctggaaatttccactgtggagcgaggcgtggtgagtctctttggagtgagaagtgccctcttcgttgccatgaacagtaaaggaagattgtacgcaacggtgagttcaccaggccggggaagtgccaggtttacaaggcttgatgcttacacagttgaagaaaataatatgaagtcctgagtagagaagtgactatctaaatgggaaaggaaaggctgtgagaggagcctgtgaaagggaggggccttgcagcttgtgcttcttcagcctcacgggtgattgtcctctgccctggcccgtgcttcttctgttcccacctgccggccggagcccgtgtgcttaaacggaaaccacagctcagggagcccgtgggccagagggaaacccacattctggcatccaggcttgtgagcaggtgtgattccctgcactggcgaggccccgagagcaagtctgtctctctgcctgggtgcgctgctccatgacacgcgccctgcaagacgccccagcctcgtgcgcagcaggaggagtggaatgggaggctattttcatcctcatcagtgtgctgagattctgcactagggttttcaatcctctggtctccgatcacgtacgctagagaagcagcctacccgttatacactttaggctggtaccagtcccacccattcccatccccacccccataggtcacctctgggagtgccaatgctggcacttgggttaatgcaaccagcttctaagcacattgacgaaaacctctgctctcactgacctactctttcctgcagccctcggcccatcatttggcttattccaaaatatggcggggcaaacatcccgatgaggctgaagaaatggagagttcctttgacagaaataagcaagctaaaaaggaagacctcagagcaggcctcaaaaaatatcaaagttatttatggggagggtgtggagagctgatctactgccccttggaggataaactgaggactgggatgtgaagaaatagatccaggactggcactgggtcccaggggagctgtcccaacagaggaggtctatgaaatacaagaacgggttcaccaggtggcctccaccccataatctttagtgctaacatctctcagtctgggttggtttatgtggacatacggcatgcactacaatcagtgggtctcccacacgggtctgtggacagtttgcatctctgtcaccttggaaacttattaaaagtatggatttccaggtacctacctaggagattcttattcagcagagctggcgtgtgggcctggaaatccatttgtttttgtattttaaatttgccaggtgtttctgaggaacaggcaggcttgggggtcagcaggctacatggcctctggagggcaggggaccacccactccccatgttacactgaacctgaaagctggagggcgagtgagatgagacagaagagacatatccttgttaccgctctctgggaaagtgatggcgaggacaggaagaggcctgggaccaacccaggttttgatggagcaggtttcccctctgtagggtggggcatcccaaagaaccccttctttccagcctgcataatgcccggaagcccatagggtcgggagagccgggaatttaggctgttggctgtgggactccatgcaagcaagggacgttttagcaagtaaatctcctgggagaaagcacaaatttcataaactcttctttctccttgtcgcctttatcaacaaaccatttattacttttttcttcctacccagaaaggaatttaattgtggggaggagaaaatgcacaaatatagaggaaatttacccacttcccactttcaatctcttggccctggaaggagaagctgggaaaggctcgggaagggaatatacgatttaaccatcagagaaagcgccacaaagcggggaagagcattcagaatagcaaaaaggaaaggaggctgactcctaatgcctgaaacccaccaccccacccccagccctcactctgcagcaccgttactggctgatgacttcaaagggggttaggcaggttgatgaactgctgggcttactaaacaagcagagtccaggagaaaggaagacttctgggaaaagacccggcgcccttcacctccaccctcccacccctcctaccttcaccctcagtagcatttggccaaagagcatcttctccagggagggagattctcctccctggacctcagggccagccgggcctgcacacagagagtggggctggacagctgtgccccaagcctggggcacctgacgttttgtgtggctcaggaccagatgctcctgagcaacttctacccctccctctccgcccctcagaggccgttatcacagtctaaaaaaacaattgccaactgatccccggagccaggaagactcctgctgggtgatgatttcattcacactatttccttttaagcccccggagctgcctcatctcccaggctcagctgctactgccagttcatgggatttctcatgggtgggggagggaaactgggctggggctgaggtgttggtgagggggacaaggcaacgactcgtgggcagagaacaagggccaaggaaacctggctagaagtggcttcacacatgtctgtctcctggaaagaggggtgtggaggctcagggcagtttgccaggcccccctttagacaatataaacagctgccctgccctgagcactagcctactgcttgtgctcggattcacaggctgcagagggcttcacgagcatgatctcacagcacccctaggaggtgcatttgatcttcatcctccctgtgcagctgcggacacccggtctccagggtcacacgtccagccacagctgtgtgcagccccgtctcagggctccgcgacccgagttccagttcctggccaacctaccctccagctactcgtcttactttgggcaacgtcactgaacttctctgggcctggatctctgctctctgaggatgaggcagaaatcagtgaattctagcccccttggtcccctttgaaattcagaaaacaaaatatcaaggatctccacctgacagtggttctattagaatcctttggttgagaaaaatatatactagtaaaaagataccagcaattcggtcgtgctttcaagtgatttcagttttactaagaagagccgcatttacatgcttttcgtcaacagtatgacaatgtgcaaaggacaaaattgatttcctccagagacctttgattattatctggggcattacattggggcattattatctggggcattgcattattatctggggcattacattattatctggggcattacaaggctgggaggaccagccttgccttggctcagctgccactgtagcagaaaacagcactcctgagggaatgggatgaaggacacccaccatgaggaagtgctgggagatggggctggagagcagcgggaggtgcatgcccttatgcagggcctgaggctctgcatacaaatccccgcctgctacaaagagctgcactggagtgagaagaatgaaacacctgatgaaaacactttccaacattcctaaatcaacagttcaattgtgtgctaggaaaaagggttggaaaatgcaggcatcttcagagctgatgatatttcagctaaagacaggaaaagaagcagtcaggggctacagaagaaagtcttaggacaaagaattggtttatttttccttcttgcccacatccttccaccccatccttctccatccaacacacactgccaggaggaacagggacaaatggccccagcggtcacagggtgaagatgtttaaaagcaggattagatcctcgttggtccaagtgacttagctctaaaggcgagagggtggctgtcttgtccacctcacactttggaggcacctctaccccatggatatgcttgctcctctgagaaatgcccttctccatagtgagtgccaaatgcacataagtctgaatagacctacatcaaattgaagatattttcatgctggggcttgagcctggcaggcccaggaaatgtgacccagtggaatgattttcatttattcaagtaatcatatacagtagctgcttttatgaacatggtgttcacttggctcgagtgcgttcttcaccagagctgaggggccaacattcccaagccatgagaactcaaagctcagggctctgatgaagatgaattaaggggctgggtcttgagcatcactctgggcatcgggaaaatcccatcagcctgaagcattcagaaaaaatgcactatctctccttcatgccacaggcctcctggccttccaaaccccacagatgtgggtgctgagggcagaggagagagagcagcaaggggaaggttagggcttctaacacaagcttcctctactagttgtcttttttcactttagttttgtacaggattctggggaaggccagggatatgagacaggctagagaaaagggcagaatggaaagaaaaaaaagtagtaaacttgaaaaaaaaatagaaacagaaaaaaaaaaagtgtgtatgttgagggggagtggatttgaatgatccaaaatcgaatgaccagagaagcaaagtacaatctacgcatccatggtcatgcatgcttaaacaatcatgttttaggagatccagatgtttaggagaggctgggttctcaaatgggcacattctaggcacggggaagtgggcaatggcttgagagtttcttgtccaagtcactcagttcctcccacttccccttcctccacctcaagatttcatttcctcactagagcttgcaaacaacacacgaaacctctcccttaaccaccatccagatcagaaataaattctctggaactgactgggcgggttactctccagggacatacaaagttagaacaggggggaggctggtgggtggagaggggccgtgacccaacaagaaggagaccaccagtttctgatcaaaatgttttctcgcttcgtttcctggcccatttgctaccctaaattcccttcccactttaaataatttacgtacttgactaggtaacacaggaacatgttttaaggagaaaaaagtatcaaagaatattctatggaaagtctcactcccaccattgtcttgaagccactgagttcctccctagaggcagccccagttaccagtgtttcattccagtatatcgttccagaaatagctaacgcacacgtgcacgcaccggtatcatcttttttaaaaaatcacacaaacaagagcgtactatgccaacactttttcaaaccttgtgtcttcacttagcaatgtatctttgaggccatttcatgtcattacagagaggcttcttatcttttcaaggcttatagaattccatcatgtggatctaccataattgagttagttactcctctttttttttttttttttttttttttttgagatagagtctcgctctgtcaccaggctggagtgcggtcttggcccactgcaatctccacctccccggtccaagagattcccctgccttagcctcccaagtagctgggactacaggcatgcaccaccatgcccagctaattttttgtattttggtagagatgcggtttcaccatgttgaccaggatggtctcaatctcctgacctcgtgatccacccaccttggcctcccaaagtgctgggattacaggcgtgagccacctcagctactcctctcttaatagatacattgtttttggtcttttgttatttaatgctgtagtaacttttgtgcgtgtgtgggaatatatcagtaagataaatttctaggagtggaattgctgatcagttgctatattcatcctttattctggtagatgctgccaaattgctctttatagagattataacagtatacacatcagaggacattaaatgagaattcctagtttctgtgccctcactaatgagagcatagtgtcaaacgcttttctctttgaaatctggccactaaaaatgggatctcacagttataacttacatttctcttattaggcatattctcttctgctcaaatgccattgatagttcttttcctgggaattttctgttttataaatgctgttcattctccagtgagtttagggttctgaatatagtaacaaaatgtattctttgacatatgtgtattgtatgtattttcatccagtttaccatttctgttcttcttttaaggtaatatttttcaagtagaagacaatttattactttttaaaaatggttttaattttttttgtcctgattagaaagatgttcctgattctgagtttattaaaaaaaactttttctggattttaatggttcttttttttttacatttgaatctttactccctttggaatttattttgatgtaagggataaagtcatacacatcaaactttattatcattataataaaataccattcagttgttccaacaccatgttttctctagtgatttaaaataacacttttactttatattcatttcagattaatttcattttacatccatgtatgtgttgggatctactgctggactctatgttgttcattgacctgtactggacttctcattagtgtagctttacttggaatgtttcaatcagttctgagctgaatttttcctggtgctgctgctcccaagcttgcccaccaacgactgaagtcctgtgcacagggcaggaaaccagggtccagagaggctcctaatgaggggtcttggttcagagccagcgtcagcctctgcccttcctctggcttcctgctcttccatgcaagcttactgtctcccaggcactccatcaaaaaccgcagagcttaaaagctaaattgtccagtaacccccagcaagtcttatgggactggtgatccagggtaaggcagtctttcgaggcttttaatgtaaagtagttcattatttacttggagaagaatactagtactactaatttgtttttaattctactgtatagcaagcattgttcccaggactttccatgcataatttcaattaatgcttactccagttctatgacacaatttttcttactgttcttacttcacagatgagggaattgaagctttagaggttaaatgatttccccaggctcacgtagctaagaggctattgtcatcagtctaaccttaaagctgtggcacaaatatgttcttgacctacattgattagttcatcctttttacctttaagacatcccttcattcatccattccacaaatattcactgagcatcctaacgaggaaaacaggaaagcttatgaaaaacccaccccccggtgtggcattaacctgttgacatggctagtgaacgccttcacatttatctcaagcaagttaacatcagtgaaagtgctttgtaaataagctgcaagcatgagagaagaagatggggaaaacatatgagggcagtttcaccgtgttcccataggcaaggctgtcccctcacccacgctcacatcacattgaaagagccacccatgcaggggtctccttatgtttctgtgctgtccttatttacttatttatttattcttgagacagggcctcactctgtcacccaggctggagtgcggcggagcaatcatggctcactgcagcctcgacctcaagcggttctcccacctcagcctccagagtagctgggactacaggcatgcgccatcatacctgccttttttttttttttaagcttttgtagagacaaggtcttgctatgttgcctaggttcctctcaaactcctgggctcaagtgatcctcctgccttggcctcccaaagtactggattacaggtgtgagccactgaaaccagccatgttgtcgctattaaaccaccatccactcagcatcatgtaccaagcaagacacagtcctcatctcagggatcttggagtctattgggaaagaaagtatggctgttctaaatgttgccagagaggtccactgaaagggctctgggagtcttggggccctgaggagcaagctactaaccagcccttcagaacagcaagaggttctcgtccagctacactgccagcaagatgggacactagcagtacgattcctttacagaaggtcagaggacacctctggcacagcccagtagccatcgagcgggttttttttttatactcaagcaagaaggagtcagaagttatcctccatccatttctcattctatatttcttttcaagagtagatcccgggtctctggctcccacctcgctctctgttcttctagccccgacccagctgcttccccacaagagcaggaaatccccgcatactcccttagggcagccacccaggcaggttgcagaggaaagaggaggacttggggtgatgtactgggaatgaatctgtgcatgcgagacaggaagtccagcgttcatgtgacaggaagtccagtgttcatgtgacaggaagtccagcattcatgttctgaacaggtggtccacacacactctacaaaattagcatggaaagggccatttttttgttggtcccaggctccttggcctcacctgtcacattgggaaccaggtccttttccccataaaaattcctgctcctcaccatttctgttcctgcatgtccctggagaactatgattgtcttggacagcagtccccagcctttttggcaccagggaccagtttcatggaagactatttccatggacagggtgagtgatggggacatggggggacggtttggggatgaaactgttccacctcagatcatcaggcattagttagattctcagaaggagcaggcaacccagatccctcacatgcaaagttcacaacagggttcttgctcctatgagaatctaatgccactgctgatctgacaggaggtggagctcaggtggtcttgcaggcaatagggagtggctggaaaacaaatgaagcttcgctcacccaccgctcacctcctgctgtacagcccaggtcccgcacgggtatgggccgctgactggtatgggtctgcagcctgggggtcggggacccctggtctaggaggtaccagacctcttctagactcaaagtcaaaactgagaatgggcctttttgagggatagaaaacttgagacttaaaccaggaaagacagactgaggaaccacaagcagaaacaaagagacaggcagtgctggaaagggcttaagagatcacttgtgtctcctccccctccaccaaccgcctctctccttcttcccccaccacacacagtctgcagaaaagagaactgaggctgcaaggggaggaacctgcccaaggtcacacaattaggaagtagaaaagtcacgaaatagcaccctgagctctcatccctgctccagtagactccctctcagagtggacttgagaaaacagcttgtgtcatttcctggtctgttctttgaatggaataagttaccatctagggacttagtagaaactactctggaagtcaggacacctgagtggtagagcctcagctctaccccatgtggcacagaccatcccctgtgtccctgggccttggtttccttatcgtaaaggagggaaggtgagaggaaaccatgagagcctgcagcctcttcccatcctaacctttcaccattctgttcacccaggatgctcagacctcacggtggttgtctcacaaagagaagggaagggcacctggcagaggggcctactctctgcggcccagctggcatctgcagcactcctcatttgtaacccagtctctgctgtttgcccatgtcttccacagcccagcttccaagaagaatgcaagttcagagaaaccctcctgcccaacaattacaatgcctacgagtcagacttgtaccaagggacctacattgccctgagcaaatacggacgggtaaagcggggcagcaaggtgtccccgatcatgactgtcactcatttccttcccaggatctaaggacccacaaaagaaggctcacagatttaaagcatcatctgttcgattgaaattttgcaccagcgaagaattccccttgccctccatggcttctgaatcaggcttatcctgtgcttggggagacctcagttgttttccttggccactggaccccacggcatgtagcccattcaaacgagggctaaaatcagcaattttagaatggcaatttatcccatgctctgacctccctcgaggagagaaggtatcggtgacacttgtggaatgtgaccatgtgcataggaaaaggccagggtaggagtttgtgtgcattgttgtatatccatacagctttatacacattctcagagcaatggcatttcaaagcatcaggtttctttctcctagcatcatcgctgcaggaatctgcctgtaagaatgtcacttgtcaaaccagcaagattgatgtgtgctcccattctgcctctttccaatcatctttccattcagaggccactaactacatgggttgcataggtcagcagggagcagctgtcctcaaagtgcagagacggcagagtgagagggtgtgaggctgaactgcaaaccagaaagagagtgatcaggcacttcaagcttcctgccagagagggctctggggacactgggatgaactgtcagggaggctgggggagaagcggttcccttcttggaggaaaggggtagagcagcatctagggcagctgaggaaggcttgtggaggcagcagaagggactggatgttctaggagagccactctgcctggagaactcaggctgtgcatggctccaggaacaagcaggggccaggctgcctgcccataacgtttcctcactttgaactggtcttattttaacctcagatgacaaggatcctaataatggcaacctctttggcgaggagtagggggacaaaatagggcatgaaggaagtagagaggctttggactacagatggtaattcctctccaactatgtccaagaaacgcacccaagttctcatctgataccctcacttccttcttgctcatcctcatctcacatacgcgctgtgcctggatgcagcagaatgggcaccgtgacctccagagtttgtgctctcttcctccctgcagtagaagaggagtgataatcccacagagtcaagcagccaagctgaagcagctccttgctgcacagtgccttctgcctcctgtcctttgagaatatttaaagcagaggttccccaagtgactataaatgttgtctgcccggagccttcagattcctgaaccattggaatgttcctaaatctgaaaccagagagagccatatcagagtgcaaatatttttggcatatgtgaaccatggagttacaaaatgacctgatgacctctgcgactcttgggggccccggcctgcaagacaatccttcatctgttgcaaataccttcatcttcaacatacctcgctatttgcagttgcatccatctatagatagatctgggttgagggattctgagctgaagatgggaggttggcaatcgaagggggagacaccttacctgccacctcctctgccctgcaaatgtcagggaggacatgtgctgggtgaggaagaaaaggccacacccaggtacatgaagatggaagagactgtagaagcctcggaacacgtgtgcacatggccaacccttggatgttgtagaaaagggagaaaactggtccatcttgattccgtggaatgttgaagtgtgggtctgcttggaggcggggataaagctctccactgttttttagggagtcttgtccagtgcaatcagtctcttgaacagggtccatcagaaatgcaggcactccaaacctgaggtgcatatcagttcctagtggagcttggaatgtgggatggctggcggacggcgtgactgtgatccagagaaaaaaggagaaggaagttttaggtcccatagcatgctttccttttttccaagatctttcagctcacgtggcaggaaaggagccatcttcaagagag

SEQ ID NO: 25142 - DNA, 1374 bp, Homo Sapiens
ttacttttgttatgtattttaccacaatttttaaaaagcaaaccaaaaccaaccaagagtgcttcccccacacctcaaaatcatcctgcagcagctccctggcccagctctctctcaccctgaccctgggcccctctcccaccacccagggctagccctgtggaccaaccatctctgccagcccctccccgaccctccagccagggaggtggggcgctggccggtgaatggggcaggccaggcccaaaggctggcccagggctcaccagctctggactgggcgtcccgtctgaggtggggatgaccaacatgccagctctgggttttagctgaggatgggcacatcaagcactgacagccagcaagctgggcacaggcgatgctcaacctctaacacatcggctgagaacctcacctgcctctccctgcctgggagccctggcaagacagctcctctcccaggcccagcacaggcaggcgctggacagccacttcctaaggggtgcgcggccgtcaaggcagaggtgggtatccctgcacctcacacctctcaggaggtcaggatccacatccgtcgcctgctttcctgggctgcccctggggcttgtgggctgagatcaaccccttgtgccctgccccaggccctccctcaggcgaggccctgcccaggcaggtggttcttccctggctgttcccttccaacaggtggggcccagaccatcctatctctttggacctggagacatttccttaactgggctttgcagcagagggaagagaacagtggcagagccaggcgcgtacctcctgtgcccaggacagcacctgtaagcaagggggaagggagccacccaccccagaactcaaatggagagaaagtcaagacaatcacccctgacgtggggctgcaccaatccctgacgtctgaccccactgtggctgtcctcagagccaagagggctccagaagcccacccgcctcgaagctgttcagggagcctcacggcccgtgtttgccacatgggtgtgtgccagggccaaggggacacagaagatggcaggatgacactaatggggtgagcagggcacactggtgcctcccatactgccctccagcaccaggcagggtcaccacagccggcaagcactgggcctggggatgtgtgaagagatagggttattgagaagagaaaacagaacgctggtcatccgtggcactcagggctaggcagtccagggagcagaaaacaggggtcccgggcccagtctccctcctggaggtcagagcggagcccctggcactgtgccctggcccagaaccaggctgtgggctccacgctgcacaccccaactcaggagcagaaagcaaacccct

SEQ ID NO: 25143 - DNA, 34003 bp, Homo Sapiens
gagggcaggggccatgtctgtcttgctcaggtctttatctctgtgcctggtcatgtcagtcacagacagtatcacttgataatattcacccaattaataaatatatttagtctccaaatgactaactagcaaagtcttcagaaggatacgtagggtggtgggtgctgtgattgtgaaacttgcccagatccctctcaggaacagaagactgggttctgtccccttcctgatgctaggagggctgccagtagacaccctcaaccgtcagcgttcctctggggaatgcctccatgaaagaaatggacagccccaaaatcatgacagttggtattcaatgactaatcagtgctgggctttaagacccagcccctcataccaactcaagacacctttacaaggccatcccaactccagagcgccccttgggagcctttactgggatggcatcacagatcaacttcttcctccgctctgcttcctccacctccccttcacagacgtttattccaagagcactccctaatcaatcaatgccttataccttaatctcgacctcagagtttactgccagggtaacccagcctgtgacaagtaccacaaaaatgtttacaaactggatatcatattttgtcctactccatagacgcctaaacggtaaagatcagttatttatccttgcatccttacaacgactagaaggtgtctttcatatagtggacatcagaaacacatcaaaggaaatattctccctaaacttagtctagattgagctaaattcttctgattcaaagtgtggtcctgttgaaaggggcaccagcatcccctgtgcattttgtccgaaatacaaaatctcaagacccaacctgaattagaactactgaatccaaatctgcattttatcaagatccccagatggttcacatgtatgttgaagtttgagaagtactgagctaagagatttattaatacaagtaaaatgatctggctgataatacctctagtttatatagtgtctttataaggattttccctctttaaaaattttccttaacactagtaatcatgcagtctttcactcaacaaatactaattgagtgccaagtaaagatgtcagctctacggagcttacattttagaaggagaagaaaacaaatatcaaggtgtatattatagtgtacagcaaggtgaaaagtgccatgaaaaaacagtagggcggggtaaggaggaggagaaggtgtgttgcaatttaaaatttttaacaaaagttcatgatactcagagaattgaaacaggtgagatcattagacattcgcatgtttgagcacaagcgctgaaggacttagcaatgtggctgcagtggaataggagagatgcaaaataacagacaaacccagagaggtaagagagcagacctcttcatgagaggctgcctaataaactgatttgacactgaattgctgagaaggtaatgcaaatagtttttttctccaagaacaaagtagttcttggtcaagccgatttgatttgggctgtgggaatctgcacaaaccatttcactagctaagtctcaggttcctcaaatgaaaaagcagggactggaaatggcttttgaagtctcattctcttctaaaaatgtcaggctccaagacaaccaggtgaagtccaagagttagtaaaataaggattgtggctcggctgtggcctaatgcaaacttgcacaaccccaggaaaccgaaaaaaactggaagaagaattgcagaatggggtgccaggttgaaagaccttaacctttgcactcaaattcctcccacacccagaagtccaggtcccgaccgcacgacgccgtgctcactgctgggtgctgcgcctgagtccgcctcctgcggcttcccggacttgaccccgcccacgccctggtcccgcctcctgccgacgccggcacagaccccggtgacggaagtgacgtaaggccggggctggagggcagtgctgggctggtcccgcaggcgctcggggttggagccagcgaccgtcggtagcagcatggctctcctctttctcctaccccttgtcatgcagggtgtgagcagggctgagatgggcaccgcggatctggggccgtcctcaggtaccgtcgttcgcggcagggctgcggccgggtcgggacgagagggagggagggatccgccccagccgggaagccccgccccgcttctccgaggtcgccctagcccgggacccctgcgtcgggccctgagcgggcgacggggacgcgaggtggggtcgcgagactggggctccgtggtttgaactcgtcggttgcctttctcctgcctcttccctggttgccgccacaacaaatcacgccgcttgtttttccgactcttgtaatccacttttaaatacgattatgcgctgcagaaggacgttgctggtcaatgtgggacagcgtggtctcaaagattataatatcgtcttcttactgtacctttttttatggttagatacgcagatactcactagtatgctacggttgcctgcagtgttcagtgcagtgacaggctgtacaggttcatgacctaagagcagtaggctgtgtcatctgggtttgtctgggtttctactgcccgaagaaattgcctaaggggacatttctccatttctcagaacggatctccatcgttaagtgacgcatgactgtgagtgtcctgatcagcatgtggcatcgtggtctcagttcgtggcttaaatacttctttcttagcgggggtgggggggggggactcaaagtgcttagggtaggaaagtatgcattatgtcgccagctgagaagtaagtggcagctgagaagtaagtggcagtccgtcttaggtctcagtctggaagtggtggattgccggcactcactagcagatttggcagtaggtctcttcgtacgggtttgttcttcggagcattttatttccacctgcttattgacatttcctagaaaacaaatgttgagggtggcttttctgaagtgcagagtaattgtgattacgagctccagagaaaacagtaaaccttttcaattcagttttcttttttttattatgatttatgattcatagggactttgaaaggtccacgttttggttctgtgttcacaacaatcttctggagtaggcgttatttgtctctctctttatggacgagaaattgagttacggagaggcctgcccaactggcagagaggtcatagccactcagtggggagctgctcaatttggctccagagtccaagttcttaactgctcttctaggctctagtcagtcatccacatgggcagttgcagtactttgcggtaagagcttgcacttaggcacagactagtggaaagcaaggcggggtgcttgtctcttttagggaagtcagtgaagacttcacaaaggtgaccccagtgttggaaccagaggtgcagagactgaggtgcagaggtgtgatagcatgttgaattcgtggaatattaagcgttctattgtaaagtgtgtgtgagagcttacaaggggaggagataggttaggtggagaagtaggaaccaaataatgaattgccatattatgtgtaccagcaagaaacctagctttattaacttaagcaaaaagaggaatttattgtctcagaaaaaccagagttaaacagaaaattatagatgccagctgggtctcaagaggctagaaccaggaacccaaactgctaggactctccatttcttatttctgtctgggtattgacagctttccacacttggcaggaatcatggatgctgacagcttctgagttttgacatcttgcagcctcctccattctaacaaaatgccagggaaaggctctgatttgcccagctaggttcaggtgccagcttgcatgggaaggacattctcgtagagggttgggttgggttaccagaagaagcggaatggcgtgcctgaagtacaggtgttgagccaacaaaataatacacccactatgccttgctgaagtcagtcattatttactaatgctgacatcattggattatcaattacaaagggaaatgattttatgcaggatcagacatgccatttagaaagaccagtcatcttataaaatagtttgagggtaaacacaaggcccattaggaggctgctgcttaagttggagtcgataagtagtttaagtggagaagaggacagttagcagaacatttagaaggaagagttagtaggcctctgactggatgtcagcagagaaagaggataacgctagcgcaggcatagcgttaaagcaagtgccaggcccttccttctgaatacggggccctatgagtgcaccgtgtgacccctgtgagtgcacaatttgcacgtccttgtagcttgctctgggaggaggattgcctgtctgcctcccgtgggaagatcaactgcagccttctatattctgcagaaacttttgaatttgtctctgtacctctcgttctaaaactggggtcacttttgtgaagcctttcctgactcccctagaagagacaagcaccccggccttgcttttcattagtttcagtgagccctctttttaaagtgcatttctaacacatttctctagatttttcagtgcatttctctagattttgttgtgttccctgttcttttaaagttaatttaaaacacaaaatctccaaagtaggaagaaaccaacaatgctctggctcttgcttagcttcccagccttattcttactgttgctgggcttgactctatagttgaagttcatcttagatgagaggacctggtaagaacagggaagcagacaagtgaatatggtgatatagtcagtctccaggaaatccaggtgtttaggaatgtattgtgttacattcatgggctttcattaatacttcttaagtgaaaataaaatctgtgtgtgccacttaatcagtagtatttcactcttcatgcacttttacacataaaagtagtatatatttttaagtgaatcagggtgtgccactggctttcttcatccagatgagtgtcccactctgagtaatagctgaagagctaggctggacttcacaccaactggaaggctcttcactgaccttgtacagtttatcagctatgcttcctactaattatctgactttaggataaagctctgagtactgtttaaatttttcactatttctttggattctatagttatttcagagattcaaaatacacaggataatactttttaattatatttattgaatagggtattaaattttctttttcattttattctgattcataattcacacagactttgaaaggaccatattttggttctatctaaaagaaaacctaggctgggggcagtggctcatgcctgtaatcccagcacatcggcggaaggatcactggagcccagaagttcaagaccagcctgggcaacatggcaaaacccatctctacaaaaaaatacaaaaattaaccctgtgtggtggcatgtgcctgtagtcctagctactggggaggctgaggtaggaggatcacttgagcccaggaggtctaggctgcagtgagccatgattgtaccactgcactccagcttgggcaacagagcaagactctgtctctcgtgtttgtgtgtgtgtttgtgtgtgtgtgtgtgtttgtgtatgaaaacctaaagaaaagtaataaacagctatcttacaaaatttggcagcataccagtagtgaagttgctttacaaaccagatgagtaattaatggttcaattttgattgaacaaagaatcagaatgaggtttgaaccagaatgaagtgaattcctaacagaaaggaatttacttgtaattttcttattaaaggggtgcctttattttagattatcctaatgcatagtaatcagaatactaggtatctgtttaggtcttgtgtatttttaagaaattattcattttaatgcattgttcaacttttgcagtggccataatataattgtgataatgtaataaaatcaggaaacattacctgaagcagatgcttttgaagtcaccagaaaatagtcttctccaattccaatttaaatatggaggtaatttaccccttattttattaaacgatcacaaagatgttggaagcatttttcttaatgaaaaccaacaaaactttgcatattgtcaagttacgtaacttctctaagcctttgttttctcattggtaaaatatgtatggtaacattgtctccctcacgggatggatgtgatgagtatctgaggtaatgcattaaaaaggtaagcacactgtgtgtcttgtagtaaatacttaatatgttagggattattcaataatgtgcattattattttaacaaatatatctttaaatattaaattcccttagtcatatgtgagaaattgtgttggcttttaaaaaaacaaacttaaccagatcagtatgagaaacttaaaacaggctcagcagctaactcattcttccatctcttccaacagacaaaaaagtttggttttttagtagactggaaaggcctgcattgttttttcatttcctcaactgtttttcaattcagaatgagttagtccaaaagagaattagtgttgagaaatgacttctctcagggactagattggtctggtccagtcagaactaatgccagaccaaacccaactagatgaaattggataaataggagtaagaataaagccctggatttcaagtcagaaaagtggctgagcagatatttattggataagccccaacttggtggtggtgcgagggaaaaatataggggaggttagttacttacaagttcactgcaggccactatgtgttatgcctggctctttaaaaagaaaaatttcaattagaagatttcaatgaacacttgaaacatcacctgcaagaattatcaaaatgtctgtactcagcttaaacctgggggatgcggctccttgctacggtgaaagttggaaagcattaagaaaaatagtcattttatcaccactggaagccattcgggagggagattgtaatcaaatatgttctgacaaaaatacaaaggccttgatttggtacttttcatttattcagtgtggatttcttatgctggttctgtttgctgtgcagatgaaacctttgtgacagtccccattcctgtccctgtatctttaacatggggaaggtgttagatcttctctgagagttgttcttaaggaaaagatccagatgctttaatttgaaacatttgtttttgagttgtagtgtcagatgacttagaatccagaacaacagtttacttcatcctcacttccttatgcttctcagcgtgctcttcccatgaagaggttggtgagcaggttgtcagatgatttctgcagagtccatagccctgttccaccatagatgtacaaaccttttatacagtctttttacactagtgtgttaagatgggtgatgaactcctcgggctgtccttttttaaagagacacagatgcttttggtggttacaggatggactcaggtagcagccctggttcctgtcacccagctatgcagaggaaatggccagtgtcttcagactatactctgcaggtatctgtagtttgccatccaccctacattcaccaacatttattgcagagctatcacgactgctattttttggtcctttgtgacattgttatggtcccgtcgatagcactgctctgtatcacctgctgatcttcactggtcttttgtgttgtctctcttttttcatatcctgtctcttctggcttatcagctttctgaggaaacagttggctttaaccagggccctcctttttttttctgcattgtaattaaagtgttaggaaaaacaaattcttctctcctgtgtttagttttcttaaattatcagctgtgagttgtaggggagttctgggaattagatcttaaaatagctaaagtttactccggatagtatgcagatgtaatacactaaataattctgagtccatttccaaaagcaacatgagttacacaaaactatcttggcattttcaagagatgggaaaatctgtaagattatcttatttcatgaaatcactctggtaagatcttttcttaagccccagagataataatactcttttgctgtttctacatatatttttatttacatagtgtaaatgtattagaagttaattgtaagccttaattaatttaatctgaatatataacaatttaaacctcacattacaaaattctgaagcttaagaaaactgcttatgtctgtcatattattttggcaaataatatttggcaaaaaataatatttggcaaaacaaaggcagatgtctaataaccacacagtttctcctctggtagcattaaaaaccacagattacatcttttggtgtaaatttataagtttttcttttaacctagtagtaatttctttttgctataaaccattgaaatattttcctcctaccacctgtctgtcttgctttgaaagctatgatttaagtccttgtcctagtctaaccatatcaggcttttacttaaattataggaaacatactttgattcacgttaaaaactaatctaatgctgcacaagcctactcctgtttgtagttttccattgtgtgattcagtagccccttcctaagtacaaatgcactttgtttgatattctagtatgcagattgacttctatatgcctttttctcacaggaatttcaggttgagcgtataccattataaagccattcctactgggtataattaaaaagagagccttaggctgggcccggtggctcacacctgtaatctcagcactttgggaggcccaggtgggcgattcatgaggttgggagtttgagaccagcctgaccaacatggtgaaaccccatctctactaaaaatacaaaaattagccatgtctggtggtgcaaacctgtaatctcagctactcgggaggctgaggcaggagaatcgtttgaacccaggaggcagaggttgcagtgagcagagatcatgccattgcactccaacctgggcaacagagcaagactctgtctcaaaaggaggggagtggagcttaaaaggaagcaaaggatttccagtcttggaaacctagaggaaggggggtccttgctatgtagtggcagaaagctgagtgacactgtagccttcagtgacaccaaaagtagagaatgtctgaggagctgtgtgatctagctcaggaggtttctaaccagagtgctgaaagtgccacctggtttcttcttgcgtcttatagtaacaggtgagactttgctcaatcatgggaagaactgttaaaaagaaaccaggaccacctggtttgaaaattctcagcctctcgagaggcaaaaaaatgccaaaatgaagaaatggtctccgaaggaaggctcagatttagtatgagttttcttagcatcaagtacctctgttttccggttgaaaaagtatatttatatgtgtgattgttatttgatattaatgttgattgaacccaggtgaagaggaatgacttttatttctacctaaaatatggattgtgaagtatttgagttgtttcaggaggttgagatgcaaacgtgtgatagaaaaaagaccctcttaaggaagcctcagtatcccctgctatgaatggccatgggaactctacaaaaaacaaagagccaaggctactctggcaagaacagtgccttagggatcacctacaaggaagttgcttagagaaccagagatggcaggtaccaagagccttcagctgcgcctctggaagcagaaggagaaaacctaggtgtctggtcactggccacaaaaaggtcaagttagtagtatgaagtatttgaatcttcagaccctccccagcttgataatctcaaccttttggcccaaattattacaccattttggtaaataatatagaagttagatcttttggcaataaccaaatctattcatttgtttgaggggagccatgaaatatacaggtttactgtaaagcattctgtttttaagttagtttttcctcaactttttttttaaagaacacttaaattgtaaacataaagcagggtttctcaaccttggcactgctggcatttggggctatattattttttgttgtggaggctgtctgatgcattgtaggatatttagcagcacccttggtctctgccctctagatgccagcagtacctcccccacacacttcttctccaggttgtgagagccaaaaatgtctacagacattgattgcctaatgtctcctggcaacaaaatcacttcccacagagaaccactgcaataaaggaaaaaataatcagaaaaggaaaataataatggtgatagcatttaattgtccattagtgcctattatttacctaaaaaactcttaatccatgttctgctttgaaaatatatgtgttaaataattgtaaattaaggcaatataccagtttggtcttgaatattggaatttttgtttggggaaaatatagattttcccttcagcagtaagcaaatatcttagggatatgaaagtaacacctcatgacagatcaggaaatctgaagtatttagcagtgtggccaagaaagaacccaaatttattaatgtttgacctagggagtatttttcttatttaagcagtctgcttgatataaatataaatcatcatcattatcatccaaggcactttggaaaaatagaaacttctgtccctctcacaatttttgaggatgattataagttatgtttggaagccactgttcctatccacatggacattcatttatttgttttagttatataagtaaatcatgtttaatagagtgttccagggaggtgagattgaataaccataaatttggggtcacatcgctaactgtgtacattcatgtttatctgtaaagaagtgaagggagaaaggagaagtgtgtgtgttcagttttccaaggggtgttggataacaaccttttacaccaaacagtggggaaaaatgactcctttttttttttttctaagagaactgaatgcagtggcacagtcacagctcactgcagccttgacctcctgggctcaagcaatcttcctcagcctcccgagtagctgaaactacaggcacaggcctcttcacctggctaattttttaattatttgcggagacagggtctccaactcctgagctcaacagatcctcccacctcagcctcccaaaatgctgggattacaggtgtgggccaccgcacctggcccatgactacttttaataactagattttggtagtgtctgattagatgttaaaatgacttctgtctgttctcttacgtgactcaagtcttatcaacagatgttttctgaaagagtgaaggcaagaagaaatgttgggtatgttttgtaaaaagccctgcacaccccagagagcagagtgttgatgaaactggaatgtgtggctccattgttcaatctttaggtatctattcctgtactatagaaaaagtgtggaaggcataaatagtagtatgtgtagagttgagaggttgatggtattttagagtgaaattggccatcctcattgtagccagttcctctgtagacatttgtattagtctgttttcgtgctgctgataaagacatacccaaggctgggaagaaaaagatgtttgattggacttacagttccacatggctggggaggcctcagaatcacagcaagggcgaaaggcacttcttacatggtggcggcaagagaaaaatgaggaagaagcaaaagcagaaacccctgataaacccatcagatctcgtgagacttactcactatcacgagactagcatgggaaagaccagcccccgtgattcaattacttcccccaggtccctctcataacacgtgggaattccaagagatacaattcaagttgagatttcggtggggacacacaaccaaaccatattatgctacccctggcccctccaaatctcatgtccttacatttcaaaaccaatcatgccttccaaacagtctcccaaagtcttaactcatttcagcattaacccaaaagtccacattccaaagtcccatctgagacaaggcaagtcctttctgcctgtgagcctgtaaaatcaaaagcaagctagttacttcctagatacagtgtgggtacaggtattgggtaaatacagccattccaaatgggagaaattggccaaaacaaaggagttatagagcccatgcaagtccataatccagtggggcagtcaaatcttaaagctccgaaatgatctcctttgactccaggtctcacatccaggtcatgcggatgtaagaggtggcttcccatggtcttgagcagctctgcccctgtggctttgcagggtacaggctccctctcagctgctttcacaggctgccatcaaatgtctgcagcttttccagaagttgtcagcagatctaccattctggagtctggaggatggtggccctcttctcacagctctaccaggcagtgccccagtagggacttgtgtgagggctccgacctcacattttccttccacactggcctagcagaggttctccatgagggccctgcccctgcagcaaacttttgcctgggcatccaggcatttccatacatcttctgaaatctaagcagaggttcccaaatctcaattcttgacttctgcacacccataggctcaacaccatgtggaagctgccaaggcttgtgacttccaccctccgaagccacagcctgagctatatgttggcctctttcagtcacagctggagcagctgggacgcaaggcaccaagtccctaggctgcacacagcacggggaccctgggcctggccacaaaaccactttttcctcctaggcctccgggcctgtgatgggaagcgctggcgtgaatgtctctgacatggcctggagacattttctcgatggccttggggattaacattaggcttcttgctacttatgcacatttctgcagccagcttgaatttctccccagaaaatgggtttttcttttctgtctcatagtcaggctgcaaattttccaaacttttatgctctgcttcccttataaaactgaatgcctttaacagcacgcaagtcacttcttgaatgctatgccacttagtaatttcttccaccagataccctaaatcatctctctcaagttcagagttccacaaatctctggggcaggggcaaaatgccgccagtctctttgctaaaacatagcaagagtcacctttgctccagttcccagcaagttcctcacctccactgagaccacctcagcctggattttattgtccatattgctatcagcattttgggcaaagccattcaacaagtctcttaagtaaagttccaaacattttcctatttcttctgagccctccaaactgttccagtctctgcctgttaccctgttccaaagttgcttccacattttcttgtatcttttcagcaatgccccactctgctggtaccaatttactgtattagtcctttttcatgctgctgataaagacatgcccaagactgggaagaaaaagatgtttaattgaacttacagttccacatggttggagaggcctcagaatcatggcgggggagaaaggcacttcttacatggtggcagcaagagaaaatgaggacgaagcaaaaagcagaagccccaataaacccatcatatctcatgagacttattcactatcacgaaaatagcacaggaaagactggcccccatgattcaattacctctccctgggtccaagccacaacacatgggaattctgggagatacagttcaagttgagatttgggtggggacacagccaaaccctatcaacattgaatacaatctgtagtatcaaatattgaaaattctagtgatgaaatgaggattattaattcaataatcagtgcatttgattataaaacttctatcatattaagggaatttattgcttcatgctgtatttgtgtttcctttatattgcaatgatgtttccataatttaaaacgaatcagaactcttctatagatttttcaataaaattaatttctagatgtctactcttcatttaaataattttggtatcctggtgaattctacttttcttcaaatatacatatctgggcaatgtggcatcttacaataaggctttccaatattaatgttagtttcttacaattgtcccttttacttttttattttcttacagtgcctacaccaactaatgttacaattgaatcctataacatgaaccctatcgtatattgggagtaccagatcatgccacaggtccctgtttttaccgtagaggtaaagaactatgggtgagtgtcactcttttatttatcctttttattccatttttgtttaggtccttggaaattccacaactgtgttctttcatcagccttcccacgtggcaaaacattctaaactgcttatagaggtccaaaagtactaaagatgcaaattctttgccaaatatttcttgcctcttatttcctcttccttatcagtattgaaatagagaagtatcactaaacttctgagattagcatgacaaataaagctaatagttactatgtcatcttcctgtagtgtatttttagtagaacaatataaatttcaaaaaacttttttgacaactgttagtttttttaatgtgcttacttctataattaacatatataaatggaatttagagttgtttaaaaaaacagatttttaaaaaattgaatgtggaatgtggcttgcataggtcttacattttgaattgagcctctttactgtaacagagtttgtagttcttctaactaaagagtaagggtttcctactttctctggcgtctccatcctattcttagctctgctctttctaccgctttgtgctgtgaataaaaagcaaagcacagacagaaatggtttgagtttatttaataacaataaaagttatcttcgcatttttttattctttttagtgttaagaattcagaatggattgatgcctgcatcaatatttctcatcattattgtaatatttctgatcatgttggtgatccatcaaattctctttgggtcagagttaaagccagggttggacaaaaagaatctgcctatgcaaagtcagaagaatttgctgtatgccgagatggtgagtagaatgtgtacacatgtaaattttaaattggaaaatatttatacatgtcttctgtatgtttgcttttattagcagttgctgaaaattatcacaatgcttaagaaacacttggaggaatttagagtcagtacaggttgagcatcccaagtctagaaacccagaatgctccaaaatctgaaactttttgagcgccagcatggcactcaaaggaaatactcattggagcattttggatgttcagatttagaatgttcaactggtaaatataatgtaaatattccagaatccagaaaaaaaaactcagaaaccgaaaatactactgatctcaagcgttttggatatgggatactcaacctgtatcctccccttctttcaagccccacaaaatagggctaacaggtggccatcacttagctgcttctatgccatgacatttccacttcatacaattatgggtctgtgctgcccagcggtcccctgcaccacccttgcccttcccatcttttgtcattcatttgtaagttatattcactaaggactttggcagctaactcttattctgaatgcctggggaacctgaataccaccttaatacattaaaaaattgcagagttccttattctcttcagccactgtgattttcaggtcttcagtcttccagcatcccactcccatagtgtacctgatgtttgctgtcacctcaaactcttgaatctttaattccagttcctgtattccaactatgacatcctgccttagctctcagaccctgactcctgggtaaaagacacctttagtcacttgactcctccctagtcttctagcccttgggtccctttccctctagcctcacttcctttctctgctcctgccttttagattgtgccacctcggtctcttctacaggctcttcctctccttaccctttaaatacttttcttccccagagtccacaattttgtcatatgattaccacaccatctgcatgttagatttttttccatatagatttatcaagggcctactacgtgccggaaagtatactgggccctgaggatacactgatgggttaaaaacagacctgcctggcacacagtggtacacagtaatatgtgaagactagataaatggttcacaacaaagtctcaaacatcaaagacctaataaatatttatggaataagttctgatttttcacagtaaaaagagttttgatgagggaagaaaactaatgccatttctgaaacgttttttagaatccaggcttcttaatccacagaagcaaagataaaggaaaaattacttaatagagtctatattatgtgaagtctttttttaaccaaagtttataactatttttatttacaactagaaatgaaattaaactgctaaataggcattcagattaaataagagtacttcttgcctgagatttatgaaacatttgtttattaaggaccccgagactatcttctagatatttgtggagtggtttaaatgtggtcctgctttagaacaaccagaacaaaaacaataggttgattgatagattctggtaattttatgaaatgtaccatttagttccaaggccagtatttattatacttcctcctcctccttccccaggaaaaattggaccacctaaactggatatcagaaaggaggagaagcaaatcatgattgacatatttcacccttcagtttttgtaaatggagacgagcaggaagtcgattatgatcccgaaactacctgttacattagggtgtacaatgtgtatgtgagaatgaacggaagtgaggtatgtgtttcacatttttcataatggaaattcttgtgtagctagcaaaagttgttcctttctgtagtgtaatgaaaataggatgcttataaatattcaagcaagactcacagatcatagatttgataagaaaaatatgtgaatgctattaaagcaaaaatgatacagagttagtcactaacactgaccatgtgaatacatttagtttttatttgcttcatttagcagaatggctctaatctaggatttttcccagtacacctccattgctccactggtaaaatgaggattttcttcctcattggcggtgacgtaaagtaatattaatacttctgtttcccaccagctaaatttctggacaaatgaataggacaaatgaacatttgttagtttaacaactaacaataaacattcctgcaatttgagtttttaaatttaccatttttataaggaatataacagatgcatagtatcgtgctgtgttgaagtaacaaattgacttattgatagtaaagctatttttagacatgttcaagtcaatcatatatatttcttcagttgtttgaccaggactaatatggtgattttttttttttttcagattaaaagaagctgtgcattttcactgttttcttttttcatctagatccagtataaaatactcacgcagaaggaagatgattgtgacgagattcagtgccagttagcgattccagtatcctcactgaattctcagtactgtgtttcagcagaaggagtcttacatgtgtggggtgttacaactgaaaagtcaaaagaagtttgtattaccattttcaatagcagtataaaaggtaagttcttgccattttttttctaaatatagagggagcagtaactaaaataggatcatgtgaggaaagcaaactcatttgcagtttcaaaagatctgttttaacaatattcatttgcattagttccattccttagagaagttcaaaattaaaaataaagcagtttctcacacatttaaagatatagaacaactaatttggaaagccatgtgatggccccttgacccaggaaagaaaaaatatataataagtacataaaactacacaaatgtttgcatttcaggattatgaattataagtcagtttgttacttcaccatagcaagatgttgtgaatccactaaaatgttctttatggggattgtaatttaaagactgaagagcaggaacgatcactggttacaactgtatgacgtggactggacaaagactcgagattaatatccaaaaaagtttatagatgggtttgaataatagataatgggtcatttttataacattttacaataattaattttatttcatcttttaatgtggggggtggggaggtagagatatatatgctagaacttgaactttagaactgttactctcaggtgtcaggaaccttaaagaagtttggacttttctttgcagttaggaaatgtaagtgttcattatagataatttataaaatatgaaaaaccagaagaaaacaaaataatctgtagttctaccatgcaaaaataccccattattcacagtttgatattttctttagtttttctacatagacatgatcatattgtatagtatatatgattttgtgtattgctttaagcatatattgtaactcatgctttgatgattatctttgtgtgtgtgtgtgtgtgtgtgtgtgtgtgtgtgtgtgtgtgtatacatatatttttttccttaggatttttttagaatagatttcataggtttaaaattttatgatgcaagtatattttcgaggaatggaaatataggctgaagagccagaacaaacacctaaaattcaatactaataacttcaagccattatatgaaggtttcaaataggtgatttaaagcagtgcaatgcattttatgctaattttcgttatgctatttgaaaaataaaacccttcttaatgctcaaaatttgaaataatgcaaatgccgcagatttgtttttagcctgaattatacactgcactgatagtatggccacacggtggcattgccgtggctcctgagcagcagccctgcctgcttgcctcaatgccttgcagccagcacttgctcagcccgtgggacttctaacagcactaatgttggttttgtagttattttcctttttacttttgtaatgatttaacttttttcacaccctgtaataagcgtaatagaagcattcattagtaacttccatagttagaaaattctgggtaacaaaatgccctaaaggatgccggacattgtcacagtatgttagagtgctgttaatttggaagagagaactatgaaaaaaaaaaaatactgaagattgtgctgcaaaaataaaaggcagcattacagcaaagtacacaatggtgattctagatgtatgtgcttggaaacaaatctttcctattttatattatttatgtctggtttataactaaggggactttattcctgtgcagcattgctgtgtgcatgtacatctgtgaagctttataagtatttgcagtcgtgaaataaatgtaacaggaaattctgaggagtggggctaaatcatcttaagagcaataaacattgccagaatttctttctttttttttttgttgttttgttttgttttgaaatggagtctcgctctgtcaccaggctggagtccagtggcacaatctcagctcactgctacctccacttcccaggtccaagcgattctcctgcctcagcctcccacgtagctgggactacaggcgcatgccaccacacccagctaatttttgtatttttagtagagatggggtttcaccatgttggccaagattgtctcgatctcttgacctcgtgatccgcccacctcgacttcccaaagtgctgggattacaggcttgagccactgtgcccagctgccagaatttgtttctaaggagaggtatttttaaaattattcttttgcatttttaaccgaaagaaatgcataaccctggaaacacactgtatgtagggctgtaaggaaattattgtagaaaagctattttaactatgttgtgtcatagtagaatagtcccagaaagttctagaattgcagagctgggaagaaccatattgctatctaagacagatacctaattttttactcagatttcctaacttctgcttccttcagtgttctttaaaactctggccctattcactaatttgtaaatctattcaagaatggcactaagactttttgatagataatagcagtattccatcttaattgtaacttgtgatttctgccttttttaaggttctctttggattccagttgttgctgctttactactctttctagtgcttagcctggtattcatctgtttttatattaagaaaattaatccattgaaggaaaaaagcataatattacccaagtccttggtaatgtatttaatttttttatatacactaaaaagttaacttgaaccttttttgatagtttcttaaattatgtttttaaagtagaatgatattcaacaagatgtcacctgccatcaatcagtcagtctaccacacatgcaaaatcacatactgtgtcttttgctgtgcagcaagtattttgtttttttttttattctcagggaaaaacacggtgagacaattctgttaaagatcttaaagtctagggggaagaaaagataaatatacattggctatataacgtgtgatagattcaaagatttatacctgagcccatgaggactttgtccagctttggggtggggttagtcatggcttttccagaggcaatgcctgagcagtcttgagggacatacaggagtttaggcactaggggacagaatgtgctgaggtccagagccaagaaagcatgactttgaaagctctgcaaatacagaaacacttcattatggttggagtatgaaaggaaagttggccaaaaatgagactaacgtaggagtttgacgattttaatgtccaacatttcaaagcctttgatgtaaagaacatttaaaggtaacagaatagtatctatttgagtcaaatatgacaggaataatatctgtgatgctcaaagggcacattaaaatttgctataaactacctttaaagtggataagaactctcaacagttagtagtcaactcacaaatgaattataatattttattcttactagtaattaagcacaaagtaaccttgcagtatgccattttacacgcgctagagaagaaaaaagaaacctggatatccagtagtaccagcagtagcataacgggtaaatgctggtgaaaagtaatctagccctggtaagaataaaagcacacagtgggtattcagtgtaatagtgacgtaaacataccatttctttgatatggtcactccactcttaaaaaatgtattataaggaaataatttcataaataaaaagatgtacaggatatttaacatgttccatagctagtaaaaattggaaacatttccccatctattaaattatttatcagtataaagaaataatatgagctactaaaaattataatgatgaaggcaagtaatgagaatattacttaagtagatgtgcccactttgtaaacataatgtgcgtacatgtggaagataattgtattaggattctctagagggacagaactaatggaatatatatataaagatatatatataataccaaataaactcccctttatataaatctatattttatatattatatattatatatattttatatgttatataatatatattatatattatatataatatattataaattatatattttatataatatattataaattatatattttatataatataagttatatattttatatattatattataaattatatgtttatataatatattataaattatatattttatgtaatataaattatattttatataatatattataaattataaattatatattatatattataaattatatattatataatatatattaattatatttttcatatatatatatataaaggggagtttatttagtattatttagtattaactcacacgatcagaggtcccacaataggccatctgcaggctgaggagcaaggagagccagtccaagctccaaacttgaagaattcagagtccgatgttcaagggcaggaagcattcagcatgggagaaagatgtaggctgggaggctaggccagtctctcttttcacatttttctgcctgcttacattctagccatgctggcagctgattagattgtgcccattcgggttaagggcgggtcttcctttcccagcccactgactcaaatgttaatctcctttggcagcaccctcacagacacacccaggatcaatactttgtatccttcagtccaatcaagttgacactcagtattaaccatcacagtaacgtacaaaaagcaacatatattagtaagatatctgatggctttttaaaaattctaaaactttgtttttaatattactatgggacctttcattaaaaagaaatggcaacatctgattcacccattatcctaaatgtgccatttggtggtccattacttcagacctttgttttttttgagggtaggcacttaagcttaacaattttttatctttaatcaatttttctccccatagatctctgtggtaagaagtgctactttagagacaaaacctgaatcaaaatatgtatcactcatcacgtcataccagccattttccttagaaaaggaggtggtctgtgaagagccgttgtctccagcaacagttccaggcatgcataccgaagacaatccaggaaaagtggaacatacagaagaactttctagtataacagaagtggtgactactgaagaaaatattcctgacgtggtcccgggcagccatctgactccaatagagagagagagttcttcacctttaagtagtaaccagtctgaacctggcagcatcgctttaaactcgtatcactccagaaattgttctgagagtgatcactccagaaatggttttgatactgattccagctgtctggaatcacatagctccttatctgactcagaatttcccccaaataataaaggtgaaataaaaacagaaggacaagagctcataaccgtaataaaagcccccacctcctttggttatgataaaccacatgtgctagtggatctacttgtggatgatagcggtaaagagtccttgattggttatagaccaacagaagattccaaagaattttcatgagatcagctaagttgcaccaactttgaagtctgattttcctggacagttttctgctttaatttcatgaaaagattatgatctcagaaattgtatcttagttggtatcaaccaaatggagtgacttagtgtacatgaaagcgtaaagaggatgtgtggcattttcacttttggcttgtaaagtacagacttttttttttttttaaacaaaaaaagcattgtaacttatgaacctttacatccagataggttaccagtaacggaacagtatccagtactcctggttcctaggtgagcaggtgatgccccagggacctttgtagccacttcactttttttcttttctctgccttggtatagcatatgtttttgtaagtttatgcatacagtaattttaagtaatttcagaagaaattctgcaagcttttcaaaattggacttaaaatctaattcaaactaatagaattaatggaatatgtaaatagaaacgtgtatattttttatgaaacattacagttagagatttttaaataaagaattttaaaactcgtttttgtattcatttattcaagcacttaggcagtctttcatagttaagcagaatatttttatatccactgcttgtttccatgcattaatgctataggattatttgctaattgttcatatttaatatttaaaacaaccctaaaaataatatttttaaatggtccttataggtctatatttcagtgcttaacacccagtgtgcagaacactgttctaagtggtttgagaagaaaagatttagctgtagagcatgtggattgaggaatctagcataaaggtggtgggcagagccatggaaatggatggaaccttgagaattacatggtgtggaaagaatccccagtgagaggcaaaccaagagttaatatatatgttacccaaggatttcttggaattactaagaggatagaaatattcagaaattaatatgaatctgtgaattaatggaccaaaaaaaatgaaatacaatttacatgagtagcaaatcacatttctttggtttctggaaagatatttctcttcacttaaaaatgcaaattacaaatgagatactatcagtgaaaaaagtagtggtgtggtttgcagtggaactggtatagtcactgattttagggtaatgtcttgtaaattgcttttcaaactgataccccatacatatcacattccacaaaagtaatatccttcaacagactttgatctctcttgtgggaaaattacaaaaaaaaaaaaaaaactacatgaacaatgcacacattagaatgggaaaagcaaaaatatgaaaataattgaaatagccaaggaagaggtaatacttactaccctccaaaatgattataccaatgtgtactcccatcaaatgtgaatgaagtacctgtttttacaccctagctaattgactgaaataagtctttaatctcggtaaaacactttacacattaaatgcatttgcatttctttagtaaatttgagcatgtttttatatcttatttatagtttcatgccaactcatcttgttctttgtccatttttttatgggctgtttatatctttcttactaccctttatctgccctgagttacagatttattttataatttcctgccttttgacttaccacacagatgtttaagttgtttataaagtcaaatttatttatttccttctatttttaaaaagcccttcccctttccccaaaagatagaagttttcactcatgttttcttctggtctttggtgatgattgttttacatttaattcttctatccatctagatttttttcctttgaggacagagatagagatccagctttatttttttgttttagtttcctgtggctgccgtaataaattaccacaaacttgggtggcttaaaacaacagaaatttgttatctcacagttcagaggctagaggtctgaaatcaaggtttcaatagggccagattctatctgaaagctctaggggtggagggccccttcctagtttctagtgattgttgtcaatccttgatattctctgacttatggctgcattattccaatttctgcctcttgtcacctggcattcttctctgtatgtctgtgtccagatctttataaggacaccagtcaattggattgattagtcccactctaatccagtatgacctcctcttaacttgattacatctgtaaagacactttccagttaagatcacattcataggtaccaggggttaggacttcaacacatctttttgaggatacaactcaactcatatatttcccttaacaaattagttatcccaaatactattcattaaattatctaacttttctatgctgatttcaaatgtcacatttatcacatgccaaattctcagcactcctggaacagttttgttgttcagtcttttcccgtctatgtatcacacttttaatacacattatactgggatatattttatgtttttttgagacagagtctagctttgtcacccaggctggagtgcggtggcacgaacatggcttactgcagcctcaacctcttgtgctcaagcaacactcctgcctcagccccccaagtagctagtacagacgctcatgaccatacctggctaatgttctgtatttttttgtagagacagggttttgccatgttgctcaggctggcttcaaatgcctgtgctcaagcaatctgcctacctcaacctcccaaagtgctgcaattacaggctgttttgacttctgaggctttcctgaatactttcagccaatgttcattgctcatatttcttagcaataattatttatttatttacttactgtatttttagtagagacagggtttcaccatgttagccaggatggtctcgatctcctgacctcatgatctgcctgcctcggcctcccaaagtgctgggattacaggtgtgagacactgcgccctgccagcaataattattttttaggtgaactataacctaaattttttggccaagttttcccccaaattttaaactcctttgggatttatgttggcattgttttgactttataaaatgtttagaaataactaatattttcaagggttgaatgttctgcaagaatggagactatttctgtcttcaagtcttacatccctcattagaggtttacttcatacaggtgtagaaaatttactaagtgtattccttgatattttatgttttttgttgcctatgggaatgtcatcttgcattgtggctcctgaatggctgtctatatgtacacgcacacacaaactattgttacaagttgtttttgtatctagccaacatctaaactgttttttcttcatggtttttagttgattggttttcccagtgtacaaacgtgttgtctataaataagagtaatcctgccttctcatcaccaatattatattttgttttttattcccttgtcctcaaactttgatgaattggtatacgctattttccaagagtgattgaccaaacctggtggctgtgggcaaatcgcttagcctcatgagagggttggattacattctctctatcttttggctcttaagagtcattgcttccatttgtgttaattagtaagagcattggctgggtgcggtggctcatgcctgtaatcccagcactttgggaggccgaggcaggcggatcacaaggtcaagagattgagaccatcctggccaacatggtgaaaccccgtctctactaaaaacacaagaattagccatgcgtgatggtgcatacctgtagtcccagctactgaggaggctgaggcaggaatcgcttgaatccaggaggcagaggttgcagagagctgagatcacgccactgcactccagcctagtgacagagcaaggcttcgtctcaaaaaaaaaaaaaaaaaattaaagcatcatctttccaacacagttttgtgtctaaacttaattttttttcccctacttatttctggttaccagaaattcacgttattgaaccattattcatgccaagttaaattgtcttaagattactgcctgggtccaatttaaggtaccacttcttatgcctgataaggatataagtggatgacttagaaaataagtgccagctttgtttgtatagtcattagttagcttcatttatgagatgcaatacttactctaccttccaccgccctgcaaataataactggtctctccattggtactgttacagggctttaaggcttaaccacgtaccccaagctctctttgctccagtatctcctctgcccaggagataagtgtcagatatttaattgagaggaaagagtggcagagatatgttctgactagcacattcccagagtatcctttctagagctaattataaaatgttataatacccacaatgtatctccaaaattaaatattgagcagatatctaccaataaaaggtgagtagtagagaacactcacacattggcttctcagacagcctttttaaggaaaattcgtggagctgaacaacacaggtatgtagtcagactggatgtcagaccccagcccttgggctatgggacatttttgctacataaccagagatgtgccagtccctttcctggtataaaaagaggtgagggccaaaggggtcagtaggtacttcactcaattcgaggggcctctgatccatctgaggtgaggccacttttatttcacttctgacaccatcttgtgaacctaaataacagcaagagtctctctaaaagaaaataatatttgagaatgggtcttgcaatgagaaaatagtaaactgcctgtgtattcagggagataaaggaagacaaaagtttttaaaagaaaaatgaagatgacctaattgtattgagataattaacctttactatgtaagccaaaaataaaattgtaagccctccccacctcaaaccatctaaacggacgccccctcttggccaagcgcattgtaaagttaacctgaaaaactagttcaggccatgatgggaagggagagttggatataactcagtataccctcctcccttttggaacttaggaaaagctgaccagcattaaacttacgtctgataagaaacattttcaatctattctctctgaaatctgctacctggaggcttcatctgcctgataaactttggtctctacaaccccttatcatcataacccaggtatttctattgattctgggtctttgggtaacaacataactctttcaacaaattgccaatcagaaaattcttaaatctacctataacctggaagcccccacttcaagttgtcctgcttttccagattgaaccagtgtacatcttacaggtattgattgatgtattatgcctccctaaaaagtataaaagcaagttgtaccctgaccaccttgggcacatgtcatcaggacctcctgaggctgtgtcatgggcacaatgtgtcatgggcacatccttaaccttggcaaaataaaccgtctaaatgtattgagatctgtctcagatacttttgagttcacaaattggtgatgaagggattctgagtggaggtgcccctgacctttgatgaatctattggtgcttggtaccagcttgagctatccttatggctcaaatcagaaggacaatttgctgaggcctgggagttccccctccagagaatccctgatctctcaaaatttggtcgagatctaaagcttattttgctctacaactccttttctggagttttacttgattccaacaaggaaagcaagtttttctgcttccatgatgatgcatagcaggtaactcatttctggagtttcagctagtttccgatagggaaggcaagaaccttatgtctgttcctgtgcacctttccaggtatttttcctgcttctaagatggtaaagagcaatcttgtgccagggctctattcctaggtaagtagcaagaattgggatttttttgtcttggaaattctccttaatgactacaagttgaaattgacaagcagctggttttaatttctccttaccgttagagcactcagtaatcatattgttggggtttttgttgttctgatctttctcccataggatttgatcaactataacagacttggtcaaattccaatgagaattccaaattaggggaaacaaggcctctgaattggctaaaattcctggcagctgcacaaacaaaaacaaaaacatgtgcttggtttctgtgttcacttcctttcttaaaaaaaaaaaacaaaaaacaattattcttctgtttacttttgttccactctatttttccttcccccttcaccatctctggtaccaagaaaaatctacagaagggttctaatgtctcagaccccttaaagaactcagaacaaaggcaccactcccacccccttttggggtgttctgttttctttgtggagtttcaagagtcatgggcagattcttcttagatttaaaactctgctttcctgtattgcattacctgacccttttggcttttgcgggcaccagagattaccttgtactgtgagaagatgtgaccttggagtgtgtaatggcagacaagagctataaagttaggagtggctgaggacagtttacagctggtcttagctttttccaccccgctgcccccaccaatgaagttgttgtttaggatcctaattctagttcagaggtgcattctaaagagctttctcattgtcttctctcccaaaattaatctcgattggcttgtctgtgtatttgtgagagcaactaaactgttgtttttgtagataaatgtcagactgagtttcctaagctctgaaaagaaagggcattttgctccttccagccaaaaggcatccctgggttactggggtggagcctaaggggttgactaccaaccccatgaaatgcagccgccctacagggaacccccagcaaaattagtttaaaaaggttcatccaggaagctcatgtaggaactccatgttttgagcactcggaggtctaaacctccagagagagaaactgagatacataagagggtggcaacgactcactggtgacacactgtggagccccacccagaatcagcatattttgacccactaaactaaaacttaggccacagctcagttcctccttttaagaaaatatgtggggaataaattaaggatatggaaaaacaagaacaaggcctctcaggcacctcatttcgtttcatggtgcctctacttgcaagtggttgtgtaaatggaagggcgtgccaggttttctaatactccagctggttacacattaggtctgttcttgtgcgcattttaaactgatgggcaaattacatcaaggaaaattcagaacctaaagttcaacctgcaactctaaagttcctaagttctctatctctgttttcttttccacctgctttgtctgctattattaacacatttctactgagataaaatccactgtttgcatccaaccgtttctttttgttattgtttttgcaaactggtaagtttatattaatatctcatagctaaaattttgaagtgaaagcaacaggatctttgtatgagtgtgtatatgtgtgtttatgtgtacaaacatgtattttattatgtgtttttggccacaaggtactaaaatggcttaaagttgaagggtactcatacattaaacaataagcccaaatgcttttcaaggtcatgtgacaagtaaaaccttttataaataaactggcttaaaattattggtcaagtaatattagaaatgtcttataaattgtcaacatatatttttgtttgcatttattgatcagcaatttcatacttatccctgacaaatactctgtgtcaaaatttgacataaagtttataaaactgtaaacccaaccgttatggttggatctgtatccccacccaaatctcatgtcaaattgtaatccccagtgttggaggaggaacctggtggaaggtgattggatcatggggtagtttctcatggtttaacaccatcccccttggggctgtcatggtgatagtaagttctcatgagatctggttgtttaaaagtgtgtggcacctccccaacaaccttctcttcctccttctccagccatgtaagacatgcctgcttcaccttcacctttcaccatgattataagtttccaagcaaaagctgctatgcttcctatatagcctgtaaaactgtaagccaattaaacctcttttctttatagattacccaattccaggattttttaataacaatgtgagaacagactaatacaccaacccaaaacagaatgatctttgcttgtgtagtttttgacaaacaagatatcaaatattgttggtttaatgaaaacagctaaacttggaattattggtaaaataaccatatatttaatcctgaggttcttacttaggtaaacacctgaacttcataggctataaaaatcattgacagggaaataactttaaatgatgactatcacagttttcatagtctacataaaatattaaaataaaataatcaggtaaatgtaaagggataaatacctgtaaataaacttgtcataatttagaatataaaattatattaaattcaataatagatatttaattaaatatctgggtattttccaattcaaaaaattatattttattctttttttaaaatatgttcttattaaaaggtaaataatttttgtctaattcaaagcttatttaaaagtcctgtataaataagaatgtgaaaggaaccaggaaatagaccaatataaagaaaagtatagatatacagaggtatttttggtaagaaagcttaaaagaaaagtaattttgtatgagaaaaatattgtttggtgaatttttgtcctaagataaaatgaccgagttattccagaaagagtgacacttaggtcaaagcagaaagtccaagcatgttgtgaatggtctgtgtaagtcataataaagttagtaaaaaagaaatttatacaaatgttatgtgattaagttgtccataattacagaaaattataatcttttttttaaattgaacttttatgttaaaaatacactagactgggtgcggtgctcacgcctgtaatcctagcactttgggaggccgaggcgagcagatcatataggtcaggagttcgagaccagcctggccaacatggtgaaaccctgtctctactaaaaattaaaaaattagctgggcatggtggcaggtgcctgtaatcccagctacttgggaagctgaggcaggagaatcacttgaacctgggaggcagaagttgcagtgagctgagatcgcaccattgcactccagcctgagcaacaagagcaagactctgtctcaaaaaaaaatacactaataaataactaaagatttggttagaacaagattttatttaaaatattgagttactcaatgcacaaagtttttaatttttaaattctgtaatgtttctttttgaaattattcaaattgatatctcagtccttttttcgcttttgaaaaggcctaggatggtaactctctccttcaacttttgtttggccttataacttttttaaattaataatctaaagtaggggagagaatttttgaaaagaggcaaatgaaaaatcttttggacctgccgttttctatatgtctgttatatctacatgtttacatgtgccatgtggaagtgatatttcactaacaagtggtacaaaagagctctaatcaattggcttggagaatgttaatgcttatcagactgatggaacctagctcagatgccttttagctcacatgactagtaatctttggtaagattaatttggtaaatttaatctcaattctttccagtaatttaaaatcttaaagtcatgttatgtttaaattaagtaaacctaggttacttttttcccccactggggatttgggttaataagtcatgtaatgtttaaattaagtaaacctatgagttttttttccactgggaatttgagttaataagacttaaactagtaggtgaataaaaggtgtttttggtgaggtttctgaaaacacaaggatctagtttttgctaaagaaaatgtaatttttttctagagactatttatgagtcactctaaaataaaggaaaaaattatatagataaaactaaatggataaagaaaaaaataaaagggtgtgaaatgagaaatcctgactcttgagtagccatgtggttgcccatcttaaggagctgcagctgggctatagtcagttactaaaagtaaaagttaccagtggaattagagatggatcctactcatactcccagggagttagttccctgaatgcataagggaaggcaagctaataaggaagaaaaatgtttcatcctttggttattatctgtaaaagctgaaatgagagtaaaagagtgttgggttggtccttaagagtggaccaagaccagaagtgggtctgtctcagctcaagcctctagcatccaagctactcacaaaaatataaattaaaccggggcaacaaagtttacctctgagacctgtggttaccaagaagatagtaaatgtaggggcagggcaaaacaactattaaaaccagaggctataatgtaaaggaattgttccatttt

SEQ ID NO: 25144 - DNA, 7882 bp, Homo Sapiens
agggagagagttgtgctcctgccgccgagagctccaccttcgtggctctgggtccggggccccggcctgtggcggcgagcggcggccgctggagacgagcggcggcggcaggcggccagcccgggtctgcctcgctccgtgcagggccgggagagggatccgccatattggagctggggccgaaggtgccttggagccgcggcgcgaggcgggtggaggtggcggccctggcctggatcgggaaggagtcggctctgccctggcccgcaaggctggggagctaatgagcctctctggctagtctcctccccgtccactccctccactttctgccgccgggacccggctgggagccggctgtggcagtggcagtggcagtggcagcgacaggatgttctccaagaagccgcacggggacgtgaagaagtccacccagaaggtgctagacaccaagaaggacgcactgactcgcctcaagcacctgcgcatcgtcatcgagaatgcagaatctattgatcttaaacagtttttcgaccaacatttttcacatatatactatgtgttctttgaaaattttgtgactattgaagctagtcttaaacagaaaggtcacaagtctcaaagagaggaattggatgctatactttttatttttgagaaaattttacaacttcttccagaaagaattcatcagcgatggcagtttcatagtattggattgattttaaagaagctacttcacacaggaaactccttaaagattaggcgggaaggtgttcgtcttttcttactatggttgcaagctcttcagaataactgtagcaaagaacagctctggatgttttcatgcttaatccctggattttcagcaccacagtctgaacatggacctcgaactttagataatctcattaatcctccactcaaccttcaagaaactcaagtcactatagaagaaatcactcctcttgtccccccacaatcaggagataaagggcaagaagatctcacaagctattttcttgaagcacttctaaaatacatagtcattcaggtaaaaagtttagaatggaagaacaaagaaaaccaagaaaggggattttcatttttgttttcacattttaagaaatattacttgccttatatttttccaaacatctgtaaggaaaacagtttatatcatcctatacttgacatcccgcagatgagaccaaagccacattatgtcgtgataaagaaagatgctgaaaccaatgaagcaatctattgtacaaaggagcctttcattaaggctcgtgttattgtcattcgttggctggtttctttctggctggagccaaaaccacatacaggacctcatattcctgggatggaaggtgaagtcttgccaaagaatattcagagagcagctgctagtttagtatccagagaagaaagcaaaaatgataatgctgataaaacagacagaactacagaacccgaacagtctcattccaatacaagcactctcacggagcgagaacctagctcatctagtctctgtagtattgatgaagaacatctcacagacattgaaatagttcgcagagttttttcttctaaaaggagtaatgtaaactttgtgacagagatatttcgtcaggcatttttattaccaatttgtgaagcagcagctatgagaaaagtggtaaaagtatatcaagaatggatccaacaagaggaaaaacctttgttcatgcaagagcctgaagaaattgtgatcacttcttcagacctcccttgcattgaaaatgtcacagaccatgatatttcaatggaagaaggagaaaaaagagaagaggaaaatgggaccaatactgctgatcatgttcgaaattccagttgggcaaaaaacggctcctaccaaggtgctcttcataacgcctctgaagaagccacagaacaaaacatacgagctggtacccaggcagttttgcaggtgtttattataaactcatcaaatatatttcttcttgaacctgcaaatgaaataaaaaatcttctggatgaacacacagatatgtgtaaacgcattcttaacatttatcggtacatggttgtacaagtatcaatggacaaaaagacttgggaacagatgctgcttgtgttgctcagagtcacggaatctgtactgaagatgccatcacaagcttttctacagttccaagggaaaaaaaatatgaccttggcaggtcgacttgcaggaccacttttccagacccttatagttgcctggatcaaagcaaacctaaatgtgtacatctcccgagaactttgggatgacttactgtcagtattgtcatcgctgacctattgggaagagttggccactgagtggtcactgactatggagacattaactaaagttttagctaggaatttatatagtttggatctcagtgatttaccattggataagctgagtgaacagaaacaaaaaaagcacaaagggaaaggagttggacatgaatttcagaaagtttcagttgacaagtcattttctagaggatggagtcgtgatcagcctggccaagccccaatgagacagaggagtgcaacaaccactggttctccaggaaccgaaaaggcgaggagtatagtacggcaaaaaactgtcgatattgatgatgctcaaatacttccccgctcaactagagtcagacatttttcacaaagtgaagaaactggaaatgaagtttttggtgctttgaatgaggagcagccattgcctcgaagtagcagcacttctgacatcttggaaccattcactgttgaacgagccaaagtcaataaagaggacatgagccaaaaactgcctcctcttaatagtgatattggcggcagcagtgctaatgttcctgatctgatggatgagtttatagcagaacgacttcgaagtggtaatgcctcgactatgacaagaagaggaagtagtccaggcagcctggaaattcccaaagacctccctgatattctaaacaagcagaaccagatgcgccctattgatgacccaggtgtgccctcagaatggacttctcctgccagtgcagggagcagtgatcttatcagctcagatagtcattcggattctttcagcgctttccaatatgatggccgaaaatttgacaattttggctttggaaccgacactggggttacgtcctctgctgatgtggattcaggttctggccatcatcagagtgctgaagagcaggaagtggctagtctaactactcttcatatagattctgaaacaagcagtcttaatcagcaagctttctctgctgaagttgcaactattactggttcagaaagtgcttccccagtccactcacctctgggctccaggtcacagactccttccccttctacattgaatatagatcacatggaacagaaggatctgcagctcgacgagaagctccaccactctgttcttcagacaccagatgatctagaaattagtgaatttccatcagaatgttgtagtgtgatggcaggaggtactctgactggatggcatgctgatgttgctactgtaatgtggcgaagaatgctaggcattttgggagatgtaaattcaatcatggatcctgaaatacatgctcaagtttttgattacctctgtgaactttggcagaatctagctaagattagagataaccttggcatttcaactgataacctgacctccccttctccaccagttttaattcctccactgagaattcttacaccttggctttttaaggcaaccatgttgactgataaatataaacaaggtaaattacatgcatataaacttatttgtaatacaatgaaaagaagacaagatgtttctccaaatagagattttctaacacatttctacaatataatgcattgtggattacttcatattgaccaggatattgtcaatacaatcatcaaacactgctcacctcaatttttttcacttggtttgcctggtgccacaatgcttattatggattttattgtagcagctggtagagtggcttcttcagcttttctcaatgcaccaagagtagaagcacaagttcttctgggatctttggtttgctttcccaacttatattgtgaactgccttctcttcatcccaacattcctgatgttgctgtgtctcagtttacagatgttaaggaacttataatcaaaactgtattaagctcggcaagagatgagccctctggtcctgcacgatgtgtagcactttgtagtttaggtatttggatttgtgaagaactagtccatgagtctcatcatcctcaaattaaggaagctctgaatgtgatttgtgtttccttaaagtttactaataaaacagtagcccacgtagcttgtaacatgcttcacatgctggttcattatgtacctagacttcagatttaccagcctgattctcccttgaaaattattcaaatcctaatagctaccatcacccatcttttaccaagtacagaggcttcatcttatgaaatggacaagaggttggtagtatctttacttctctgccttctggactggatcatggccttacctctaaagacactgctccaaccatttcatgctacgggagcagaaagcgataaaacagaaaaatctgttctcaattgcatttataaggttttacatgggtgtgtttatggagctcagtgttttagcaatccaaggtattttcccatgagcctctctgatttggcatctgtagattatgatccttttatgcatttggaaagtctgaaagagcctgagcctctgcactctcctgactcagaacgatcttctaaactccagccagtaacagaagtgaaaactcaaatgcagcatggattaatctctatagcagcccgcactgttattacacatctggtaaatcacctgggccattatccaatgagcggtggtcctgctatgctaacaagtcaggtgtgtgaaaatcacgacaatcattacagtgaaagtactgaactttctcctgaactctttgagagtccaaatatccagttctttgtgttaaataatacaaccttagtgtcctgtatccagatcagatcagaagagaatatgcctggaggaggtttatctgctggccttgcatcagccaattcaaatgtcagaatcatagtacgtgatctctctggaaaatattcatgggattctgctatactgtatggcccacctcctgtaagtggcttgtcagaacctacatctttcatgctttcattgtctcaccaagagaagccagaagagcctccgacatctaatgaatgcttagaagatataaccgtaaaagatggactttctctccagtttaaaagatttagagaaactgtaccaacttgggatacaataagagatgaagaagatgttcttgatgagctcttgcagtatttgggtgttactagtcctgaatgcttacagagaactggaatctcacttaatattcctgctccacaacctgtgtgcatttctgaaaaacaagaaaatgatgttattaatgctatccttaagcaacatacagaagaaaaagaatttgttgagaagcactttaatgacttaaacatgaaagctgtggaacaagatgaaccaatacctcaaaaacctcagtcagcattttattattgcagattgcttcttagtatattgggaatgaattcctgggacaaacggaggagctttcatctcctgaagaaaaatgaaaagctacttagagaacttaggaacttggattcaaggcagtgccgagagacacacaagattgcagtattttatgttgctgaaggacaagaagacaaacactccattctcaccaatacaggaggaagtcaagcatatgaagattttgtagctggtcttggttgggaggtaaatcttacaaaccattgtggttttatgggaggactacaaaaaaacaaaagcactggattgaccactccatattttgctacctctacagtagaggtaatatttcacgtgtcaacaagaatgccttctgattctgatgattctttgaccaaaaaattgagacatttgggaaatgatgaagtgcacattgtttggtcagagcatactagagactacaggagaggaattattcccacagaatttggtgatgtccttattgtaatatatccaatgaaaaatcacatgttcagtattcagataatgaaaaaaccagaggttcccttctttggtcccctttttgatggtgctattgtgaatggaaaggttctacccattatggttagagcaacagctataaatgcaagccgtgctctgaaatctctgattccattgtatcaaaacttctatgaggagagagcacgatacctgcaaacaattgtccagcaccacttagaaccaacaacatttgaagattttgcagcacaggttttttctccagctccctaccaccatttaccatctgatgccgatcattaaatatcagttctgtttatctgaaggctcctacccagagattctacccagtgaaactcccacagcaacgcaggtagatggggctgacctggcctctccaatgtctcctcgaactagcaaaagccgcatgtccatgaagctgcgtcgttcctctggctcagccaataaatcctaaggagacaagcagcccagcagtgatcagcagtagccaccttagcacgaacatagggttaaccctttcaggccttcatgtctgccataacatgcatgtttcttcctgtacatttatttgagaaaacactggatttaaataattttaaataatttgtagcttaatattaaagatttaagttatttattgtttcattttttttcccacaatccaagctgccatattttgagggcagggggagttttattctacaccctttaccttcctagataattatgtctaagtagttttatctttaatttcatggttaactgtgagccaaaatacaattggacaattagtctcattatttattgtgccccattgcaactttatggttcaataaatatataattttttacaaatgtaaaattttacatttaagcatttgtaaagttacagcaaaagatgtacctgttaatacacagaatgtgtacagattatttgttatgacaataaaacactcaaaataaatggtctttagcatctcaaattccaactgaaatcattttagtattaactcttcttcccaaagcaatgtctcatttcttggctgtgcaggtgatgccatgttatatccaataactagaaaaatcactgtgctgaacttttatgtttagcttccaagtatttttctaatgttttgcatttcaagtggtatcactgttaaatgccatttgttttcagattgtggccttttattattggctgctagatcctggtgtttctatgttcttttttaagcaccaaaaagaagatggggaagaaaagaaggaaaattttctgatataaatatgttgttcaaattatgagtattatttaaaaaagaaaaaggaacataacccaggagtctaagttaaatctaatattgttaatactgaacttgcaggtccaggttggtatacattccaccctctagaagtattttcttacagtagataagctgctcacattttgttttgaatgggcatctcctgaggaaatgtagcatgacattggtactaactgcatgtgtaaatacatcatactggcaaaccgtaaaatataaattatgtatcatcattcatgtagtatctataatttgtaacagtgggggggaaagatgacatggtatttaataatacaataaaaatattcttatcacttcctatccaaaaaaaaaaaaaaaaaaa

SEQ ID NO: 25145 - DNA, 7851 bp, Homo Sapiens
agggagagagttgtgctcctgccgccgagagctccaccttcgtggctctgggtccggggccccggcctgtggcggcgagcggcggccgctggagacgagcggcggcggcaggcggccagcccgggtctgcctcgctccgtgcagggccgggagagggatccgccatattggagctggggccgaaggtgccttggagccgcggcgcgaggcgggtggaggtggcggccctggcctggatcgggaaggagtcggctctgccctggcccgcaaggctggggagctaatgagcctctctggctagtctcctccccgtccactccctccactttctgccgccgggacccggctgggagccggctgtggcagtggcagtggcagtggcagcgacaggatgttctccaagaagccgcacggggacgtgaagaagtccacccagaaggtgctagacaccaagaaggacgcactgactcgcctcaagcacctgcgcatcgtcatcgagaatgcagaatctattgatcttaaacagtttttcgaccaacatttttcacatatatactatgtgttctttgaaaattttgtgactattgaagctagtcttaaacagaaaggtcacaagtctcaaagagaggaattggatgctatactttttatttttgagaaaattttacaacttcttccagaaagaattcatcagcgatggcagtttcatagtattggattgattttaaagaagctacttcacacaggaaactccttaaagattaggcgggaaggtgttcgtcttttcttactatggttgcaagctcttcagaataactgtagcaaagaacagctctggatgttttcatgcttaatccctggattttcagcaccacagtctgaacatggacctcgaactttagataatctcattaatcctccactcaaccttcaagaaactcaagtcactatagaagaaatcactcctcttgtccccccacaatcaggagataaagggcaagaagatctcacaagctattttcttgaagcacttctaaaatacatagtcattcaggtaaaaagtttagaatggaagaacaaagaaaaccaagaaaggggattttcatttttgttttcacattttaagaaatattacttgccttatatttttccaaacatctgtaaggaaaacagtttatatcatcctatacttgacatcccgcagatgagaccaaagccacattatgtcgtgataaagaaagatgctgaaaccaatgaagcaatctattgtacaaaggagcctttcattaaggctcgtgttattgtcattcgttggctggtttctttctggctggagccaaaaccacatacaggacctcatattcctgggatggaaggtgaagtcttgccaaagaatattcagagagcagctgctagtttagtatccagagaagaaagcaaaaatgataatgctgataaaacagacagaactacagaacccgaacagtctcattccaatacaagcactctcacggagcgagaacctagctcatctagtctctgtagtattgatgaagaacatctcacagacattgaaatagttcgcagagttttttcttctaaaaggagtaatgtaaactttgtgacagagatatttcgtcaggcatttttattaccaatttgtgaagcagcagctatgagaaaagtggtaaaagtatatcaagaatggatccaacaagaggaaaaacctttgttcatgcaagagcctgaagaaattgtgatcacttcttcagacctcccttgcattgaaaatgtcacagaccatgatatttcaatggaagaaggagaaaaaagagaagaggaaaatgggaccaatactgctgatcatgttcgaaattccagttgggcaaaaaacggctcctaccaaggtgctcttcataacgcctctgaagaagccacagaacaaaacatacgagctggtacccaggcagttttgcaggtgtttattataaactcatcaaatatatttcttcttgaacctgcaaatgaaataaaaaatcttctggatgaacacacagatatgtgtaaacgcattcttaacatttatcggtacatggttgtacaagtatcaatggacaaaaagacttgggaacagatgctgcttgtgttgctcagagtcacggaatctgtactgaagatgccatcacaagcttttctacagttccaagggaaaaaaaatatgaccttggcaggtcgacttgcaggaccacttttccagacccttatagttgcctggatcaaagcaaacctaaatgtgtacatctcccgagaactttgggatgacttactgtcagtattgtcatcgctgacctattgggaagagttggccactgagtggtcactgactatggagacattaactaaagttttagctaggaatttatatagtttggatctcagtgatttaccattggataagctgagtgaacagaaacaaaaaaagcacaaagggaaaggagttggacatgaatttcagaaagtttcagttgacaagtcattttctagaggatggagtcgtgatcagcctggccaagccccaatgagacagaggagtgcaacaaccactggttctccaggaaccgaaaaggcgaggagtatagtacggcaaaaaactgtcgatattgatgatgctcaaatacttccccgctcaactagagtcagacatttttcacaaagtgaagaaactggaaatgaagtttttggtgctttgaatgaggagcagccattgcctcgaagtagcagcacttctgacatcttggaaccattcactgttgaacgagccaaagtcaataaagaggacatgagccaaaaactgcctcctcttaatagtgatattggcggcagcagtgctaatgttcctgatctgatggatgagtttatagcagaacgacttcgaagtggtaatgcctcgactatgacaagaagaggaagtagtccaggcagcctggaaattcccaaagacctccctgatattctaaacaagcagaaccagatgcgccctattgatgacccaggtgtgccctcagaatggacttctcctgccagtgcagggagcagtgatcttatcagctcagatagtcattcggattctttcagcgctttccaatatgatggccgaaaatttgacaattttggctttggaaccgacactggggttacgtcctctgctgatgtggattcaggttctggccatcatcagagtgctgaagagcaggaagtggctagtctaactactcttcatatagattctgaaacaagcagtcttaatcagcaagctttctctgctgaagttgcaactattactggttcagaaagtgcttccccagtccactcacctctgggctccaggtcacagactccttccccttctacattgaatatagatcacatggaacagaaggatctgcagctcgacgagaagctccaccactctgttcttcagacaccagatgatctagaaattagtgaatttccatcagaatgttgtagtgtgatggcaggaggtactctgactggatggcatgctgatgttgctactgtaatgtggcgaagaatgctaggcattttgggagatgtaaattcaatcatggatcctgaaatacatgctcaagtttttgattacctctgtgaactttggcagaatctagctaagattagagataaccttggcatttcaactgataacctgacctccccttctccaccagttttaattcctccactgagaattcttacaccttggctttttaaggcaaccatgttgactgataaatataaacaaggtaaattacatgcatataaacttatttgtaatacaatgaaaagaagacaagatgtttctccaaatagagattttctaacacatttctacaatataatgcattgtggattacttcatattgaccaggatattgtcaatacaatcatcaaacactgctcacctcaatttttttcacttggtttgcctggtgccacaatgcttattatggattttattgtagcagctggtagagtggcttcttcagcttttctcaatgcaccaagagtagaagcacaagttcttctgggatctttggtttgctttcccaacttatattgtgaactgccttctcttcatcccaacattcctgatgttgctgtgtctcagtttacagatgttaaggaacttataatcaaaactgtattaagctcggcaagagatgagccctctggtcctgcacgatgtgtagcactttgtagtttaggtatttggatttgtgaagaactagtccatgagtctcatcatcctcaaattaaggaagctctgaatgtgatttgtgtttccttaaagtttactaataaaacagtagcccacgtagcttgtaacatgcttcacatgctggttcattatgtacctagacttcagatttaccagcctgattctcccttgaaaattattcaaatcctaatagctaccatcacccatcttttaccaagtacagaggcttcatcttatgaaatggacaagaggttggtagtatctttacttctctgccttctggactggatcatggccttacctctaaagacactgctccaaccatttcatgctacgggagcagaaagcgataaaacagaaaaatctgttctcaattgcatttataaggttttacatgggtgtgtttatggagctcagtgttttagcaatccaaggtattttcccatgagcctctctgatttggcatctgtagattatgatccttttatgcatttggaaagtctgaaagagcctgagcctctgcactctcctgactcagaacgatcttctaaactccagccagtaacagaagtgaaaactcaaatgcagcatggattaatctctatagcagcccgcactgttattacacatctggtaaatcacctgggccattatccaatgagcggtggtcctgctatgctaacaagtcaggtgtgtgaaaatcacgacaatcattacagtgaaagtactgaactttctcctgaactctttgagagtccaaatatccagttctttgtgttaaataatacaaccttagtgtcctgtatccagatcagatcagaagagaatatgcctggaggaggtttatctgctggccttgcatcagccaattcaaatgtcagaatcatagtacgtgatctctctggaaaatattcatgggattctgctatactgtatggcccacctcctgtaagtggcttgtcagaacctacatctttcatgctttcattgtctcaccaagagaagccagaagagcctccgacatctaatgaatgcttagaagatataaccgtaaaagatggactttctctccagtttaaaagatttagagaaactgtaccaacttgggatacaataagagatgaagaagatgttcttgatgagctcttgcagtatttgggtgttactagtcctgaatgcttacagagaactggaatctcacttaatattcctgctccacaacctgtgtgcatttctgaaaaacaagaaaatgatgttattaatgctatccttaagcaacatacagaagaaaaagaatttgttgagaagcactttaatgacttaaacatgaaagctgtggaacaagatgaaccaatacctcaaaaacctcagtcagcattttattattgcagattgcttcttagtatattgggaatgaattcctgggacaaacggaggagctttcatctcctgaagaaaaatgaaaagctacttagagaacttaggaacttggattcaaggcagtgccgagagacacacaagattgcagtattttatgttgctgaaggacaagaagacaaacactccattctcaccaatacaggaggaagtcaagcatatgaagattttgtagctggtcttggttgggaggtaaatcttacaaaccattgtggttttatgggaggactacaaaaaaacaaaagcactggattgaccactccatattttgctacctctacagtagaggtaatatttcacgtgtcaacaagaatgccttctgattctgatgattctttgaccaaaaaattgagacatttgggaaatgatgaagtgcacattgtttggtcagagcatactagagactacaggagaggaattattcccacagaatttggtgatgtccttattgtaatatatccaatgaaaaatcacatgttcagtattcagataatgaaaaaaccagaggttcccttctttggtcccctttttgatggtgctattgtgaatggaaaggttctacccattatggttagagcaacagctataaatgcaagccgtgctctgaaatctctgattccattgtatcaaaacttctatgaggagagagcacgatacctgcaaacaattgtccagcaccacttagaaccaacaacatttgaagattttgcagcacaggttttttctccagctccctaccaccatttaccatctgatgccggctcctacccagagattctacccagtgaaactcccacagcaacgcaggtagatggggctgacctggcctctccaatgtctcctcgaactagcaaaagccgcatgtccatgaagctgcgtcgttcctctggctcagccaataaatcctaaggagacaagcagcccagcagtgatcagcagtagccaccttagcacgaacatagggttaaccctttcaggccttcatgtctgccataacatgcatgtttcttcctgtacatttatttgagaaaacactggatttaaataattttaaataatttgtagcttaatattaaagatttaagttatttattgtttcattttttttcccacaatccaagctgccatattttgagggcagggggagttttattctacaccctttaccttcctagataattatgtctaagtagttttatctttaatttcatggttaactgtgagccaaaatacaattggacaattagtctcattatttattgtgccccattgcaactttatggttcaataaatatataattttttacaaatgtaaaattttacatttaagcatttgtaaagttacagcaaaagatgtacctgttaatacacagaatgtgtacagattatttgttatgacaataaaacactcaaaataaatggtctttagcatctcaaattccaactgaaatcattttagtattaactcttcttcccaaagcaatgtctcatttcttggctgtgcaggtgatgccatgttatatccaataactagaaaaatcactgtgctgaacttttatgtttagcttccaagtatttttctaatgttttgcatttcaagtggtatcactgttaaatgccatttgttttcagattgtggccttttattattggctgctagatcctggtgtttctatgttcttttttaagcaccaaaaagaagatggggaagaaaagaaggaaaattttctgatataaatatgttgttcaaattatgagtattatttaaaaaagaaaaaggaacataacccaggagtctaagttaaatctaatattgttaatactgaacttgcaggtccaggttggtatacattccaccctctagaagtattttcttacagtagataagctgctcacattttgttttgaatgggcatctcctgaggaaatgtagcatgacattggtactaactgcatgtgtaaatacatcatactggcaaaccgtaaaatataaattatgtatcatcattcatgtagtatctataatttgtaacagtgggggggaaagatgacatggtatttaataatacaataaaaatattcttatcacttcctatccaaaaaaaaaaaaaaaaaaa

SEQ ID NO: 25146 - DNA, 5224 bp, Homo Sapiens
gagagcgcgacggcggcggcggcggcggcgcagctattgctggacggccagtgggagagcgaggcctgagcctctgcgtctaggatcaaaatggtttcaatcccagaatactatgaaggcaagaacgtcctcctcacaggagctaccggttttctagggaaggtgcttctggaaaagttgctgaggtcttgtcctaaggtgaattcagtatatgttttggtgaggcagaaagctggacagacaccacaagagcgagtggaagaagtccttagtggcaagctttttgacagattgagagatgaaaatccagattttagagagaaaattatagcaatcaacagcgaactcacccaacctaaactggctctcagtgaagaagataaagaggtgatcatagattctaccaatattatattccactgtgcagctacagtaaggtttaatgaaaatttaagagatgctgttcagttaaatgtgattgcaacgcgacagcttattctccttgcacaacaaatgaagaatctggaagtgttcatgcatgtatcaacagcatatgcctactgtaatcgcaagcatattgatgaagtagtctatccaccacctgtggatcccaagaagctgattgattctttagagtggatggatgatggcctagtaaatgatatcacgccaaaattgataggagacagacctaatacatacatatacacaaaagcattggcagaatatgttgtacaacaagaaggagcaaaactaaatgtggcaattgtaaggccatcgattgttggtgccagttggaaagaaccttttccaggatggattgataactttaatggaccaagtggtctctttattgcggcagggaaaggaattcttcgaacaatacgtgcctccaacaatgcccttgcagatcttgttcctgtagatgtagttgtcaacatgagtcttgcggcagcctggtattccggagttaatagaccaagaaacatcatggtgtataattgtacaacaggcagcactaatcctttccactggggtgaagttgagtaccatgtaatttccactttcaagaggaatcctctcgaacaggccttcagacggcccaatgtaaatctaacctccaatcatcttttatatcattactggattgctgtaagccataaggccccagcattcctgtatgatatctacctcaggatgactggaagaagcccaaggatgatgaaaacaataactcgtcttcacaaagctatggtgtttcttgaatatttcacaagtaattcttgggtttggaatactgagaatgtcaatatgttaatgaatcaactaaaccctgaagataaaaagaccttcaatattgatgtacggcagttacattgggcagaatatatagagaactactgcttgggaactaagaagtacgtattgaatgaagaaatgtctggcctccctgcagccagaaaacatctgaacaagttgcggaatatacgttatggttttaatactatccttgtgatcctcatctggcgcatttttattgcaagatcacaaatggcaagaaatatctggtactttgtggttagtctgtgttacaagtttttgtcatacttccgagcatccagcactatgagatactgaagaccaaggattcagcattagaacatctatacatatggtgatctaaatgtacaaaatgtaaaatgtataagtcatctcactttttgtcaagacattaaaccatcttagatcggagtgtgaagtaaattatggtatattttatgtaacattttaatgtttatgctcataaaacttagtgaacacactgtgttatgccagctcaaatctacagtagccaccaaaaccatgacttaatattttgagccctagaagaaaggggtgtgctgaggacaagagtggggaaataggaacactgaccagtataactgtgcaattctggaacatattaattaaaataatatgccttaacatatagtgaatttctaattctaatgttcagtgcaatggaagacatttatttggacagtaatactagcaaagttggtagatatttgattcttcattttttgtttttttcattagttgaagtgggttttagttttgtttaaaattataaccagcgtattttcacatcattctgtaagttaaatgatatcaaacatgaaagagatgttctcatttttctttttctgattaaacgtctgatgcatatcatttttctataagtaatcagttgcttttaaaatcagaaggctatattattctaatgaccctattcgatctaaatgggtttgagaatccatatcagcaacatacgtgttttttgacagaaagtgaaaacaaattccgtaaaactgttagtatcaaaaagaataggaatacagttttcttttccacattatgatcaaataaaaatcttgtgagattgtttatgttttgaagcaggaggatttcttgagatttgatggaagtgggagttgggaaggattcaccatacttgtgttctcctccctttataaattttattcataggacttttaaaaggcttgtgctatctttccagtgaaaactgaaagtgcattattatggaagaatgtatttgcaggtagtaatagcattaaaaaatatactcgtgtgtaaacacatactaattttgaccttgaaagatgaattccttcaagaaaaataaaataatgcttaagataatgtgtacgaaattaaataaaggactttatttacatactacataaggtagcaaactgttgaatgagtttgaaggtatcacttattttttatgcatgtggttttagctttagaaagaaatgcgttatagaaacaagtaatagcaagaaaattgatgtatattttaatgatacattaaaattcccttttaatcataatagttaactctacttactgttttaacatacatttgatttaacaaattgttcagcataacacttctaattaagtttatcaagttgtactgtattagataatcagcagtgtatctggagtatgtttaaagagaacagttcgcaatacaaaaagttacatggagctttacatcttaactttctttgtcaatttaaatgcaatgtataaaaagtttattttgctattgtgaaaaactaaatgtaaaggaaatcacctactttcatgcaggtgtataatcttgaaaaggaaaaatgcttccatgttgaagccagattttctgtagtaaaacttttaaatattattttaaaagaaatatgtatataaatatctctatattctttggaatgatactaaagtctctggtctaggaccataccttatataaaggtataagagaccatgacaatgtctgaaaatggaatagataatgatgccttttatttaaagtggcccacataatatacattgagtactccatctctccaaatgtatttccataatgtgttgaaaacatgctaacatttgtatgatttttatacttctgccgaatagacttagaatcagatgaattgtctgtgtgtcttgcaaaagagttggggacaacttgggcaggcctatgaagtgcatagggagtgtatgtcttctgaatggttttattgttcttgtaatctagcttaaagaaatgttaactgggagggtgctgaggccactcactgcattaattttgtgtgtttagagttctgttgtcaaaagaaaactaatgaataaattagtttgtcattctagaatttaaagttctaagattagtataaagagtatatagattgttaatccccaccagctagactttgaacttaagtcagacttaaagatttgagaaattatttgtgtcatttactagacgtgatttttagttctgtttgattatatttcctacacaaacttcttatttaacaggatagcctactaaattaaatgtttcttatttcacttaactcatttgattaaactgtattctaaaacatttggggtttttccccctattcagttttaatcttggaatatgcatttgtaaattgtgatgtcattgagactatatttatatttgacttggcaacattaacatgtcctaagacttagtgcagagaagcttggcagtacgttctttgacttaaggatggcataaaataatcatttttgaacctgtgtaataaagcttgaaagcagggaaaagaatttccttttcccccttttttgtgttgtctataggaattaacttgggattgttttgtgggtttttgtttgttttaaatgtaaattgagaatcttttataagaaataaaagcattattgggtgcctttgtttgtaaaccaaaaagtaataaatgaatccctatatttccattatagtatttattgtatttttatgttctgaaaattacccatggaacaatatgcttaggattacaggaagcagtccttacttacacttcttgtctgttttaggtgtacttgttaattcttatgtcctaattttatttaattctgagttccttacacagcattttagggaaagaatacaggcaggatgacactttgtgttaaagtgttatttttatgtattacctggaatgaggcaggtttttttctgttttctaaaaagagtaaccaagatacctccagggtgtcattgggttccagctgctctcctccacattgaatgatatcttgttaatttataggcacatttgtggtaatttatatgtctatagagtaagtataagagataattcattagtaataggaattaactgaccccttttggatgggggagagcatcaggctggggtcaggtaagtgtaaatggccttctgagcatgctcttctaggctgactcccagccctgacttgaaaccattagcgctaacttgctctgttttgagaaaaactttccaaacttttgcatgagaaactagaaaaaggaatgtatgccacgtaactggattacagaaatgagttaattgtctctgtgataaaaaaaaaaatgaaatattttcttattgaattaatatttttgtcttgaagcattttctagtgatagaatgtatttgtcttttttcctggtggtaccctcttagcatatatctttgctatccttaagatcctaaacaaatcatctttgtcagttaagtatagttgcgcaaaaattgttaaatcctttgtctttattaaagaaaaatttgagtaacattaaaaaaaaaaaaaaaaa

SEQ ID NO: 25147 - DNA, 1383 bp, Homo Sapiens
gctcaggccccgccctcagacgagcaccgcccgccggctcctcccgcggctcgaatcgccgtctctctcctccccgccccgccgagttctagaattcgccgcgcagctgcttcagcccctcagccccagccggaccctcgggtcctcatccaccctcgcaggcgcaggccgtggctaccccgaagtcaactgtggaggatccttcctggcttccttcagctccatcctgcccttggatctaggtcacccgcttggacccaactatctgaggcccgaatgccccgcagctcccgctgctccctcgcgttctgctgacccccctccgagtcaggacatcccctttagaccccactttaggccctttcagcccaactccaactagccccatctgccgcttccgcacgcaccaaaaaggagactaactacccagccccgtccagtcatgcaggtgcaggatgatggagtcaacctcatcccctttgccaagtgttccagggtggtcagccgatctccacccccaaggttgccttcccagagcctcagacccatgccccagcgttatggagatgtcttctggaagaaccttaatcaaaggcccacccccacttggctggaggagcagcacattccacccatgctgctcccaccccctgaaatgctttggagaagaaagaagaggaggccatgtttggaaggaatgcagcagcagggccttgggggagtccccgcccgggtgagggctgtcacttaccacctggaggacctaagaaggcgtcagagcatcatcaacgaactgaagaaggcccagtggggcagctctggggctgcatctgagccagtggtgcttggcgaagacggctgtggattccccagcaccaatgaataccctgatctggaagaggagagagcaacctatccacaggaagaggaccgttttctcactcctggcagggcccagctgctttggtctccctggagccccctggatcaggaggaggcttgtgcctccaggcagctgcactctctggcctcgttcagcactgtcacagccagaaggaacccccttcacaatccctgggggatggagttggcagcgtctgaagagtaaggagaaaccaccaatgccgagaggctagtggtgccccagggacccaagactagttccgtcactagagtcaccctcattgctgacatgaaggcgtttccccttccttcgtctctccaactgcctttcccatcctctgaactaggcattaacagcccccgtgggctcccatctcaacccaccgctctcacaggagcaccccaagtcctgttttcctccaggccccgctcctggccttgtattctctctgctctgttattaaaaagcaagcaagtgga

SEQ ID NO: 25148 - DNA, 3191 bp, Homo Sapiens
ggggccttggagccagagagacgcagctaggcctccacggctgtggagagatcctgccacgggccttgttcaccatgtcggtgctggatgcgctttgggaggatcgggatgtccgtttcgacctgtccgcgcagcaaatgaaaacaagacctggagaagtccttattgattgtttagattccattgaagacaccaaaggaaataatggagatagaggtagactcttggtaacaaatttaagaattctctggcactctttggcattatcaagagtcaatgtttctgtcggttacaattgcatattgaatattacaacaaggactgctaactctaaattacgaggccaaactgaagctctctatatactaacaaaatgtaacagtactcgttttgaatttatatttacaaatttggttcctggaagccctagactttttacttctgtgatggcagtacacagagcttatgaaacttctaaaatgtatcgtgattttaaattaagaagtgcactaattcagaacaagcaactaagactgttgccacaagaacatgtatatgataaaataaatggagtttggaatttatccagtgatcagggcaatttaggaaccttttttattaccaatgtgagaattgtgtggcatgcaaatatgaatgatagttttaatgtcagtataccatatctgcaaattcgttcaataaagattagagattcaaaatttggtttagctcttgtcatagaaagctctcagcagagtggtggatatgttcttggctttaaaatagatcctgtggaaaaactacaagaatcagttaaggaaatcaattcacttcacaaagtctattctgccagtcccatatttggagttgattatgagatggaagaaaagccccagccgctcgaagctctgacagtcgaacaaattcaagatgatgtagaaatagactctgatggtcacacggatgcttttgtggcttattttgctgatggcaataagcaacaagatcgtgaacctgtattttcagaagaactggggcttgcaatagagaaattgaaggatggattcaccctacagggactttgggaagtaatgagttgattgaccttgagttgagatggatttctattaaagatatctctagtttaaagatactagtcacctgccataagtcatggaatagtttttatatttacagcttttatatttaaaacttgtaagagtttttttaatgattgaggaaaaagtcatttagaaaacttcagttttcggccagcgcgtcgagggaggggccagcgacacatggcctagtaaccgtccggccgcggcgctggcttaagccatggctgagggtagctggattcctcaggcccgggcgctcctacagcagtgcctgcacgcccggctgcaaattcgcccagccgatggggacgtcgcggcccagtgggtggaggtccaaagaggactggtgatctacgtgtgctttttcaagggagctgataaagaacttcttcccaaaatggccgaagctggactgtactgctgccatctctggctcactgcaacctccctgcctgattctcctgcctcagcctgccgagtgcctgcgattacaggcgcgcgccgccacacctgactggttttcgtatttttttggtggagacggggtttcgctgtgttggccgggctggtctccagctcctaaccgcgagtgatccgccagcctcggcctcccgaggtgccgggattgcagacggagtctggttcacttagtgctcaatggtgcccaggctggagtgcagtggcgtgatctccgctcgctacaacctccacctcccagctgcctgccttggcctcccgaagtgccaagagtgcagcctctgcccggccgccaccccgtctgggaagtgaggagcgtctctgcctggctgcccattgtctgggacgtgagcagcccctctgcctggctgcccagtctggaaagtgaggagcgtctctgcccggccgccatcccatctaggaagtgaggagcgcctcttcccacccgccatcccatctaggaagtgaggagcttctctgcccggccgcccatcgtctgagatgtggggagcacctctgcccggccgcgaccccatttgggaggtgaggagcaactctgcccagccgccccgtctgagaagtgaggagaccctccgcctggcaaccgccccgtctgataagtaaggagcccctctgcccagcagccgccccgtctgagaagtgaggagcccctctgcccagcagccaccctgtctgggaagtgaggagcgtctccgcccggcagccacccagtccgggagggaggtggggggggtcagtcccccgtccggccagccgccccgtccgggaggtgaggggcgcctctgcccagctgcccctactgggaagtgaggagcccctctgccccgccagccaccccgtccgggagggaggtgggggggtcagccccccgcccggccagccgccccgtccgggagggaggtggggggtcagccccccgcccggctagccgccccgtccgggaggcgaggggcgcctctgcccggctgcccctactgggaagtgaggagcccctctgcccggccagccgccccgtccaggagggaggtgggggggtcagccccccgcccggccagccgcccggtccgggagggaggtgggggggtcagccccccgcccggccagccgccccgtccgggaggttaggggcgcctctgcccggccgcccctactgggaagtgaggagcccctctgcccggccaccaccccgtctgggaggtgtacccaacagctcattgagagcgggcgatgatgacagtggcggctttgtggagtggaggtggggggaaggtggggaaaagattgagaaatcggatggttgccgtgtctgtgtagaaagaagtagacatgggagacttttcattttgttctgtactaagaaaaattcttaccctaaaacttaaagtataataaaaaaaaaaaacttcagttttctaaaaattatatttaaaattgtaatcaaaatgtacctagtttataaatgtttattttgtacttaatacctgtaaagtcttagttttcagacattaagtgactgtatcatgttcggtttaataaagaatttatgcagcaccaaaaaaaaaaaaaaaaaaa

SEQ ID NO: 25149 - DNA, 3184 bp, Homo Sapiens
gtacctgggagttgggttggggcggagcggaggggaggccgtgccaggcagggccggttcgtgcggaaccgccatggccgagccggcttcggtaactgtgacatttgatgatgtggccttatatttttcggaacaagagtgggagatcctggagaagtggcagaagcaaatgtataagcaagagatgaagaccaattacgagacccttgattccctggggtatgctttttccaagccagatttgatcacatggatggaacaagggagaatgctattaatcagcgaacagggatgcttagataaaacaagaaggacaactagccctcctactgatgaacagttgaacatgaagaatactggaaagttgctatgttttgatgacgaaggaactcccaggacaaaagaagaggattgccgtttaaatggtcctcaaaaacaggacttgtgtgctgccttacgagggaaagagagaaagattttattagctcaaacagccaccttccagtctccaagtctccgagaaacagagattctaaataaaaaagtcagcatcacagcatatgatccagacaagaaagacctgcggcataagcctcgggagaccccagggcgcttagaaattcccacagggccaagatgctattcctgctatgtctgtaggaaagtcttccaagtaaggagggatttgctaaagcacaaacggagccactccaagagccagctctgcagatacccaaagtacaaaaactcgtccagagggaagtccgaactcaggcggacgcagaggctcctgtgtcagaagaagcggttccagtgcagtgagtgtgagaagagctacttcctgaagggcagcctcgtcactcatcaggttgtccacaccggccagcggccctacccatgccctgagtgcgacaagaccttccggtacagggccaacctgaagaagcacctgtgtctacaccgcggggagcggccgttctgctgcggggagtgcggccgggccttcgtgcagcagtgcgagctcacggagcacttgcggctgcacagcggagagaagcccttccagtgtccgcagtgtgaccggtgcttccgcctgaagaggggcatgaaggtccatctgacccagcacagcgggaagaggcccttccactgtcccgagtgtggccggagcttctcccggaaggctgccctgaagacccaccagaggacgcacagcgaggaaaagccgttttcttgtggtgaatgtggcaggaaattcatctacaagattaagctggacgagcacatcagagttcacacgggagagaagcccttttcgtgtcccgagtgtaacaaaagtttccgcctcaagagaagcctgaaagcccacgggctgcagcacattgggaagcggcccttccagtgcccggagtgcagcaggggcttcttctggaggaacgccatgcgcgcccaccagcgcctgcacagcgagcaaaagcccttcccctgcgccgagtgcggcaagcgcttcacgcggccttccaagctcgcctgccacaccagagtccacgacaggcagaaggagtttccctgcggcgagtgcaaaaagaccttttctcagcagtcgcggctcacgcagcacctgaaggtccacaccacggaaaagccgttctcctgcgccgagtgcggccgcagtttccgccgacgcgcgcatctcacagagcacacgaggcttcacagtggcgaggagcccttccagtgtcccgagtgcgacaagagcttctcctggaaggcctccatgaagttccaccagcggatgcacagggacgagaagcccttcgcgtgcggtgagtgtgacaagacctacacgcatcagtctcagctcaccgagcacctgaggctgcacagtggagagaagccctaccagtgtcctgaatgcgagaagactttccgcctcaagggaaacctgaaaagccacctgctgcagcacagtggccaaaagccattctcttgtgtgatgtgcggcaaaagtttcactcaacagtaccggctcacagaacacattcgagtccacagcggggagaagcccttccagtgtccggagtgtgacaagagctactgcatcaggggcagcttgaaggtccacttgtataagcacagtggagagaggcccttccagtgtcccgagtgtggcaaaggcttcctccagaagagaagcctgaaggcccatctgtgccttcacagtggggagaggcctttttcttgtgatgagtgtggaaggagcttcacgtacgtgggggcgctcaagacccacattgcagtgcatgccaaagagaagccctccagcctctaggtcaggccatgcagcagtcacgcagtcggctttcaggaggtgccagcagctctgttggctcaagttgaggcaggttgaaggattcacagggtaagatcgggcacagtggctcccgcctgtaatcccattactttgggaggcccaggtgggaggatcgcttgagcccagaagtttgagaccagcctaggcaacattgcaagactccatctctacaaaaaatataaaagtcagccaggcgttgtggtgcatgcttgtggtcccagctactttgggaggttgaggcaggaggatcgcttgagcccaggaggcagaggctgcagtgagccatgctcacaccactgcactccagcctgggtgacagagcaagatcttgtctcaaaaaagaaaaaaaatcacaaaatactggctacagacacactggacaggtgtgtggtctgcagaactctatggctccttgacaaaagttccaaataatccatagacagtcaaagagacatctccctcaataatcgtcataggaaagacgtgccagttgtggaggaaacattcacactgatctgctagtccaacgatctcttcagtgtcatccaataatcccttcattaaattcagaaactacagcctgagtgaagaaatgttacagccaggaacatattcctcagtcagcttttccattaccaggccattttacttaaatctgtattaaagtcttcagttttctctcatagtggattttcattttctctcagatggtgagagggcttctgtttcttggaatgtttccatattgctaaaaataaatgtcttccactatctcatttgttaaaaaaaaaaaaaaaaaaaaaaaaaaaa

SEQ ID NO: 25150 - DNA, 170869 bp, Homo Sapiens
ttgtatttgttaggtcataattcattcctcatgatcacaattttaagcaggagagttatataaaagatttttgtaaattcattttggaaaataacaagaaggtgttcaactatatctggcttctctgaaagtgtagattggagttcattagactatttactttgtgcaattaaaagtttatgaactgaatgagaactctgacttctatttctaacgcactttttaatgaaaaattgttggggaatttgaatttagattatgcaagaattttaaatcagcatcttcggaaatacaacaacatctttggatttatttagccttttaaacaaagtgggcaagtttatcgagagattcatatactttgtttttccctatctttcatataagaaatactagattttttttcaataaaataatttgaggcctggcgcggtggctcagcctgtaatcccagcgctgtggcaggccaaggcagggcggattgcttgtgctcaggaactggagacgagcctggccaacatggcaaaacccggtctctacaaaaaatacaaaaattagccgggtgtggtggcgcacgcctgtagatccaactatttgggagaatgaggcacgagaatcgcttgtactcgggaggtggagattgcagtgagcagagattgagccaccgcactccggcctgggtgacagagcgagaccctgtctaaaacaaaacacacattaaaaaaaaaaaaaccacaaacaaaacctgcaattggccctcgaagggctggttccctcagtcagctctgcacgggtgcgccccctttctccctagaggtcaacaagcgactgcgaaggaaaacgccgccacaagtttcttgctgtttctggagagacctctcagagcgcatgctcttcggatagtcggtctgtagcgccattttcgtatggaagggactgcactctgattaggtacagccttaggacgcccagcgttcaagttgttcaaacagtacgtagagcctcgcagagacaagtcaatggcctcttttagcgggactcctgcctggagcgcttcagctgagactatgtaaagaaattcctttgtgttaaccttcctccttggaccagtggactctcctctctctcctgttccctccgcgcccgcccaggctggctcagcggtctcgccccgcccctccgggaccggagcactgtaaagattaggcatctgtgatgcttttgcgctcacattggcggcccagatgagagggcgtggagaaccagatgggaaactttttgtcccgtgagaacaaagtacaagttatatcagagtctggtatgtgtagaggaaaccaatacatgtactgtgagctaggagctggtgcttctttttcaattgtattttttataaagatgcagaccccctcagtgttgggcgtggggggtggctgaaatgttagctagaggcgaggcagggcacggagatctgaggtttttacgagtgtgtgtgtgtgtgtgtgtgtgtgtgtgtgcgcgcgcgcgcgccctacaagagtttagaagagcatgggtgagtgggcgagaaagaaagagaatgagagagagagagaaaagaaatctggagtgggacaagacttagagggtgcagaaaagaaagggggcgccagcacatcctagcctccgaggccgcgacagcgcctttggcgatgtccactctcaaccccgccgtttcattcataagtttctggcctacaggccccgcccgctcccctgggccgagggccccgtttcctgaacagcaattggtggacggcaacaaagccttagcaaccggctcctagtgacccgcggggcgcctggtaactggggctgctgcggagaaaggagcggggctgtccctttaagggatggccgcggagtcgtgaaagtggagggggctgagggagggcggggaggaaggtctgggggcggacccagggggaggaggaggaggaagagtaactgctgaaaggaggtggcgaaggaggatccggagcagctgctgccagcccgcgggcactgaagtcctcccggctgccgctcgagtagccacgggcgcgatcgggaccagaagtctcctcctccatgatcactttggaagccgggggaagactttgccctgccctgagagctggtctgcgtttcccaggcgcggcggcggcggagcagcagctgcagcagccgagtccaaataggagcggccacagccaggggcgtgtgcgccccgcgcggagcgagctcgggttcccctcggaatgtccccggggcgcccggcgcgctgaccccgaagccgcctccgccttcggcgcctgctgcctccctcggccaggcttgttgttcgggactgtgagcttcctggctcctgggcagtggggaagcccccgggggcgagtgacctcagctggccacgacccagccctcccccgtgcgtatctcgcttaagatggcagcggagtcaggggaactaatcggggcttgtgagttcatgaaaggtgaggagcagccgccccgcatcttccaacgctttcttgcccccaactcttcacttcccgcgccactgtccccaccttctcctgaggctgccagtgtcctgcagccgctgcgcgcgctctcgtcccctctagggactctcctttctccgaggaccccctgcttccggcttctctttcttgtgtcccttgctccctctgcagctccctcggatggcctctcggcctcgtaatgggacagcaccggcttctgcccgtactccggcactcagcagctcatggggagcctgctccggatgctcaccggtcacctttactccaccatcgcaggcttcggttttcgggacacccccaaccacaccccccaagtctctctcccttcctctttttcaaatctccgaagctgcgtcgggaggctcacctctttcttccccttctcgcagctgctgaggtctggagatttgggaaccaaacttgcacctccagttctgcgggtacccccagctcctgcctactctgctggcctgaaacaagggaaatgtgggtgctctgagccccgctgagttcctcggtcaggtcctcctcttgcctaactgttgtgctcttgagtctctagctttctgggagggatgaggtttctgcaagaattccacgtgttaatggggtctttaaattgtgatccttcgtatgttaccacccaccttcacttccacttctctacttctcatatgttttttctgtcttttaaacttgtctttcagatcggttatattttgctactttaaggaatagaccaaaaagcacagtaaatacccactatttctccatcgatgaggagctggtctatgaaaagtaagtttatgttttgtttttttttctcttggccattcagcttgttctttgacgaggaaacactatgcacttttatggcagttttattcatttcccccccaatgatacgagtaacaatatcaattttttaagactcaggtgcctggggagaagttcagagaaaattgacagaatttgaacctttcaacacttcagttcttttagacatctatctgttttagttcttcctaccaccacaacaaacagcaactggagattcctaacattccccagagtaggaccagggagacacactgtcattgccagactcagtaattggcctgtgaatcagtcactaagtatttatggagtggccatagggtacagggcagtgcatgtattacaggtgcttgagctttatagtttacaagacttctgttctatctcaggatgtttttgtttgtgcagctctttttcagaaagtgggacacattaactgcggggagctgtatcagagtcacatttatgactaacattttatctgacatattattgattcttttatttgggtaccccaaactttttgatattattttctttgcttctaaggaaatgatatagcagtgctgatttattttctttgattactttgcttctgtgggattaggatttgagagtgtaaaataaaagtagggaactgttttctgtgaaagaccactgatctacaggaaaaagatatcttaatacttcaggcatagtaaaacattaattgaagagagataaatctttattcagtaaaagtatcagataataagaaataagaaggctgaattgacttggttatgtacttttatgaaaagagctggtgtttcagaggagtctaatatattctattttaaacgtttaaattacttgttatctttaccaaatgtgcagataaatgaacatagttaaattaatcataattagcttccttggacttgtcttgttagaaaggttattggcagttctgcctaaggatttgtgggtactaccaggtcttcgaagagtaagtgttctggaccttcaagagcatatcttttatttgggggaaaacaatctttgtcacttcatcatagaggttcttgaaactgaggtctgcgacatttctcttagtggtgctgggaggagaatgcttcttgaatggctaaagtaagagtgggaatgaaagagccctttgctgctgctcatgaatgcccagagttgctgaggcaaagaggtctgagtccctggtgtcagattacagctctgcttctagacaggatggagttatgtgcggctgtgtacctggatgatgtcactgccagcagtgtttattgagtgttcactctgttgttgggaatgtgcattgttgtgcctctgtttttgtgattttaggttttgggggtctctcatgagtctgagagtggggatggtgtatatatcattatgttcaattctacagtacagtggttgttaatatgtcattgaatgagctctagccatggagatctgagtcacttctcttgggattgctaggtggtagatctagcagaaaattaagccaaactaaacactgtgcatgatggctttttgattttaatattgatagatgagggaaatttttaatgtgattttcatgttggtattttgggataggcctacaaatcatattcctcttatagtctactgtttttctggtatcttataaggaaagacttgctggagaatccatccaatttatattgtgagttgggattgacatttgaaatacgatgaggacttcagcctgggcagagtgtgtacttttcttagtttgaacttaccctactgtgccacagtaatggctgtggctctgacacctccaactccatcttttttgttaccccaacatattacatggtgctaggtgatgcagagaataaaacaatgttgaatgcatatgttaccttcaaagagctccaagcctgtagggaaaataacagaactgcagtttgaggtataggaaagatacctgcccaaagagaaatacaacctctatgctaggagaggcattcacaggcaggtaggggcacatctggtggaagcgttcagcaaaggcttcgtggaagagttaagattggcttgaaggatggacaaggtcttatcaggcagagacatgagaggagggatcttggaaaacagcaagtgtgaggaggggagaggcttgggacgtgtgttcagggaacagtaagtcctccagtttgcctggtgtgtattcagggaacatgtaggggatggagaatgtgaaattgagatgttggctggggacagaatgaatgtcagggtgagaaacctgcagtttctttggtacaccatgggactcttgagggatttggggcagccatggtatgacttgatttgtgctaattacaaacaatgggaaacatttattgagcatttaaatgtgtgccagatgctgttctaggtgctctataactattaattcattgtgttttcacaacaattctgtgagacaggcactattatccttattgtacaaaaaggcatagagaagctgggtcacttgcccaaggtcacagaagtaaaagtagcagagctggagtttgaaaccaagtcatctagttgcagaggacatatatccttctcaaaaaattaatacagtagcatcatttaagaggggttgttaaggagataagagcccacttaaaaaaattcaggggggaccaggcatagtggctcacgcctgtaatcacagcactttgggaggccgaggcaggtggatcacgaggccaggagttcaagaccagcctggccaacatgttgaaaccccgtctctactaaaaatacaaaaattagctgggcatggtggcgtgttcctataatcccagctacttgggaggctgaggcaggagaattgcttgaaccaggacctggtaggtggaggttgcagtgagctgagattgcgccactgcactctagcctgggctacagagcaagactctgtctaaaaaaaaaaaaaaaaaaaaaaaaattcaggggaaagaaacaagtacctggattaggatggtgacaatggtgatggaaagaagcgatctgaagccatgtgacctggcaacacaggagggtggcgtggaggggtgctgaggaaaaagagggatcaaagaagtccttaagacagcttaggttgtggtgagcctactggagctcttaactgaaataaggaaggagggtggaataattggctttggtgggaagatcaggcattccattttggccagattgaatttaagaaatttaagggatatttacatcactgttagatatcacatacatttgaggttcttaaatttgggaattttcccaaagagactaataaagctgtgagaatgatgcgatttctgggaagatagagaaggtctcaaggtctgtatttcacaagtagaaccaggatgggaggagcaagggaaggtggaagtacgcaacaaagaggtggacaaacactgaaggggaaaggagaaagggagaaggactgactccatctcgtcagctccactttggggaagtatagaatgagagagactgcaaagcccctagaaggatgtctagtaacccgggctctgtctggaggacgtcctacagcgagaaagattttgactatcacatcataatgtgcatgtctctgaggagaagaatatatttatattcattatcacacaggcctttgtactgtgtaattatttgctgaatgtttaaattaaatgctgcttttccagctgggtgtgcttgtagtcccagctactcttgaggctgaggcgacaggattgcttgaggcctgcagttgaactgaaaagccagcctgccagcctgagcaacatagtgagaccccatctcttaaaaaaaaaaaaaaaagaaagaaatgctgcttttctggctaaattatcaccttagaagcgattgtttttgaatcaggaagtagactctttaaatattaggctgtggatattctggccacagctgtgttttgcgcagatgtttctttagttatgaaaggaggacagcattccatgattgaaatgtcaaccttctgagatgctggtggagaaaatttaatgaggtggcctcatgaggtaaggctattaaaagtgaacgtttgaattatctgcttgattttttaaaacagaacttattactataaaggcctgggcagctttaataaaatgaggatgataagaaatcatcctttgtccttgggttatgatttcacaggtcagagttaaaatcaaagtataggctaacacactagtggtacaaaaatagctccacaaaaagggagcctttcaaagaagatttatctgcatttgattaagctacaaataacacaccactccctggaaaggcttgttctttggtattggaattgggccccgtaatccaaacaggcgcttacttttaataacttggcttacttttgtgtggctaaaaagttagtgaaatgaaatatattacttgttatgacatctgtgtgcccctcctagtggtggtcatgggtgtagggttggatgttcatggcatagaaagccagtttgctgggaaggatagtgtatagggtcttcattttcagcctgtccattgtcatttcttctctttttgagttgtgaagaaaggtattgaaagtgcaggaaagagctctttagggagaaactctagggactgaattttaagcagtttctgaagtgacttgaagaatttcaccaaatgttttagcatgttaagaatgagcagcctctaatgagaactaattagctaaatggaagatttaaataatttaaaacattcaattttcatttaaacttaattaaagcagcctgatattaatgcatccaggaagttttggataagtaatttatagaaaaatgatttcttttatcttgtctatagcatagttttgagtcaaaatgtgaacatagaatatttatgagagaagcatggaaaaactactcttgcctagaaatatttgtgggaatgcatatttaggttagaggtaggtcaggagaaacccttttggtttttaaatttttatttcaaattaaatgtatagcaagtaggataatttaatggaaggttgaatgccacttaagcatatacacacatacacatatatatgatctgatagagccttacggtcatcatttagaacctcaattctcattataaattgctatgatatagacagaagaggagatttggttgaacctcgagacaaatttcattgtgggaataataataaagccatagcaacaacaacagcagcagcagcagcagctaacatgtatagccctgtgccaggcagtgttctaagtggtttacacgcacacattaactcaattaatcctcagaacaagcctaggagttagatgctgttattatcactacttaacaaaggaggaagtagaggtccagagagggaagtatattgcctaaggtcactgagctggtaaggcagagcagggatgcaagccagaggcagtccaccctggagtccaggcatttcccagttggcctgagactgatgccaatggggagggtatgggacaactttgccccttcctgacagacttgatccctctaacttgggtggtgatggctcttgggggaaatgtgccactgacagtatatgcacaaactatgaccagctcctatctgggaatgtgtggtggtaatttaaacatttttctttgtaatttcacttttggggggtataattttgccttttttttcctatcagtgcactaccaaaaagaaagagaggaaagaaattgagttaattgtaggacacgtgaaaacgaaagaagcccagtttttataagcctatgataactgcttttgtaggctgtctggtgaaatgttctggctgcttacctggtgtaacttaaggtgatttttttttttaaggtattctccaaaaaaaaccctcagaaaactgtttactttctaaaagatggtagtttatagtttcttcccccctttttcttctcttcatccaaaccttggaaaagtaatattgttcagggctgctttttttcaccttcttctttttttttttttttttgagttggagtttccttctgttgccaggctggagtgcagtggtgcgatctcagctcactgtaacctccgcctcctgggttcaaccgattctcgtgcctcagcctcctgagtagctgggattacaggcgcgcaccaccacacccagctattttttttttttttttttgtatttttagtagagacgaggtttcaccatgttggccgggtggtcttgatctcctgacctcgtgatctgcctgcctcggcctcccaaagtgctaggattacaggcatgagccactgtgcctagcctttttcaccttctgttttgaacacatgacagccagtgttatgatgtagtatatgttaagaggaagtagatatatctgtgtacattcatagttagttctttttttttttttgaaacagggtcttgctctgtcacccagactggagtgcagtggggcaatctcggctcactgcaacctccacctccggggttcaagcaattctcccacctcagcctcccgaatagctgggattatgggtgcatgccaccatgccttgctaatttttgtatttttttgtagagacagggtttcaccatgttgaccaggctggtctcgaactcctggccttaagtgatctgcctgcctcggcctcccaaagtgctgggattacaggtgtgagccaccgtgcctggcccacagttcttaattctgtaatccaggggaatcaaatttaccttctagataatgatttatttaaatatctgctgttttgacctcttaggcattcggtgtagagttgatctctaatcttcataatgataaattattactctgttttttcagtttgcttgagataaggctgtgaaaacaaaaaatgtagccgaggtgctaaggagagttatcttaacagggctagtcataatcatgcagcctgagagagagctccaagtgggctgcaggagatcccagtggggagctgtcagccttccaagttctttctgtgccaggtcaccacagggcggcttcattattttgtttgaagtagattcctaagacatcagatgttctcatttgtaagttcataaacacattcccaagccagaagtaaatgacttttacttagccacagctcaatacccctttgtgcttaaaaaaaaaaaaacaacaaaaaacaaaaaacaaaaaaactaaaaactaaaacacaagcctcacaaaactcttgacacatttttatgggaagtgaaaagcataacttaaaactttcataagtggttgaaaattgctatacaagaaacttagtatttagatgggatagattttgatgcagaacactgtactaatgctttggagatatgtatttgtaaagaaggaagtagaaacacatgcagtacaggataatacatgaccaaagctgcaaatgtatgtgttaggagttcaagaaaggaagagattattgctacccagggtgataagcactgagctagtttttgaagggtgtataatagcaaagagtacattttatgatctctgtgaggaccagtactacctgtttttgctcaccattatgtcccaacacctagcactgtgcctggcatagatatggggctcaagaaattttagttgaatgaatgaatgagtgagtaagtgaatgaggaagaaaggaaagaaaaagatttcaggcagagtcctgagaaaaggcacaagaggtgtttgggaatagcaagattctgttagaggaggtgtaataatatttgaatggagaggagtcacaggtcacagcagcagtcacttagttggggactggattgtggaaaactgtttggatgtcagtaaattgtgcttgcttgtaaatggcagagagtgaccagggctctactttaggacgagtgctgccatcgctcgaaggtggggtcagttaggctatggaagaattggattagggttgcagcagtggggaaagaaaggccagatggggagaggctggaaagaattggttgactggatttgggactgagcagatgcgggtagggaggaggaagcaaaggtgaattcaaagtttctggcttgggtgactgggagagagggacacctttaagtaggtgaggtacgtaaatcagaaggaaactgcctttttgctattctgttttgttttgaggattggagataggaagtaaaaagggggtcattataatggagtctttgtcttttgtgatctttaagcggaaaatagaccgtgtctgtcctggatatttaaaatgtggggaggtaagtggcacaactgatctcaagttcctttctggctttgtgatttgagctgaattttttatactgaattgtgaaattcattgtgtcttagaaatattttttttaatttttcaaagaatattgcttttctacaatgaagaaattcaaacctacagtgctataaatttttaattggcataattttgtatatgcagttttaaatgctgatttttttaatcatacatgagcattgtaaaccaatgccatttttcaaaatcaccataaatgtctctatattaataatatttcggggaaaggatataccatactgtattgaacatttttctctctttggtcattttggttgtttcctatgtcttgtcattttaagttgttccaattcacattactgaagcaaagtagagctgtgaataattctttttaaagctttagtttcaatttacttaaaaaatatattggtttgttttaatcaacgaaatacttccaggagcaccaaagaattttatgtggattgagagtcatcaaaaatattgctctatttattaaaaatatgtaacatccccagttcttgacaacttgaaaatgaagcagcattgttgcctggggtaaatacccggggttcttcatctcatcgaagattaacaataggtacacgtgagtgggttaaggagcagagactttaataggcagaagaaaggacagaggagagagtagctctccctctcttgtgagacagaggagtccaaagggaaaagcgggcctgcagctgaccgcaacaggttttatagtctggcttgaggaagcggtgtctgatttacatagggcccgcagattggttcaaccaggtgtgacgtttacgtagtgggtggggaaggctgatcaccccaccctaatcttattatgcaaatggactttccactcggccagtgccgtcttgtctgctcctcactgtacatgtggctggcaaaaagagaagatggagctgccattttgaacatgcctagtcccaggtagtagtattcctactggcacaactgccgacattcacctgtgcaagtttccagcttgcttgtttacgtgtgcagctctcttttacaggctgctgtttgttaaaagagaaaatgattttagggctgcttttcattaaaaggaaacccttaccgagggctcccgaaccctcagtacctgcctaagtaatttctttttaactcgtatatcaaaaacatctggtaaatgatcacaattatttgttgttgacagtgaattcctttataagaaataatttgtgtaaactataaatttgaataagatatttcctttattgttaatttaattttttggtcttaaatattttcacatcctagtgacaaattgaagaatttgccagtttagacttctctttttttttttttataaaatttaattttcttttgagaactggaaaaggtagtttatttcaaatttggtccccatgattgatgtactttagtaatgcatttattcagttttgtgtatctggatatgtggcatttcagtgagacagcttctacagagaattggaaaattacattctgaaatatcaaagttttataatttgaataatttacggaaacctttctaaaatgaatatacatttctgccttcttaaagaatttactggccaggcatagtggctcacgcttctaattccacgctttgggaggccaaggtgggcagattgctcgagcaacatgctgaaaccctgtctctacaaaaaatacaaaaattagccaggcatgttccacatggctgtagtcctagctactctggaggctgaggtgggaggatcacttgagcttaggaggtcgaggcttcagtgaaccatgagcatgccacagcactcagcctaggtggcagatcaagaccctgtcacaaaaaaaaaatttattgatcacaatttactttttttctgtcatacacagacttcatcattatggatgatcatcttttttttttttaattttttatttttgagatggagtctcgctctgttgccaggctggagtgcagtggcccgatgtcggctcactgcaacctctgcctcccaggttcaagcgattctcttgcctcagactcccaagtagctgggactacaggtgcatgccaccacacccagctaatttttgtatttttttttttaatagagacagggtttcaccatgttggccaggatggtctcaatctcttgacctcgtgatccgcccgcctcggcctcccaaagtgctgggattacaggcggagccgttgcccccggccctgtgatcctcaccacaaattttagagtaattattttccttttgagagcctcagccactttatgaaatctgagggttagccttttatgtatgggggaatcgctcatcattctgttttctaacaaagctttgcatatactgtctgtatagctctcctgccttcagtactagccattgaataatggagttaatttacactgcttgagaatatttctgtgggagtgaattttaattttcccagtgcattcctgaagaagtctccttttgttttcgttaatctgagtctctaagggagtttttattaactgaccttctctaacgagggatgttagaattacagaccctgatactggaaggtttcttgataccatctggtctgttgtttggctttaaggcaaagtgaaagcactcacttattttacagaaacagcagctgacacctgacctgaccagtatttacctcgggttaagaaggtaataagtggagaatggttcctcaccctctggtgttgtaaacctgaactttcttagaaatctagacaatgcatcaagggacaggattgatagttgatattggggttctctccttcctttatgatctcaacaaatgtcagactttttgcagacaagtaagtaataaagatgataagtttcctaatacatgtagctgctttgtagtctgtgggtttgctttctggctgtgcagaaaacagtgaatttcatggaaaaagttgtgttcttttccttcctcaaagaggagacactctgagggaaatgttttctgtacccagacccaatgcactgagaggacagacagaacagagaacatcaaatagggcaagtagaccttgagaaacatttgaacagttgaatgggtttgtccaataaggataactagagtcatagactctgtagagtctatatagcggctagaactgtgatatatgatattacataagagctggaaagaactttaggagccatctaattcagtggcttcatttgatagatgaggacgtggagtcccagagaggctacgacaccagattagggacactgagtgaccaaattgggactggaaccttttggcacccagtgatctttagttctgcatcagactgctgtgtgtgtgggaagcttgttagatgtgcagcaactcttccccaagaagttggcatcagtgtgactgtgggtggttatgctaaagggcttgagcaaaaactcagactagtgccctcatctgaggttggtatttgttatgcagttaggacctttttaaaatgtgatcattatgagttcagccataataatcacgtctcatacagaaactttatcatctgactggaggggtgcggatagtattctagtgatagggaaactgttaggtaatgtgtggcccagaggcattgctgatcaatttcaacaaaattttacacacacacacacacacacacacacacacacacacggtctcattgtgttttggaggatactgctattttagcatttatcacattgtaataatgtctttacctgtcttctcagtagatagtgagctccttgtgggtagggactggtgaccaataggcttttagtaactatttgagtgagcaagtgaatgaagagacaaaaaacgtcagcagtgctggtaaaacattgaaaggttggcatgccttataacgatcttatagaatttattcatcctgtttttaaagcagttaattttttttgtattgcaagtactctgtgatgaatatgctaacttgtaatgccttgctcagaataggtagtcataaattttgttgaatgaatgagtacttcttggaatgtagcttatctttttgctgaggtgttgggaattttcacatgaagcttctaatgtgtagaataaggtataacaatacttcaaacaatgattcctctgggaattgactcacttaaattatagtttattagaaaaaccgaagacaaaataatggtacatcataaacttcataaatctgtgagaagagctgcacatgttgagtatgacagcaaggcttttaggcccagcttctatgtcccttcaaatttgtaggacctgcacctgtggggtggtgggtgatcctacccttgtgaatgtttgctctgatccttgggctcctgtttctttgttctcctggtaaggagatgaacctccttcctcctccacttgcaggactccaaatgctccaattcttttagtttctttcctgtcaaaacagaaaagggtttgattttagctatttacacttactgaataaaaagatggatggaccgattttcccttaatagttcatgagtttcattgtaggcattgacccataatttgccaatcttcttagaagaaatctgcaaataggtggagagaatcattcgttcatttgttaattcatttggagatgaacgcacgggtactctgaaataataaaatgtccgtgtttttccctggccacatgagaccaaaagactactcccctctgccaagacaaagtggggacccgtgcttggctgtggctctggaagccttttcctaggaaatgccagagtggagaagactctgtccattgtcattaacttcaagtttaggagtgcactcagccctcagatttctgaatagtctctgaagtacttatttctaccatctcctcccttttcactatccccaggttgatgaccttccatttctcctcttccaccctgcttttgttccaagctgcccaaataaatctagcacatttgattattttcattgattatcaattaatttttattttgaatttccctctagctaatagtatgtattataagtatgttttcatttttccctcaactctggtgaagaaggttcttacaaaggagcatgttgttggaagatgtcttctttattcacagtatttcattataccaaagttggtgataacccagcatggtgtgaacaactatcagcaatttttcaatgatcttgacatttaaaaatatatttattaatagtaagctagaaaactatatgtataagactatattattttaaatacataaatagtcttacaagtgtaagtattgtatcaaatgaccttaagataagatagagcttgttggctttatatttgtgacaattctgacttttgaagacttgttcaaaattgctcttggttgtgcaaaacttttgactgaatttttttagtgtaacttgaagctcatccgtctttttgtgggatataaaggctggcccactgagcttcaacatactgtggggtgggaagtcctctgggttaggattgcttattttttttctacctttaacctgaggctcttgccaaaagagaggcataacttcttcattgttgctatctttggatagcagcctactcttaaaacagcctgtctttttgagagacagtgaaggagggtgggaactagatcctcacctatttttccattctcttatgttccaagtcccaactggctttttggaaatatgaccctcttgaacaaaacaggataaaaattaccagggcctattctcactgttgggaaataattgggcctttgtagggaaaggatattgtcttcaaacattttatctatacttcgtttatggtacttggtaatttcttttatcttttatagttattttgatatgtcttttcatcttgatcagtattgtccatcagtgcagaacattgttgaattctgtagccattagctacgtgtggcttttgaacacatttgaaataattgaagaatttttaatttgtttcaccttagttaatttaaatttaaatagccatgactagtggctaccatgttggagagtacagatcaacttaaggataatgtttgtatttgatttactttctcctgtgttattgtagtatgccaattttatttcctggtgtttggtgaaataggttcatatgtgaaccatattgctttcaaaagtacatgtggctaagccaatctgattgttagaaattgtacatctttgaatttgagtttgaagttggattgtaatggttagtatgaaactggaatttgatgacgaattcttttttaaaaaatttcaacttttattttagattcaggggtatatgtgcaggtttgtatacaagcatattttgtgatgctaaggtttggggtataaatgatcctgtcacccaggtagtgagcatagttcccaatagttagttttgcaaccctttactcccttcttccctccccacttcagtagtccttcatgtctattgttgccatctttttgtccgtgagtagtcaattgtgtagttcccacttataaatgagaacatgcggtatttggttttctattcctgcattaattcttttaggataatagcctccagcttcatccatgttgctgcaaagatagaacgatttattttcttttggatatatacccagtaatgggattgctgggttgaatggtagttctgttttaagtttttttgagaaatctccaaactgcttttcacagtggctggactaatttagattcccgccgccaacagtgtgaatctgttgttttttgacattttttttttttttttgagatggagtctcgctctgtcgccaggctggagtgcagtggcgcaatctcggctcactgcaacctccgcctcctgggttcaagcaattttcctgcctctgcctcctgggttcaagcgattctcctgcctcagcctccaaggtagctgtgactacaggcatgtgccaccacgcccagctaatttttgtatttttagtagagatggggtttcaccatgttggccaggatggtcttgatctcttgacctcgtgatccgcccaccttggcctcccaaagtgctggaattacaggcgtgagccactgcctagccttgactttttaatagtagccattctgactggtgtgagatggtgtctcattatggttttgattggtgtttctctgatgattagtgatgttgatcatttttcatatgttaggtgcttgtgtttcttcttttgagaagtgtctgttcatgtcttttgctcattttttaatggggttatttttctcttgttcaactgttaaattcctatggattctagatattagacctttgtcagatacatagtttgcgaatatttttccccttctgtatgttgtctgtttactctgttgatagtttattttgctgttcagaagctctttagtttaattaggtcccacttgtcaatgtttgctttttgaggacttagtcataaattctttcctgaggccgatatttagaatggtgtttcctaggttttcttctaaaaatttttttttttttttgagacacctaagttggagtgctgtggcataatcatggctaactgcagccttgaccttctgggctcaagtgatcctcctgcctcagcctcccaagtagctaggactatagatgtatgccaccacacctggctaattaaaaaaaaaaattttttttttggagacagggtctcattttgtcacccaggctggagtgtagtggcaccatcagaaatcactgcagcctcgacctcccgggctcaagcaattctcctgcctcagcctcccaagtacctgggactacaggcatgcactaccacacccagctaatttttgtaatttttaggagatggggttttgctatgttgcccaggccggtcttgaactcctgggggtcaagcgatcggcctgccttagcctctcaaagtgttgggattataggcatgagccactgcacccagcctaaagttttttttttttttgtagagatggagtctccctttgttgctcaggctagtctcaaactcctgagctcaagcaatcctcacactttggcctcccaaagtgctatttcataagcatgagccacggctcctggcctcttctgggacatttagtttgagatcttacatttaaatctttaatctatcttgagttaatttttgtatacggtgatagataggagaccagtttcattcttttgcatttggctagccagctatcccagcaccatttattgaataggaagtcctttccctagtgctatttctgttgattttgttgaagatcagatggctgtaggtgtacaggtttatttcggggttctctataatgttccattgttctatgtgtctgtttttgtaccagtaccatgctgttttggttattatagccttagagtagagttttaatttgggtaatgtgatgcctctggctttgttctttttgcttattgctttgactatttggccttattttggttccatatgaattttagaatagttttttttctaattctgtgaaaaatgatactggtagtgtaataggaatagtgttgaaactgtagattgctttgggcaatatagtgattttatccatattgtttcttccaatccatgagcatgtaatgttttttcatttgtgttgtctgtaatttcttttagcagtgttttgtagttctccttgtagagatctttcatgttggttagatgtattcctaggtattttagttcttttgaggctattgtaactgggattacatttttgatttggctcttagcttgaatattattggtgtatggaaatgctactgatttttgtacatgaattttgtatcctgaaaccttattgaagttgtttatcagttccaggagccttttggcagagtcattaggattttctaggtatatcattatatcgtcagtggaaagagatagtttgacttattttcctatttgagtgccttttattttttctttggttgcttgctctggctaggacttctagtactgtgttaaataggagtggtaagagtgggcatccttgtcttgtttcaactcctaaagggaatgcttccagcttttgttcattcagtatgatgttggttgtgggtttgtcatagatggctcttattattttggggtatgttcctttgatgcccagtttgttaaggatttttaccatgaacggatgttggattttatcagaagctttttttgtgtctttgagatgatcacattttaaaaaaatgtttaattttgttaatgtggtgtgtcacatttattggtttgcatatgctgacccaaccttgcattccaggaatgaagcctacttcatcgtgatgcataaactttttgaggtgctgctggatttggtttttggaggatttttatggataacttgaattatttttgctttcccaaaatttattcaaagtgagtttaaaaagctgaaataaccatagctaaaacttcaaattctaccagtgtcaatattcatatacaagtagaaaaaaaacaagttatattagtcaaaagtgttgcttccattaacccaaggataagaaaatctcttatttagaaaaaaggttaccttaatcaatactggtagatgcatatttatacacaggcatactgtggagatattgcaggtttggttctagaccaccacaataaagcaaatactgcaacaaagcaagtcacacaaggttttttggtttctcagtacatataaaagctatgtttatactatactgtggtctattaagtgtgtagtagcattgtgtctaagaaagcaatgtatataccttaactaaaaatactttattgctaaaaaatgctaatgatcatctgagcctttagcaagttgtaatcttcttgctggtggagggccctgccccagtgtgatggctgctgactgatcagggtggtggttgctgaaggttggggtggctgtggcaatttcttaaaataagacagcagtgaaatttgccatattgattcactcttcctttcatgaaagatttctctgtagcatgagatgctatttgatagcattttacttagagttttcaaaataggagttaatcctctcaaaccctggggctactttatcaactaagtatgtgtaacattctaatttttttgttgtcatttcaataatattcacagcatcttcaaaaggagtaaattccatctgaagaacccagtttctttgctcattcatgagcaaaaggtgtgagcatgataaagttgaatgagaagcaactcatcattcaagttttatcatgagaatttagcaattaggctctacttttaattttagttctcttgccatttccaccacatctgcagttacttccatcactgacatcttaaacccctcaatagcattcatgagcgttggaatcaacatctttcaaactcctgtgaatgttaatatgttgacttcctcccataaatcttaaaccttatgaaccaacctctgctaacttcatacttttattctgcagcttcctcacctctcttaaccttcatagaattgaagagaattagggccttgctttggatgaggctttggcttaagggaatgctgtggctggtttcatcttctatccagatcactaaaactttctccatatcagcaataaagctattttgtttttgtatcattcatatgttcactggggtagcactattaatttccttcaagaacttttcttttgcattcacagttggctgtttggagcaagaggcctagcttttggcctatcttggctttcgatacaccttcttcactaagcttaatcatttctaccttttgatttaaagtgaaccatgtgtgacttttgcttttacttgaacactgagaggccatgatagggttattaattggcctgatttcaatattgttgtgtctcagggaatagggaggtccaaggagagggagagagatgggggaatggctagttggtgaagcagtcagaacacatatgacatttatcaattaagtttgctatcttatttgggtacagtttgtggagacccaaaacaattacagtagtaatatcaaagatcactgaccatcataacagatacaataataatgaaaatttaaaatattgtgagagttaccaaaatgtgaaacagagacatgaagtgagcacatgctgttggagaaatggaactgatagacttgcctaatgcagggttgccacggttcttcaatttgtaaaaaaatgcactatctgtgagcatgataaagtgaagtgcaataaaatgagatatgcctatactcttcattttggttcttttgagttagtttttgttgacttgtcttggactggtcagtaaggggattataggtatagttcattttggattcgtgggtattttgtttacatttacaatacaacaccacactgggaagttaagaaatgagtctagaacttttatttcaaatcactgctgctttctttctttctttttttttattattattatactttaagttttagggtacatgtgcacaatgtgcaggttagttatatatgtatacatgtgccatgctggtgtgctgcacccattaactcgtcatctagcattaggtatatctcctgatgctatccctcctacctccccccaccccacaacagtccccagagtgtgatgttccccttcctgtgtccatgtattctcattgttcaatttccacctatgagtgagaatatgcggtgtttggttttttgttcttgcgatagtttactgagaatgatgatttccaatttcatccatgtccctacaaaggacatgaactcatcattttttatggctgcatagtattccatggttgtatatgtgccacattttcttaatccagtctatcattgttggacatttgggttggttccaagtctttgctattgtgaatagagccgcaataaacgtacgtgtgcatgtgtctttatagcagcatgatttatagtcctttgggtatatacccagtaatgggatggctgggtcaaatggtatttctagttctagatccctgagaaatcaccacactgacttccacaatggttgaactagtttacagtcccaccaacagtgtaaaagtgttcctgtttctctacatcctctccagcacctgttgtttcctgactttttaatgatcgccattctaactggtgtgagatggtatctcattgtagttttgatttgcatttctctgatgcatctctgtgttcttctcatgaagcctgtgtaaagggacagctaaatttggtgccacctgtaatataaatttcaaaatattaccaacctgcctaatagggatgaaatatacaaattcagcattctttatttatctaaggcaagtggctattggcagattttatgtaatgtaatgacatagttatgatagtgtcatttgggtggcagcaaaaaaattaaatgactaattcaaaggtcttttggggatggattttggaaatgtgttggtatttagtaaatttgtggtctagactaaattgaacttaaagcattaatgaacaaactatttcataatgaatacttgtttctgcttttgtattacctgtaggacattcttctaatcataagtatatgatacagtccctgacagagagacttacattgtagttgattaagtagaatcaatacttaaaataatttgcaatatttagtagtatatgtagtagactaaacgaatgactcagacggtaagttttgaaaactttgagagaaaggtgttccctaggatgattggaaaggcttcatggagaaggtgggatttgcactggactttgagcaaggtagagtgtagcagaaagaaaaggaggacactctagacaaggaaaccgatgtgagtggaggcttagataaagaatacatttagaatatttgggaataaggaatggacatgtttgttggaatgcagatttcctatgggacctctcaggagataaggtcagcctggaagctaggggaatgttgtgtaaggctttgattgctgggccaaggaattattctaaaggcagtaagaaaccattaaacatttttgaatagtgggaggatatgtgagaactgagactttatgaagactaatatctttcttggaatacaggatgattgggaaggggagagagattttaaaaagtacaggcatttctcaaaagaagacatttatgcagccaacagacacatgaaaaaatgctcatcatcactggccatcagagaaatgcaaatcaaaaccacaatcagataccatttcacactagttagaatggcgatcattaaaaagtcaggaaacaacaggtgctggagaggatgtggagaaataggaacacttttacactgttggtaggactgtaaactagttcaaccattgtggaagacagtgtggcgattcctcaaggatctagaactagaaataccatttgacccagccatcccattactgggtgtatacccaaagaattataaatcatgctgctataaagacacattcacacgtatgtttattgcggcactattcacaatagcaaagacttggaaccaacccaaatgcccatcaatgatagactggattaagaaaatgtggcacgtatacaccatggaatactatgcagccataaaaaatgatgagttcatgtcctttgtagggacatggataaagctggaaaccatcattctgagcaaactatcacaaggacaaaaaatcaaacaccgcatgttctcactcataggtgggaactgaacaatgagaacacttggacatgggaaggggaacatcacacaccagggcctgcctgtcatggggtggggggatgggggagggatagcattgggagctatacctaatgtaaatgctgagttaataggtgcaacacaccaacatggcacatgtatacatatgtaacaaatgtgcacgttgtgcacatgtaccctagaacttaaagtatatatatatatataaagtacaggtgtgagatgaaaaggatctggacttctgttggcaaaataggaagagaaagggaaaggatgaattatagtagtagcttgtttgatatatcagaattaaatatttatttgttggcctactgtgattgagagatttaatgcctgagtgactgggagaagcaaagtgtttttttgtctggagggatgatgtgaaggaaagatgggttgagttttagatattttgagttccaggtgacggaagggcctgtagatggtggacccagcaggtagccgagatggagaagactgacactggctctcaagtggaagagacatcacttttccatagggtcgtcagttaaattcatgatgttggctaagagagaagatctacagattgatgactgtatcctggagatgttaggggatgaagagagggggaggagccagtgtgtcttataatacagaaagttcatggagaacgaaaactgaaaaaataccactggatttaagatacttgagaattgtgagctatgtttgagaggaatagttggaatccaaagtacacaagtaagattatgactaaaatatatgataaagaaataaaagcaagtagtacaggccatgtacttgttatattcctgttggttctttctttgcctgttctttagtgtgtttacttaaatggtctggcaggcagataaaaggaggtggaacttaaaactgtccaattagttctgttttttttttttttgcgatggagtttcactcttgttgcccaggctggagtgcagtggtgcgatctctggctcaccgcaacctccacctccacctcccgggttcaagtgattctcctgcctcagcctctcgagtagctgggattataggcaagcaccacactgcctggctaattttgtatttttagtagagatggggtttctccatgttggtcaggctggtctcgaacacctgacctcaggcagtctgcctgcccccagcctcccaaagtgctgggattacaggcataagccaccgcgcccggccactagttccctattaagagactagttagagtaactagagggcattaggacgaaaccattagttatttggattataccatggatcagattagttataagataattgaaatttgattgtaaatttaatgaaattaaagatgaacattgatgttactgaaaattatactttgactaaatactacgttttttgtttttcttgtatcttagtttctatgcagattttggaccgctgaacttggcaatggtgtacagatattgctgcaaactaaacaagaaactaaaagtgagtattgtagtgatatttataatttggaattaaaacatttgaaccataggatctgctcagtggggttggtgtgcacaaaacatttagtcaggtgatcttgatctctggaaatttatgtgagtagttcacctagagtttgaaagtgatcctcctgattataccacaaaggacatgttaacctctttcagttttcagaatgaattgcaatatgagctgaatgaagtcactggaatagtgatctaagaaagaaagcacaaatccttttaggctgttgttaatgagtctctatcaaattccctcctaggataatttttctgaaaccttcagatatgcctgtagaccctgtttccaagtgatgaacagggcttatcatggctggagctgtgtgcataacattttctgtttggtcaagattgaaattttttgcatgtttcttaaatgttctgtgtagttaacagccaggtgagattgatgaaccagcagcaacagagaatggaatttacctgagatgatagaattctggtcatacatttagtattcatctatagttttgatttcacatgggtatctggtttccttttctgtacttttatgtggattttggcatgtggctttttttttcttcttcaagcatatgaggaaactcatctatatacctagttttagtaaacttattttatcacacagaaagcaatatttatctccttgtcttccaatttctaaatgaagatctttactatttcagtttgaaagacaaaatgctatacagaggactcttaaggataaatactaaattatattgctcaggtattttgctctttctgctgggtaaaatgttactggtgttacatagtacaatgccttggacatattaactgttctgtgattattttttgatttgattggtttttaatgaacttaggtataaaaagcagtctgatagagaatttcctgtagaatatgttgtatccttatgaatttacaaatttttgccattgatttcaaagtgagaggtggacatggaattataccaaaaagaatcaataatcatataacatattaggttggtgcaaaagcaattgtggtttttataattacttttaatgttaaaaaccacaattacttttgaaccaacataataaaatctgttttactcaacttttgtaggaattaacttacaaagttgtctgacttgaaaagatacatgtaaattcctttaattaagccagatctgtttttaagaaaagaagccagtattttagaaagtaaaatagaggtttttgcaatcacctaggaagtaaataatatcctttttatagaaaatgaacttttaatggctgagtaaacaagaaaaggataattaataaataatggaagtctatttttttcttttgaagaccaaggaatttctttgctgtcttgattagtcattagtatgtagttggtatgaattgggtattataattaatctgggaaccgagtactatctagggtagccaaagagaaaggagtcattatcaggaaagtaaaatcactggtctgactcagtgttctacttatagcagttgcagaagagtagatgggttgagttgagagtattttttctaccattttctacactgaacagtatggtaagtatatgtatgtaaacttgtttctatttgctttcatttataatgctgtgtttcgacattattaataaagtttaaacactctccttggttcattttagtggtaaggtaatctgttggttgtctggaatgacatatgtagctttaggacaattaatgggcactgcattacttgctgaatgattgaattttaaaaacccaaatgttgataagtcatgagttgtctcaatgaagcatactacatagaatctctaattaggagaaaaagatttactgtaccagtccaaagttggaattgcttcagttttgtggaatcttagtttcttcatctgtaaaataggaattatagaactgtcacagggtggtggttagtattatattagaaaacatgtcttagtctgttttgcattgctataaaggaataccagaggctaggtaatttataaagaaaagagttttatatagctcatggttccacaggctgtacatgaatcgtggcaccaacatctgcttctggtgagtccctcaggaagctttcactcaaggcagaaggtcaaggggaacagtcatgtcatatggcaagagagggagcaagggagaggggagggaggtgccacactctttttaacaacaaaatcttgggggaactaagagtgaaaacccactcaatcccctcagaatggcaccgagccgttcatgagggatctgcccccatgacccaaggccccacctcttaacactggggatcacgtgagatttggagaggacaaatatccaaactatatcaatatgtaaaagctttgtacattttaaagtcctatacataataaagttaccaatgtaacatttgtgaattctgatagggaatataataaagacagttcttctacaaaatcgatgaacacctgtttctcagccttaaagctattgtttatatatgggaaagctgtccaatataattttaggaatctaaatgaccatttagtcaagactcagaaagggaagcctgggaaaggtgtgtgacttgcccagtgcagcaggcaaagtcagggctagatttcatggctcttgaccacatttttcctgttcttctttccaccttcagtaggaaccatagcctctggtttacagtcatcctttgttcactcttagcattgccccagctacctgaccttgttgtcccacgctgactttgaggctcctctgcctctttcattccagtaagtgttagggccattctgtctgcttcacttccacgaacccagactccagattctcccacttggaaaatgcctttgttactcactttgcacattctgtccctctcacactactgggattgctagaccttcagtctccctgttctctcagtccactggcaccctgctgatgtctcttgcctgcagcccatggtcacttacttcagtaaggtcttgggtactttgctttcttgtctttctgccttgccagctctcacccttgttgttttcccagtggatgatttcatgcactaatttactgggaagcagcagtacccttgccactcccagccttgcactttactctaccataccagctgttccatgcatttgctcatgaagaccagtctgactgggatgcccttaccctctggcttgatagctcttcattctttaataccttgtccagccaccaccctttaggaagcatcttcttgtccttttggactggattgagggtgcctcccttgttttcccatcattctctgtgcagatctgtatcgttgatgaattgtaattacctgtttgcacctgtcattctcactagactatgagcttctagagggtggaaggtggaggatgtcatgtatctttgtgttctcagtgcctagtgcagggacaacagacacacagagacttcttttgactttgtcatgatccccttcatttgcagatccccctttctccttttgcttccagaggtttcagaagaagagcctgcctccatccttcctgtgtgctgatttcttaaccctttgttatctaacttttgccttccctactctaccgaaactgctctaataacgtcttaaatgctgaatctgatggcacttgctggatcctcaaactcctttacttctctgagtaatttcgcactgtgttaactagtaacttcgtcttaggattcttctcttgtgtgatttcccagttcttttaggcacatttcattttttagtttggaaatttttattccttccaagaaagcttgtgtgatttttcttcctcattctgtgctttatatagataggtaatattttgctgtacattttattccaatcccaaatttctcatttttgaaatgagaagatgtttttttccagttgatgatttgagttggtgatttatcgctatttttgtgtttctgtgtctatatgcattctattcccaatgtccttattttaattatgtcaatcagaatggaaaattatcccatcaaacatatgcttagattaaaaatccaaacataaaatgcatcatcaccaataaaaaacctgctgcttatttaaactgtactttaaaaaattgtcagtactaggaattaggcagtaataggttgctgtttggtctttcccctaggataggggaagcaatcaaaagagggaagatgcattgaagtgagaacaatttgttaaactgtgtatgttatttaatgttaaatgtcatcaatgattgatagccttgagctggaattattattctggtaattcaagggatccataaacccttgaaattatacaattttgtatgtatttacatttttcttctgggaggattcatggctttttttcaggttctcagagggatccttgacacagacatgctaagaacactgggctaaagtcttctgaaaaagaagactttactaacaaaagacaaagttgtggtattttgaaaaaactgaataccttcctctattcttttttttttttttttttttttgagagggggtctcactgcgtcacctgggctggagtgccatggtgcagtcatagctcactgcagcctcaaactcctgggctttgatgattctcccacttcagtcaactgactaactggaaatataggtgcacacttctgcaccccacccagctaactatttttttttttttttttttttagtttttgtagaggcagggacacactatgttgatcaggctggtcttgaacttctgggcttaagctagcttcccgcctgagcctcccaaagtggtgggattacaggcatgagccactgtgcttggccgtcaatacagttttaattattgatttcattttcctctgagaaaaataaaacctgagcttggagaaaaaaaaagtctctgaaaaaaggggacattttctagggcagtggtttttcttttttttaatacctgctgttatgaatcaacaggataattacagtaatcttgaggactattttaaaaaaggattaaaggagtattcacagaaatgtaattttaaatttacaaaacatcccatatagccctttcagggtaaaaggggaagtgggtgggtatcatgaaaccaaccattatattgaagcattggaagtacctggcagatggtggggcttagggaatgtccttgttgctgaatgaatcagtgccataatcctatcctgtaaaccaggcacctgccaccctatcgggggttatatacaccagaactcttttgatgtaatgactagaccaccctattataactacaaaaacatgttgagatttcttcatgtggttcttttctgtttctggctcataggtttgtggggaagaaaagcaagctacattctggagatagttcatgtagtttaaagaggttctaggggctccaaagcaatgtcaactcccataggagcgagcatataccgagtttgcaaggcaagaaccccttatgcctgttaggaatcctcaggcaggaagaaccccgtttatagagaatcccacgtgccttcaattattgattattaacacgatgaaatcatcttcatgagcaacttttctctgacattttgacttctgctttaatcaaatgtgccatttcattaatgaaatgtattgggtttgaaacaaagtgggccacacagagacacctttttctttttaaagaaatgattcgatctatttcatcttggcactaaataaaaaacataaaccatattttgttttgtacagccaaagaacattttccagagtattcctttcctgagaaagttggaggtaaaacttgtaaaggtcatggctgctcacaggaagacctgctcattttatcgcttttgcagtgagatgaccactgattgctatggagatgctgattgctgcggccattactgggctagcctagccacctgtaagagaatgatgccttggtcattgcggtccctgtgctgtgatctccttaatatgaccatgatcattgacagaacttgcatgtttaggaggtgcatgggctctatttttattaaagagcatattatccaggctgcattaatgtcttccttagctcagtcagactgattcatacagcttaattaaatacagcattctaaccaaataacttgaagattttacttttctgtgtttctttaaattgacctttaactcttttttttttttggctttggctttgagcctaattgcatcaccttttgttattgaatggttaagtagtttgtgctctcctgactgaagctgaacaagtgcatgatttgtgtttgttgccataatccaagtgtagcctgagctatttgttatttgtgcagcttgtcattatttttttctctctccaagttgctgtggcttgtgttttacaaggagtgatcccactagaatataacctttcacatagcttttctttccaagatagaaaatgtctggggtcaatacccttatcttaatttgtattgttctatcatagcagtcattgtactttggtttataagtaccattaagtatttatgatatacacttatgatttacataacaggggcaaaactttgactctcaggtaagcaatacagaaatttctataggtttgattatgttaattgatagtcaatactaaattccaccttttatctactatattttttccttgttaaatgaaacacttactgtacctgtaattagtatcattttattggtccttgtgtgctgtaaatgcatcctatacagttattctcctctgtttttaataagccttggccaatattttgcattaaatattcattagcctttgaggttagagagtgggtttcttctccccttgtcactgcattgctcagcaaagtgtttgacacacaacagctactcaattcatgctgatggaacccatagaaccttcttcagccgcagtatcctggcacccagatttagcaaattggtcacctgtggcctgcattctgtccacagacatgttttcttgagcttaaacactgtttaaaaaattttaattcatagtcaacatctgcagtttatgaaagcttcaattttgtcttcttttaaatattgcagtatctgaccattctgcacccagattccctcacaagagcagtaggttggagcttactgcactttggatagggaatgcttttcttatttaccagctgccccacttcagattcttggcacctgagaacatctgaatttggaacttctggaataatgacatttaaggcagcttaattacggaatcattaaagggacttgttcctaaggtgttatcacctggaatgcatgaatttacaaattgtaataaggtttgctgaggaatctggggaaatgtgttttttgtaaaatgcttttaaaaggcttattgcatgatttagaattcctttttaagagaatgtagagttctttcgagactacttgaccagatggacagtgttttagcttcatataaaagattcccaggggtgggaccagttacatgtttatgtagtgcttctccaaaatttagccatatcttagagtagtggatttcaatgtgtggtgtctggaccaacagtgtcagcattactggaaaacctgttagaaatgtaaattctcaggccctactgaatcagaaattctggaggtgagacccagcaatctgtgttttaataagccctgcaggtgattctgaaccaatctgttaagagaatgaaatataatacaataataatataatgtggtttagagttagatttagttatttctgaaaagtcttagtactattgaccaattcaacctgagaattattcaaattctgaagcatgaaacttgttatggcctcataattaagatttacacaaattatcaggctctgtgagaaagttttggactgatcctgcttactactcttactgtgtaaatgttcgtcaaaggccctctctgactctgggcttatgttctccttgtaaaacacagtgtgctcattatattttagccttgcccaggacccctagtctgggagacgttatgtgtctgattaaactggacccctctggtgccattcctattgctttggataatggtggaatgtcacaagtgagcaataaatgcgagctgttgttgcggttattatagagggctggctatgtccacttcagtttagaaagttcagaagggtatttgctttgtaatccccgcactttgagaggtcggggtgagcagatcacttgaggtcaggagttcaagaccagcctggccaacatggtgaaaccccatctctactaaaaatacaaaaattagccaggcgtggtgtcacctgcctgtagtcccagctactcaggaggctgaggcatgagaattgcttgaacctgggaagtggaggttgcagtgagccaagatcatgccactgtattccagcctgggtgacagagtgagatagtatttaaaaaaaaaaaaaagaagagtatttgttccagtttcaagatagaaatctaaaacataaggtggatagtggctggctgcagattgtgatttgtaatgggtcatgtgctgtgctgctacagagctggcaaatagtccagaggtctcagtattctttctgtgaccctctctattttatatttacactgtatttattggaattgaccaattttaaacttcactttgctatggcatacagtgtttttgtaacctgtgagcttcttgtgtaaagcagaaaataatctgtaatagagcaggtagctcattgaaagcctgtggctatgatgtaaccttgcaagtgttctccttgaagggcccactcatcatatttgctttgtaatccctgcactttgggaggctggggtgagcagatcacttgaggtcaggagttcaagaccagcctagccaacatagtgaaaccccatctctactaaaaatacaaaaattagccaggcatggtgacaccttcctgtggtcccagctacagaggagacagaccagagtaaggaagaggccactgtccaatttagaggcatgatattctcctgatattagggcagaatctgagaaaacattgactgggctcatacatagagtcctgtcctattgtctccaaactgtgactttgtctgcatggtaaagttcttccatgaaagatctcaaaagagaagttaatgttccatagaaggtacttcaatcatcgatgtctccactgggtgttagtattgcttcttctagggtgctttgattatgtaatagtattttttaagtgggggacatgcttaaaatttgagaggaaaaaacattaaagagttttttttttttaaatcagcccactcatataaaacatcagctaaacaacggacaaaatattttgttacccctcaaatttttattccaataccaaagtatcttctctgttgaacagcatcactggtagaaaactgtgggccaggatgaccataagagggaggcccagttgtgaaaaggaaagacattagcaaaaggcctaattttgatattagcaaatttgagattaattagaaaattaattaggaaattaggacaaggtctaattttgagattagtagatttttctctgctctcattaactttgaattcgttttgattcctcgagtgagagaactcacctctcagtgatttgacctcggagatgctggccaagcttcgctaagcaggaaatcatttcttggctggtgtgcttttgaaacttaaccgaggaaactgaattccaaaaatacctaagcaaagtaaatgctagcagctttaaacattttcctaaaaatcaggcagaaagctctaaaaagaagtcagttatgtttgcttcctgtggggagtttctcataggaaatattttaaaataaagtttctaggaagattttgtgaagatcattctctatctgatgtaatttatgaaagcttataaagtttaagcattcttctaaaatctttaaagtgttaatttgtattatatttacttaaataatatttatagctatacagtgaaaagaaagtcttcctcagagttctgtcctttagttttatggctcatgttccaggataagtctctgtattctatatactttagaatgcgagagagaaaaaacgaaaccaagtaaacacaaaagattctactccccccaaccccctccaaaaaaacccaaggaagaaataagcatcagtgatgaaagaacagcactataacttgtccctttcagcaagtagatttgtaaaataaatacagtttcacattattaaccaatagcagtagtttgtcataaaacctaaattcttagtagaaaagagcatcaaaaatgataatccagacttgaagatagactgttgatattttcttccccacaggtattttagggaattaggaaatgtaaatagggagaggctgggagccataagagcgtcgagtccctatgctcagtctgactcatgtttattgagagcctggcctgtgtaaggcagtatttagatatttgcaattcagagatgataggagatgcttaggtctgaagagcctttatttcctttttggtaaatcaaacataacttattgatggggaacaaataagtggcaaaaccaaccaaccacccaacagacaatgagacaatgaaataaaacagaaaaaggcaatgttcaggcagtcagtagttccaaattgagaaagcaaagaatcaagtgtcagcaccattggttgtaacctttacatccctaggtaacttcaatgcatcaactcaactgagctgaattaaatgctgtgcctttgttctctctttatttcataggagtatttgtataaacctgtcaggaaataagggcattggcaataagatactttctttgagtcaaatactaattttttttgtttgatttttgtttgtttgtttttgagacaaattcttgttctgttgcccaggctgtactgctgtggtgtgatcatggctcactgcagcctccatctcctgagcttaagtgatactcctatccagtctttttgtagagatgaggtcttactatgttgcctgggctagtctcaaattcccagccctaagtgattctcctgctttggcctctcaaagtgttggaattacaggcatgagccatcacacctggccttacatactaatttttaaaagtttaataaaaagggcactactggctgggtgttgtggctcatgcctgtaatctcagcactttgggaggccaaggcaggtggatcacttaagcccaggagttcgagaccagcctggacaacatggtaagacctcacctctacgaaaaatacaaatatttgccaggcatggtggcatgtgcctgtggtcccagctactcaggaggccgaggtgagaggatcgattgaggctgagaggtcaaggctgcagtgagccagatcatgccactgcgctccagcctgggtgctgggtgacagagcaagaccctgtctcaaaaaaaaaaaaaaaaaaaaaaggtaaaagataaaagggtacagccattttcagataatgtgattctaggagttcgagaccagcctggccaacatggtgaaactctgtctctactaaaaatacaaaaattagccgggcgtggttgtgggtgcctgtagtcccagctgcatgggaggcaagagaatggcttgaacctgggaggcggaggttgcagtgagccgaggttgcgccactgcactccagcctgggtgacaaagcgagaatctgtctcaaaaaaaaaaaatatatatatatgtgtatatatatatatgatttttggttataaaagaaatgcctgacttggagtgaagatttcctggctcattggagggatacactttctgtggttacatggtaaagccagagtgttgcagtttcatcttagaacgggcttcagagatggaagagtttttttttaatttgtagacaatagcaggatcaagaaaagtacatagttgagctctatttaccttttttaaagaggttctaaaagcagggattttctgtgtgttgtagtcaatgtataagatagaaaaagctgcttttatagtcaatgtgaatttatagacaaatactgaaatgtacttttgtgcctgtgttttttttgctagctcattaaagacagtttatgtacctatatttagaaaatcaattgtcaaaatacataaattttgaaaagtgaggaaatcaagcagatttcattgagttacattgtgttctcattgtcttatacttattcgagttttgattaataatttgatttcattttaccagatctttttgtcatttcttttcatgtttagcatgtgtacaacataccatgttgattattttgaacttagttaaatacttgagcatgcagcatattgcctggcatataacaggtgcttaataactgtctgaattcatgaatttaatagatggctattgtaatgtgttgtattaagatgtttgctgatataattttttaatggtatttttccattaaccaagtattttcagatattaaaagggggttgttatataacatcccagaaataaaatactaatattggtcttcaaaaatacgattttttggagatcatagtaaactggttgacattttaaaaaattgtgttatatgaaaactatagataatattcctgggagttggagtggcatgtagggggtaacaaagtgtgaagagactttctgtagaagatttagaataaatagtcaaaaatgtttccagttaatagagatgccaatattttaattattttccaccatattagtttcttttctgggagagaaagatattaattatattgttgattcttacattatgattgggctgtacaaaatctgagctagtaattctctaaccctcaaatgccatagaaattaaagttgaaagttgttaaattttatgggttgtagcacatcttgaaggttaagagatgatgtttgccttctgtatatgttaactttgtctctatggttacactaactctttttatctcctctttctagtcatacagtttgtcaagaaagaaaatagtgcactacacctgttttgaccaacggaaaagagcaaatgcagcatttttgataggtgcctatgcagtaagtaccttcttcatgattattttctataatcaggccagtgaaatgctaacactgtcaaagaaaatccaaaccagtttttcagtgggattgagagacggtggagattattagcagtttgggaattgatctgtagtgagaaatatggactagcagtggtggaatgtttactctttagattttattttctactagttaatgagagaatcttgaaactgcaatatgtagcttgaattccacagttatataggtattttaataaaaagaatacctaccaaggacatttctaggaaaaaaaaatgtgtgtgtgcatgtgtgtatgtttaaatgcatgaaatatgatattatggaagattttaaaagacttgacgtgttcgttttttgggagaagaggaaaccttagattgcacaggggaggattgttattatttttatcaatccattcattaatttatacaattgtttgcagtaggcaaactgaatataaatccttgcatatattatagcttccctaataactacaagagacttttccaaaactaatttcaattagaaattttgttctctgcagacactaacatgtcagtatgaattccacatgaccatgctgtagagttttaggtggtgattctggaattttctatatatgctgtgattgggcaaaagcttagaaagcagaaaccatcagagctaaaacatacttgcagggatatgtgtgatatcagctgggaatatgctggtttaaaggcagggagcagagaggtatcatttcccctcatccttggggagggctcgtgctcctctgaagccatggaagcaaccctgctgagtgacttttcaagggcctcattctaaggaccttgagggaagagggcaccagctactagacctcaaactctgccccatcaacccaaaagctctaggggaaaaagcccagcagtattgctggaaaagctgtcagctattgcagggtgcaggctgagaagagtggcagactgtcagccaggctgtgggctggggccttgcttgtagcactgaggtgcccagccctgcccaccttttgtcccttgatgtagctgcaataaacccttggcctaccccttgtggcagcattctttcttgctctgtagatagcatggtatagtacaaggaatagtgtctaagagtcagaaaacatgtttttcatcttgaagggctctgtgatgatgcactttatctctctcagctttatttagtttccttatccgcaaaatgagagggttggatgtaatgacccctacatttcctttcagttcttaggatactgagagtatttgtagtgccagccaggctattgcttttattttaagagcatacatgaaaagctggcagttagcatgaaggttcagtgaagttctggtaagctgaatattttttaccttacattgataatgactactcatttgaaattgatgattgacactgtgattgaaatatggaaaaagactgtactaatttctggattcaagccctgtaaacaaacgtgtttttcctgcagggttttgtgatgctttgtaagcgtgttatttgtggatcctttctcataaaggattgccatcaagaagaggtcatttgccactcttcgcacgtctttcttttttttttttgtgaggaccaaatgatttttattcatattcgtctggtttatctacccaaagtgttcaggacagtgttcagcacatattaagcttgatatagcagttatctatgatgatgatggtaacgatgactctgtatagtcactgtgtttctgaggtcttgtttggtaatcaagaatgtgtttagaactatctctttattagacaaggtaataaaccaaaagtttccaacttcctgtacatgttgaaagttttgaataaagatccttggatacaaaacatggcccacatggctcaaaattaattctgtgacataatattattctgaagtcatacttattttgaaagcctaaaggtttttcttttttatggctataaaaatatcaccaagctagacattttaattctgttgagatatacaaatagaattaccgcagcagcccacacattctatgatttctaaacatttaaacatcaatggttttgggaagttgctgttgtccttaacagttcattaaaagttcagatgccttttgtgagagcccaacttttctacccgcgaaattgtcttttcagaagtcttgccggatgttttctttgtttgcctttccatgttgctgtttaatttgatagatttcattttctagttgaaaaatagtccgttcagtctcataattcttactacagatatccaatttgactccatttctctcaatttagatccagctgtgagttgcatgttctttctctgccagtttaaatcttgaatatgttttcttaacttctgaagttctttctgtgcatgttcaatcatatgaactagattttcattgtatactttccaggcattacatccatgctgtgacattagtttcagattctcagttgtaactgcttgatgctctaactaggccatagaattgtttacacattcttgccatgcagtaatgccatttttttgaccagaggaaggggctggaagttcatatcgtttcatactgagcaattcagttggttgtcgagcagccagtctctcaaattcatttctcatcatgtcagtttcaaaagcagaataatccaggactgtcaggtatctcaggtagttcatagtaggttggtatctgcgagtttacttctccaccagcactgcagctgcttcctgcacaccagaggcttcataaccttgatcaaaatatggatcaagtggtcaatatcaatcaagcggtggcacacgactgtaatcccagcactttgggaggctgaggcgggcggatcacaaggtcaagagacggagaccatcctgaccaacatgtctctactaaaaatacaaaaattagctgggcgtggtgatgcgagcctgtagtcccagctactcgggaggctgaggcaggagaatcgcttgaacccaggagtgggaggttgcagtgagccaagattgcgccactgcactccagcctggctacccagcgagactctgttccccctccccaccgcaaaaaaaaatatatatatatatagcagtgcatccacctcaacctctccagccaccaaacctgtgcctgccattctggggacctcaggtttgccctactcttctcatttctttacccctttttccctcccttgcatcttctctctcttctttccttacttatttatttatttatttattgagactgagtcttgctctgccccacaggctgcagtgcactggtgcgattgtagaccattgtatcctcagactcctgtgctcaagcgatcctcctgcctcagccctccctagaaggtgggactgcaggtgtgtgccaccacagccagctaatttcattttatttttgtagagacagtgccttgctttgttgcccagcctggcttcaggactcctggcctcaagtgatccccctgctctggcctcccaaagtgctgggattacagatgtgagacaccacacccaacctcttctttcctttttaacacctattcttcctgttttgtttagtgtggttcttcattttagcagggtgcctctagaactttgaaaggattaaattagatgcgttgagcttgtcacaaaatactctgtgacaaaatatgtcttctgatggagaagtttccaccactttaaagcaaccaaaaggggaaaaagcagtcctagcatggtggaagaagtgctgagtacagcatgagcttgtcttacacactagttacagtcttgagaagcagtgtgaagtgattattcttgaactggtcatgtcccaattgatttttctaattttgtaactgtattccccagagggctttttgacacaaacccttaatacacacggaactaaaaattggcagtggatccttaaagagaattttatgcctttcttcgtattgtttgtatgtatttacttgttgacagtcttgtaagatagtcaataatatccattatacatatatctcagttaaaatttacatatattaaatgttgctagttggataagtgtccgttttctgggggaatcttctctggatacaaaagacctttaccttcggagcagccatgtaacttacatgaggcaagctaggtaggtaggtatattttatcaaacagaagtctttaagagtgaaggtgttcctgttcctaaaatgtggaatcggccctctgttaagtggcattgactgactaataaaagtattttgtactaagacaaacctttttctcaaagccttagttttctcatttgtaaaatttggataatacctgagtttccttatctgcttcacaggattattgtaaagatcaaatatccaactgcctgtttgatagctccatattatacatctaaatgatacctcaaatttattgtgacaaaacagaagtttttattccttctctccctaaatgtatttatttcccaagtcattccctttttagtaagtggactaccatcagtgacttgctaaatcaaaagagtagtcattttgatttcttttgttcgctcatcccacattctacttattcgtaagtttggtcagctctacctctaaaacatattgaatcagaatgtatctttccatctctgttgctatcacctagcccaagccactgtcattgttcacctggattatgaccacagctttatatgttgtctcctttttatattcttgcttcccattaatttagttgccatacaactgtcagagtagtcttttaaaattgtaaattagatcacgtcattaccctgtttcaaatctgttattgctcactgatcttggcataaaatttatccttaccaatgccattaagatcctttctgatctgaccctctctacctctgtggtctccttgctcaagttgctcccctcatgctggacttctaactgaaattccatgcttgttcctaccaaagagccttgatatttctgttctatctggaatgttcttacttcagacctctgcatgcctggctctttctaatgttactttctcagagagattttctcttaatttctaccctgttacctccacccctagtcatcctttagacctttgttgctttattttctttacagcatgctactatttgaaattactttgtttatgcatttacttgcttattatctctttcccagactagagggtaaggactttatctgttttgttcgtcgctgtgtgtggagggtgataaaatatttaacaaggggttaggccgggtattcacccgttgagttggaagctgggacagggtcctggaggcttcttgctttgctgaatcttggggaagtctagggcctagggggtgggcgtgggtcccaaggaagagactaggatggccagtgtggagtggagtggtgtgctgtgggctgcagctatttaccaactggtatagaactatttcagtatttgaacactatcaatttagagctgtgcctggtatgtaatgggtgctctgtaagtatcttttgagtgaatgaataatgggatgacaaaacatgaaagaaagaaggtaatatatgggaaactcctgaaaataatgaagttggacgtaaggtataaagtggtgtcttcccctttaccagaatatttgtagtcatgactgagccaactttggtttttaaagatacagaatcaaagtaaagagcatagaccaagggtagtaacaagtatacaaaattacatcactacctagcctttttttaaaaaataaacttgtattttcccaatttttttgtggtaaaatatacgtaacatgaaacttgctgtcttaaccattttaaaatgtacagctcagtggcattaactacttttcaactgttgtgccacaaacaccatggcttacttttgagtgtgccatcttgtggcacttttggtttctctgttagataatgacttcaagtatttcacagcttttgtgtttctatttccttatatctaagtggggggagactttttatgctttctctcatagagctgtcataaggatcaaaaaggagataaaatatagaccaagcttgtttaacctgcggctggctttgaatgtggcctaacacaaattcataaacgttcttaaaacattatgagattttttttttttttaaagctcatcagctatccttagtgttagtgtattttatgtgtggcccaagacaattcttcttcttccaatgtggcccagggaagctaaatgattagacaccctgatatagaccatcatgttcagtgatcttaaagccagggttgctggaatgatgtgggcactggagaccacagtgacacttagcagatgctaggcacccattttagggatgcctctactagtagagcatctcttcaccccctgcattgtgacattgtgctccttgagatggaaggctcagatttaagaagagaccagctttgtcagaaaggtgtttcccttccagggcaacactcagtgcagttttgaagttaggatgtttagatcattgtagcatctaaaacactctgatatgagtttgaaaaagatggctttttaaaattatgagtatgaattaattaggttcttgccatgtgcttaaagaccaagtcttcactagtacctgtgttactatattgttttcagttttgcaggcctaggtcaaggagaatttggatcaggtcaccgtgactgaagaattggaaaataatatgtatgagaagatgttaaaataagtgtgactgtatagcttagaaaattaagttcagagttaaagaaatacagtttttttttctgttatgtggaggatgcttaaacagaggtggtagccacattatatactttccttacccacttgttaagtctttgcattgctaaattagaggtctacattgtggattaactgagactagcctgaaccagatgtcatgtctgaattgggaataacaagcctgaggtttttagactgtctaaccatgtctgtgttggctatttattttgtagactacacttaagacctaagtagttatactctactgctaagtctgtgactaattgcaaagaagccattctccatttggcttagtggttgtgagcaatgactttaacatagccacaggctcactgggctttgaatccaattgttagttgtatgccctgagcaagttaacttatccaaactcctgtttttttcatctttaaaataggcataataataccctattttacttgcggtgaggactgaaggaggtcatttatataaaggtgtcatcggtgcagtgtctgacgttgtatgcacttaggaatgtctggtggccctggcagggaagctgtgtggccttccacaaagttttctgacccagtctcctacttcctatcactcacttttgtgcgtagaccctttgggctacctccctgatgatcggacagctacttcccctctttctgtctgcccatcttcctcttgtccatcatatttttcacttaaatacttccttggctcagtaacaacactcatatggttgttaatctgattattgcttagtataattcactggaaggtaggagtatatttctctccaaggatgttattttaagggaatattttgtttaaaccaaatgaatttgtgagatctgtagtcaggtattcattagttcagtaaatctttgtttagctactatgagcccttcctagcactatggtaggttctagggaataaaatatatatacatataaacaatgcctagcttaaaatgtgggacaggtgagcaataaacaattgtttaaagcgggcaataggtacaattgggtaaatatgaatttatctaacaaatgtttttttgaggtattttcatgtaacaggccttgttcctggagttgaggatactaaggtgaatgactccctgcctgttggtgtgggtgtggagggctgggttcagacctggagagaggggaggttccaagatggtcaatcccagcaggccaggttgctgaggaaccatcagacagggagaatagcatgaaggtgatgatgctttttctggtggtaggggagtgaagggaggctggaagaaaactagttattttaaatttttaatttaattttattttaaatgtccgttttgaaaaggggataatctaatgagaagataggggtgtttttttcccttacaattaaaaaaactttaaaaagtggagtaaccacattgtagaagaaatgtggaaaaattctctcgcagttctaaacctgaattatttattaggtgtgattgcagtgtagttttttgagccttttaaaatttagcctatgtatgttttgccattttgctattcaggtgaccaaataatatttcatttagagagaataccattgtttaacattttagatttctttcaaaattttttataatgtaacacatctctttctatattataagtgtttcttttcgtggatttttgtctttagagtgccagaaatagggtaaataattttaaatttcagagtttttaagactcttggagcatattgctatacttaagcaagtttatactaaatttggtattatgtgaaatctccaatttcatgtaaactttgcatattgggtatgaacattacagttttagaaatttaattggtgaaaaatgctacctcattgttttagtaatcatttttttgattaatgaggttgattattctcatgtttttatttatagatttattaactgtttgaaaactttgtgtttttatatttgtttcctatatttagaccattttagagtggataagtgctattagcctccattaaaaaagtaagttagccaggtacagtggtgggagcctgtagacccagctacctggagactgaggctggaggattgcttgaggccaggagtttgaggttgcagtgagctgtgatcacaccactgcactccagcccagaccctgactcaaaaaaaaaaaaaagatgaagtcattttatctgtgtctatttgtttcaatagatacagactactagaaatcatgcccatcagtccaagtttctgtaaaaaattaggaagtccatagacctttcctgctgttactcattagaatgtcagaatgctctattaaatacttctgtatacctgaatataaatgtgcttaattggaactgctgataatggacctattgatttttgaacattaagccgtctgctgagtatacagaaattttaacagaacagtattatttaaaagtggttacagtgtgtgtgtttaaatcattggacactgatatacccagacaattaactgtgattttgtttttgtttttattgtttggaccaagtatattattttgcttatattttgactcacaattctgtaaattctgatttcagaactactttacattgacattaaaaaactgtagattaaataaatgtcatttaaaatgtaggtaaaattatcaaaaagttggttcaaaataataaaggcatttactttaaatatttattgaaccaataatatattagatgtcagctactagtgttctgtcatccttctctgtggcttgttggtaaatctaacggcagtgtttgcttctgcttatagaagttagtggagaggaagggaggggaggcacatggctggggctgggcaatttcctgtttgcagttccttccttttgtagtttgataggcaactcttttgtgatgttgcctgtaaatgggccagtcttttatctttgtaggcttgtatttttggtggctttgaaacagatcaggctccttaaactcatacagcattttcaatttcagactctttgagactggacattctgttagccttctgcatatgggtagagcagtgtcacctcttaacttttcttgcctgtttcatttagctgtgggcgaggaaaattagctgtttgcttttcattactggaagatttatcaagttaaggtgcatcaatcttttcagtttttttttctttttttcttttggcatcctgataataaacttcctttgtgttgtaaataagctctcaaatttatatacacatacacagctgcacacacaggcatacatactcactgcatttagtactatatatttagtagggatgcactgtgtatgcttacagtaatttactcacaaatttctgaatcttatcagtagctttggaataacatatactttctgtgtgaagaagctaacatccatttgtttcattttaggttggtgcaaaagtaattgcggtttttgctacttcaaacaatatatactgaattaaggggatgtacttttttttagcacttgaaattatttatttaccagtttattatctctccctttaagggaaaggactttgtcttattttccacaatagccccagtatctagaacaatgtctgacacatcctaagcgttcaataagtgtttgtgaaatgaatgactgtttaattgataaataagtcttggttgacttccacagttttgtggaagtttaatatggagtaatttaaaacctgtgatgtgcttaaagataaattatgaagtcggtactaattgtaaaaataacagcaagaatcagtgttgcaaagcattaactaattttcttaaagttactgagtaaaacaaagtgtgttatatagaactgaaatgggctttgttaatactgtacatacaaacatttgaaattaatattgtggataataatgttaattttactctcagcattgtttctgtttttctcaataggtgaaactacttatttatacatataagtatttgctactaagtgtcaacgatttttttaacagccatccttgcagtctcaggataatttccagttaagaattaattcatggggccggccacggtggctcatgcctgtaatcccagcactttgggaggccaaggtgggcggatcacctgaggtcgggagttcgagaccagcctgaccaacagggagaaaccccgtctgtactaaaaacacaaaattagccaggcatggtggcacatgcctgtaatctcagctactcaggaggctgaggcaggagaatcacttgaacccgggaggcggaggttgtggtgagccgagatcgcgccattgcactccagcctgggcaacaagagcagaactccattaaaaaaaaaaaagaagtaattcatatgcttgaaagaggaatactagaaaatttttaattagagttggatcttgaaaatttttagctgcatgcattcattatgaaaaaaaaaaaaatcggaaaggaggtactcaaagccctgaagacattatccattatcagagtgtgacttgaaattgtttgccgtgcctgatatgagagcatgttctgtacatgtctacctaggcttcacctggcatttacccgagtgaggactatcagtgttccattttatacaaatatctgaacagagcaggctcacatttagacgtattccccatgcagagctacaggcttccaatcaatgagatgtttactagaatatatacagaaactgaaggtaattctttaaattttttgaaaaatgaggttatttggctgcctggtaattgcagcatggtaaaatttgatattgaatgtatttgattgtgtttactgttttcttttagttttaaaaataaacatcttaattagaaaaaaaagacccacttttgcaagactggtgaagtatctccacagaacactcactaggaagaacccttctgcagtcctgctttgtcatatttcagttggagaatctgaacccagagaggtcgagtaccttgtccaagatcaaacccagctaatggagaaggactagaaccccgatccctaagtttctagctgggagctttatccagtcatatagcatgtcaccgagcactgctggtcttggtatattatactacatctaaaccataatagtctgcaaaaagattagaaacagcatgcagtgtggaagagtagaattttctatttagaaagcagtgttgtagtgtttcaaatacactagtcatacagtttcttttccaggtagcttctgagctttgattctggctaatggggctaacactgccaaaactttcgtgtaccaaccagggacaatggtggttgttctcatgtttactttggtgatgtccatggatgtgttggggtaggtctaagtgcaaggagtgatagggggataagagaagcaaggaatgatataaagtaggttgggctggtatcttaggacagagttttccaagctttattcactgtaattcaccataagaaacacattttacattgcagcctagtacacacacatacacacacgccattcacatgtataattgaaacaagaggttcatgaaacaattcttacaaggtgtaaagcatactgatattttatattctgttctattttatttaaaatatgtctttacccatcaaattgacttcactgctcactaatgggttgtaacctgcagactgcaaaacatagccattggagaatctacttactgtgcttagatccagaaggttcttgaatgttcttagggcattgatttttggcattgaatgagcaggtgattgtttgattgctctgcatctaggctagtttgcaattaacatgaatggcttaaggaaaactgaaagtattctgaagactgctctctctaaacatcaagatgcatacctgtctctggatggtttttattcagttggtacttgactttttgggaaaatctgagtttgttttaagccttcaaataatatgatttatcttttcttatctcactttcatttgaatcactgtgttacccttaaagccctctcatactcctcccttcttcctggcaaccaaaatgtgcattgattcagtttgggagaaccttgattgagaagcctgtagctaggtcaacgttgtgggccctgaggagccagcgctgagcctgccttactgggtctgtcattttagtatctcattgggcttagtttctaagtgtgggctgaaaagttatataatgtcccattcacctcaagacatcgaatcttaaaccttaggtttataagggttttcttgattgaataattttaatttatgtaaatttttatttcaagaaatgttttctatttgatagagtgagtaaaattgtggcctttcccctattttggaaagtgaataaattcattaaacccctcttcatgagcactttctgaaattttaaataaaagaagagctaaccgcttgcagtgagctgagatagcgccactgcactccagcctgggcaatagagctagactccgtctcaaaaaaaaaaaaagagctaactgcaactgctgttgagtttgctgtgtgttcagttatttctaagatttttagtgttcaaaatagggttgccatgctaaaaaacagactgtggccatgtaaactactaggttcccacgtcaccaacactctgtctctgtgtctttcttaattttcttccttgttgctcttctgccttagctttgcttttcctgtgcctatcttcccaaacccccgtaacaaatgcttgtaggggctttgaattttcattatggaaattcaaacttttaattgatgaggacttaaagccaggggtgtagttatacagcaaattcatgggtaataaaactaaatagtgggatggctggcgtggtgtctcacgcctgtaatcccagcactttgggaggctgaggcgggtggatcatgaggtcaggagatagagaccatcctggctaacatggtgaaaccccgtctctactaaaaatacaaaaaattagctgggcgtggtggaaggtgcctgtattcccagctactcgggaggctgaggcaggagaatcgcttgaacccgggaggcggagcttgcagtgagctgagattgagccactgcactccagcctgggcaacagagcgagactccgtctcaaaaaaacaaaacaaaacaaaacaaaacaaaacaaaaaactaaatagtaggactgggaaagtgtaacctcagcctcaaagaaatattttaggagggctgcagtacctcatagagttatttaataagaaataatatttgtggttcatagtttcaaattaatgagcagacagacaagcctttccatgtgaatatacatactgtaggatgaatcagacaattctttcaagagtgggtgtacgagtcatttagtgggcctgctttgggaaatttcttaatttaagaaaccataattcccttctctgataaacctttcctgatgttttctccctagtttttctgcctacccctcactctctgcctcccagctcttcactgtcattttcttactatctgacttagaacatggctcatttatagcttttcttacttcattttgcaattaattgcacataatatgatctactaggatgagctccttgtacttacttgctttgcacactcgcccttgtaagaatgagctttttgagtaaagggataactcttacatatttttttttcttcaacttttattaagttctggggtacatgtgcaggatgtgcaggtttgttacataggtaaatgtgtcccatggtggtttgctgcacagatcaacccatcacccaggtattaagcccatcattcattagctattcttcctgatgctcttcctcctctgaggcacagtgtgtgttgttcttcactatgcgttcatgtgtgttctcatcgtttagctcccacttatgagtgagaacatgcagtgtttggttttttgctcctgtgttactttgctgtggataacagcttctaactccatttatgtccctgcaaaggacatgatcttgtttctttttatagctgcatagtattccatggtgtatatgtaccacattttctttatccagtctattattgatgggcatttaggttgattccatgtctttgctattgtgaatagtgctgcagtgaacatacacgtgcatgcatctttgtaatagaatgatttttattcctttgggtatatacccagtaatgggattctgggtcaaacggtatttctgcctctaggtctttgaggaatcgccacactgtcttccacaatggttgaactaatttacactcctgccaagagtgtaaacatgtccatttttctccgcagtctcaccagcatctgttgttttttgactttttagtaatagccgttctcactggcatgagatggtatctcattgtggttttgatttgcatttctctaatgatcagtgatgttgagctttttttcatatgtttgttggccgcaaatatatcttcttttgagaagtgtctgttcatatcccctgctcacttttcaatggggttgtttggttttttcttgtaaatttgtttaagttccttacagactctggatattagacctttgtcagatagatagattgcaaacattttctcccattctataggttgtctgttcactctgatgatagtttcttttgctgtgcagaagctctttagttcaattagatcccatttgtcaattttttcttttgttgcaattgtttttggtattttcatcatgaagtctttgccccctgcctatgtcctgaatggtattacatagattttcttctgggtttttatagttttgggttttacatctgagtatttaatccatcattagttgatttttgtgtaaggtgtaaggaaggggtccagtttcaattttctgcttatggctagccagctctcccagcaccatttattaaaaaggctgttctggccaggcacgtttgcttatgcctgtaaccccagcattttgggaggcagaggtggatggatcacctgaggttgggagtttaagactagcctggccaagtggtaaaaccccgtctctactaaaaatacaaaaaaaattagccaggcttggtggtgggtgcctgtaatcctagcttctcaggaggctgaggcaggagaatcacctgaacccaggaggtggaggctgcagtgagctgagatcgtgccattggactccagcctgggcaacaagagcgaaactctgtctcaaataaaaaaaaaaaaaaaagaaaaaggcagtcctttctccattgcttgcttttttcaggtttgttgaagatcctatgtttgtaggtgggtggtcttatttctgagttctctattctctccattggtctttgtgtctgttcttgtaccagtaccatgttgtttggttactgtagccttgtagtacagtttgaggtcaggtagcgtgatgcctccagctttgttctttctgcttaggatcatcttggctattcaggctcttttttgattccatatgaattttaaaatagtttttttttctaattctataaagaatgtcagtggcagtttaatgggaatagcattgtatctataaatgacttcgggcagtatggccattttcacgatattgattcttcctgtgcgtgaacatggaatgtttctctgtttgtttgtatcctctttgatttctttgagcagtggtttgtagttctccttgaaaagatccttcacttcccttgttagctgtattgctaggtattttattctttgtgtgctaattgcgaattggagtttattcactgtttggttctctgcttgcctgttgttggggtataggaatgctagtgatttttgcacattgattttgtatcctgagactttgtggaagttgcttatcagcttaaaaagcttttgggctgagatgatggtgtctcctagatataggatcatgtcatctgcaaacaaagataatttgacttcttctcttcctatttgaataccctttatttctttctcttgtctgatggccttggcgagaacttccaatactatgttgaataggagtggtgtctcactcgtatttgtatctccagtacttaacatagtgtctgtctgtgctattttaaaaatttatatttatttttattttttaagttgacttcgtaattgtacatattcatgggatacatactgatgtttttttaaaatgtacatgtaatgcttttatttaaaaaaatcttttattttaggttcaggggtacatgtgcaggtttgttgtagaggtaaatttgtgtcataggggtatgttgtacagaatatttagtcacccaggtactaagcctagtacccaatagttattttttctgttcctctccctctgccagcctccatccccaagttggcccaagtgtttgttgttcccctctttgtgtccatgtgttctcatcgtttagttccagcttataagtgagaatatgcagtatttggttttctgttcctgcaatagtttgctaaggattatggcctccagctccatccatgttcctgcagaggacatgatcttattcttttcaatgactgcatagtattccatggtatatatgtaccacattttaaatatccattctaccattgatgggtatttaggttgattccgtgtctttgctattgtgaatagtgctgcagtgaatgcacatgtgcatgtgtctttatgacagaatgatttatattcctttaggtatatactcagtaatacgattgctgggttgaatggtatttctgtttttaggtctttgaggaatcaccacactgctttccacaatggttgaactaatttacactgccactaacagtgtataagtgttcccttttctctgcagcctcaccagcatctgttatattttttgactttttaataaaaaccactctgactggtgtgagatggtgtctcattgtggttttgatttacatttctctaatgatcagtgatactgagctttttttcttatgcttgttgactgcatgtatgtcgtcttttgaaaggtgtctgctcatgtcctttgcccacataatgaggttttgctacatgtgatatatagtgatcagaacggatccaggcaatcagcatatcaatcatctgacacatttataatttctttatgttggggacattcaatatcctccttctagctatttgaaaccatatattactgttaactgtagtcatcctacagtggtatggaacactagaacttaccctatctattaatagctataattttatatcctttaacaaatatctccttatcccctgtattagtcctttttcacactgttgataaagacatatctgagactgggcaatttacaaaagaaagaggcttaatggacttacagtttcacatgactggggaggcctcacaatcatggcagaaggtgaaaggcacgtctcacatggcggcagataagagaagagaacttgtgcagggaaactctcctttttaagaacatcagatctcatgagattcattcactatcacaaacatagcacgggaaagacctgccctcatgattcagacacctcccatcgggtccctcccataacatgtgggaattcaagatgagatttgggtggggacacagccaaaccatatcattccactcctggtccctcccaaatttcatgtcctcccatttcaaaaccaatcatgccttcccaacagtccctcagagtcttaactcatttcagcattaactcgaaagtccatagtccaaagtctcatctgagacaaggcaagtcccttccacctatgagcctataaagtcaatagcaagttagttacttcctagatacaatgggggtacaggcattgggtaagtacagccattccaagtggaataaatttgccaaaacaaaggggctacaggccccatgcaagttcaaaatacggcagagctgtcaaatcttaaagctccaaagtgatctcctttgattccatatctcacatccagtcctgcccttgactcctgtcaccaaggttgcagttgcaaggctttcaatttgaaatcaactgcttgttaaaacataggaatggacccatcctgttcaaagaatgtaggaatatgtgataactctcctaatagttatcagttcctaataggaactggagaatccttgaatctcatcagtttgaatgtggtaaagtatttatattcccttcaaaaatgtctgaaattttgagaaattcatcagtacttgcaagtgagttggagttttagcagcaagctatgtattttatccagagtcaaattttaagtttttagcctgggacctgggaaacatagtgaaaccttgtctgtataaaaaataaaaaagaattaaccaggtgtggtggtgcatatctgtagtctcagctacttgggaggctgaggcaagaggattgcttgatcccaaaactttgaggctgcaatgagctgtgattgtgctactgcactccagcctgggtgactgagtaagactctggctaaaaaaaaaaaagaaaaaaaaatttttattttagttttttttccccaagaaacatatctttgaaatgtaatgaaaatagtgacaaaatggggataacattttaaaagtttctaaaatcattttttttccaagacggagtcttgctctgttgcccaggctggtgtgcggtggcacaatctcagctcactgaaacctctgcctcccaggttcaagcgattctcctgcctcagcctcccgggtagctggattacaggtgtatgccaccacgcccagctaatttttgtattttagtagagacagggtttcaccatgttggccaggctggtctcacactcctgacctcgtgattgcctgcctcggcctcccaaagtgctgggattacaggcatgagccactgtgcccggccagatatataaatttttaacaaaacccaaaaacatttggaatatcctggcattgggctgtgtttaaaaagtatattagactttacacatgtgtactgatgaaaatattttacttctgaattaatagaggaaattaaagttgttaagatccttttattacaattaaaatttgggggatttaaccacgatggtgatcaccgaattctcgctattaattcaatttaaaaaatttttatctctctcctgctcctttttattaaggaacattggttgatctagacctcaggttaagtacaagaacttcaggatgagattggaggtctctgacttttactgtgttactctagcaatgcggagaataatttctcctctgaagaactgctctggtagagctgtatagtgatttttttttgttcagttataggaaccgatacatcttagagaagatctctccctgacctacctaaccagcccacccttctccactccccatcctcaccatactggtaaacctggataaattaacttgtcacaggaggcagaactgacaggcccaagagcctcctatattattggcattccagtcctttgcctctaccttcgcagccctcagcttacttcgacacccatagtgcaagggaacactgttgtgtgaataaccgcttacctcttttctcctctatcactctttcttgttgtctctgtgtacctttccctctccatttttgtttttgtttttcctactggttccatctctttctccttcctgtgttctgatcacttctctcctattgctttaaaaagttttttttcttcagacaagaatgaaaggaatctcctattggtttgtttttccttccttttcctcctttcttagttggctgtcggagttttttgggtgtgtgtaacagaaattgactctgacttactgaagcccaaaacttagtaatgaatttcctggaagtttagtcaaaagagggtagtagagggctgctgtggccttcccttctaataaaaactctttcttcattttaatgggaaatagtattttcctctctccttttgtgtgattcatttgttcattctttcattgaacaaacagtcattgagcacctgggccagacaccccttctgagctctaaggatatggtaatggacaagagagagaaaatccctgtcctgacagagcttagattttgctgggagaaacaaacaaataagaggtcagtgataatggcaagttggtgatgtgctggtgactggctggctacttcagattggaagttcagagatgccctctttggggtggtgatgctgataaagaggaagaacattctaggcagagaacaacacatacaaaggctttagagtgggaatgaactaggaaaggctgaggaaccaagacaaagctgctgtggctaaaaaggctataatgcaggcgatgaggccaaagtctctgctagggcttgtatgtgagagcaagttcgaattttattcttcgtgacctgtgggtctcttagggagctgaaatgacctgacgtacacttaaaaacactttaaaaactcaccttttagaatgtcacttgaagctctccatggtacagttatctgtatcgttccgatttctcttatgctactctgccataatgctctgattacttaacctttaaaggtttttgtgaggagtacttaaagtgggggatctcctgggattagatctgaaatgatatacaagggatatgccatgaggtcaggaacatacttgctttgttcttggtattatccatggtgcttggtactggtaagtctttgctgaatgaagaaatgaattacctggtgtgtagaactgtggaaagctctctgtttttctccttttccttcctccttcttcattttccttactaccaggaaacctgccattcaagtcttgttgctcataggaagatgggggtgagaaattgctggccagggtgaaggggggctgttttctggaagtagtgaggtctgcctacagtagtgagccagaataggagggaagttcccagttactgcagggaaggtgggtgaacttcctgtatgttttatatatatatatatatatatatatattttatatatatatattttatatatatatattttatatatatatattatatatatatatatagtatgtatgcaatggatctgttgattgggtttaagttacttttatttaagctgtaattgtttcagttctgctgtttgtggaagttagtaagctaaagtatgtagggaacatgtttacttaaaaaaatctatgcacatttaagaacgattaattctgcagctacttgggaggctgaggcaggagaatcacttaaacccgggagatggaggttgcagtgagctgagatcgtgccactgcgctccagcctgggtgacaagagcgaaactgtcaaaaagaaaagaaaaaagaaaaaaggatgattaatttctgttatcttctcgaaggacaatactgtcatgtggcacatgtttgaacagttggggctaatgcacagaaaaattgccacagaatcttttctgcaaacacctgactgatgggcaaaactcttgtttctcctgctttctctaagcaacaactcttgtaaatactggaagagaacaaccagttccttgtttgtgtgcattgttagttttctattcttcagtgagttcaaagaacagtagcttacaagttactatgattctagacctgagatttagttcacatgctttgtggcttttgtgttagaagtttggataacatctcacctgtaaacttcctgaaatttgaaaaagaataaaatgactatatatgaaaaggcttcttaaaattttaattttaaaaacaattctatgtacagttccttaagtatatactctagttactaaaataaatacattgggttgctggtctaccaccttctctcttcgaggagatcacagactgcctaaagttgccataagtacatgggaagcaacccccacaagtttggttccatccctggcaagtttggtaggcttcctcctgttattcccagaaagtttatgatctttcttgttcacttttctcctcaattactttccttccagtgacagcaagaaaatttcctctcatatttgccctgctttccactgcctcagatttgaaatcagctgtaatcacaatgccaaatactgaggaaagttatgcattttgaagcagaattgtatataattaagtaccaatcaaaacattagaaataattcagggttcactttaaagccattatagatgtattccttgatttcttcaagtttttctaatttagctttccctcaagtattagcattgagggaagataattaacttaagaaactaacacacttacttaattattttagttttaattttgaaaatagtgtcttctactacattttattttagatatatgattttaatgataatagtgaatatattatcatgtttggactagcttaggaaacttaaaatcctaagattttgtctttgggaaaatatttccagaagtcaaaatattatccttggcaaggcacaatggctcatgcctgtaatcccaacactttggaaggccaaggcggtaggattgcctgagcccaggagttcgagaccagcgtgggcaacatagtagaccccatctctactttaaacaacaacaacagaaaacaaaacaaaacaaaaaaccgcatattatcttttacagataaatgtttggagtataatgtatttgcaatttaaagactttctataattgctaacaggtgttaagaggatttaaacatccagtcctggtctgttacagtggatctgcgtcaccatcttcattacaaagttatggttccttgccttgtaaacttgatccaattcagtcctgggtttaaataacatacttttttttcattttctttcttcatttggaaagttttatgaaatgaagctcatgatatacccagaagtaagcagtgaaactcagcaccaggagtttttaacatgaaaccattcagtttgggagtatgtattattcaagtgatattctggagtgagtctgtttttgcgttttatataaggactaccttttgatgatgaatgataaatgttctacagggttatatttagctgcatgttgtaacataacagtattttgctcagcttgcgtaagactaagggactgaggttattttggggcgacacattttctcctttcccccattaacgtgtccttttaggtttctgtgtgttaagaacattggcttggtgtttcctttgtttgctttataaggggttggactagtttactgtcacacaaccagctcagtgaggtctatgctggtacatgaactcacctcaggcagaagagaagcattgtgtcactgagacaatgctagcaagagatgtgcatttgtgctggctgtagctgtcagttctggaaggatatctttttaggctgattatgaaaattctggttgtaatcaaattagatgggaagacacacatggctaatattgtctgccattctccctaaattgcccatcaaaaagctcccactggtttcactctaattatacccatgagaggggtgagagagtatttctattctaaacgaattgtcaaataaataaagtctgctgtttgttgactgtatgttaaatcccagcttcaaattaaactgtaaagagatgtcacatgagggtatttcagagcaaacagcacctcaaacaaaaaacatactcatttctagacctcattctcatgaggattcaaatactgaaaattgttaagtatttttagggtagaaataagtgatgtctatagagacctgatgtcaggttctgcttaacttctatgattagccttgcctccatatttgttaagcaggtatattgtcttatgctttgctgacttcataatctgtgatttataatggactcaaaacttgaagaacaggaagaatgactttattttacaacatgttcaaccaaagactgtaggaaacaaaagacattcattcttactctgttttaattagactatttagcatgatagatttaaaatagactgaatataatacaagttttaaatacagttgtgtttctgatttgtaatcagactgactttcctaattcatatgtgattaacattgaatatttctatttccacaagcaattagaacaaagtggaattgtttatgcatttgagaaatgtataactttttcctatttttaaaaaattataaagttgaatgtagatattgttttctgagtcactggatataatgggaggaaatgattaagaaaataatgttgctaaaaataacaaaattaaacaatttgtttgtgtttgtgtatcacaattaatgctgtctttaggaaaaaacagtttataaattaagtgccctgacatttaagaagtctgagaaccaagttttgggagccaaggaagagactttaaaagttttatgtttcagctttttgcagagttttttgccttgcagtgcatttttatgatggacttctgtttctatgctggacttcttttcatggacttgtgtggttcattctttgcaggtaactggtgagtgctttcctttcctaaaaacaaatccaacttgggaatctaattcttttgttcatgagacattcaaatagaaaaaatgaatacagtgctagtaacagtaactcgcttcttatttcatgtactttgttgcagaaagacatggcccacctcagggatcttctgatattttgataatgggtttggtaaagcagggaccagtggcatttattttatggatgttgatactaaggcatcaggagactagggaggctgtttaaagaggcagaactgagagtaggatcaacatctgtactctataatcagagggttgaactaaatcatggtcttattagggacatttacaacctcatattctgatgtttgtatacatagacgggctttagggtgaaggtgtgagaaataataacagtgtgggtccagattcacccagagacagatggtggaaaggaaaaaaaacattttgggaccaaagtttatctcctttttgttgtcccttgctgtagaagagctatgtgctagatataattttgagcactttacatacattattaattcatttattcttcccgacaaacaaccttatgtgatagttacaattattatcctcagtttatacctaaggcaatggaagcatagagggttagtttcatgccactaatggggaaagaacctgtgtctatgtcatgcttcccctcgtataaaacgcccactatttgtgcaatcgtccatcattttttgagtgtgtgctacatgccaggcatagtgttgagtcctgcagataaaaaagagatggaaaccttgctgtcattagtcttacagcctacttggggagacaggctcaatcaaataaccacagaaacaaactggtatacgaatttgaaggagaaggcagagagctttgagaacataaggcaggggcctgatcttattgggttgccaaaaagactgtctcactttagagctgtgatcccaaggaaacggaggaggtggcatctaaacactgcgatgatgcaaggtaggctcaggttgagtctggtcacttcataggccattcccagccccctttagagtccttgaagtcagtgtctttaagctccataatggagatttcagactatctctgtgccctcgtatatgtgcaggttcctgtgcaaattgtaagcgttaagtaaatatatatgctgattgaattacagtcatctgtggtgatttgtgctctgttccacctcctgctggctgcgttgtatcccatgttggaagtggctgagtgtggcttcagaatagacacagaggaagtgggagagtgaatatttggatgagggagtatgccttgactaaatactttctataagcaaatacaaatcatatgacctagagcttttattttttaaaatcagtctattgctttctcttgaagcacatcattggtgaattgactctatttggcttgatgctttcatacaactgggctgagaaagttcattttacccctcttttgggcattcccactatagttgtagtgatatagtcttttaaaatctcattcaccaattattaattaagctgaattaacccttttgggtagatgcattcttatccttatatgtttaaagtagctgttcattaaacataggttttttgctgagcatctatctgacaggaggcatctgaaggtttataaaggtatgggaagcttggttacttgagctccagaagctttccactttagtctaaaggaaactaattacaaaagagctgtgaggggcccatcaggatgtgcttatgagtttctatgagggagccagactgactgtgtgaccttgagcaactaattctcagtgcttttcctgtaaaatgaaaatgggaataataatggaacctaactcggggtgatgtgaggattaatgaaccaagttatgtacaatgcctagaagagtgcctggcacatggtatatactgttaactttttgtttttattgttgtcattattgtgatcattatcacctatagttgagtgtcatattctggagtctaaagggtaagggaaaaggttctgagttggagaagaaaggcatcatgggacatagtatttgagtttaggtctaatgaaatataggtctaataggtagaaatggtgaggaaagtattccagaaaaacaacaacaacctcaaataccagagatatcaggtatgtttagggaagggtgaggagtccaggctagcgggtagggttcatttgaggaaaaatgacaaatttacctgaaaaggcaggctgggacgatatcttggtgaagggttggcagtctggactgggctttttgagcagggttgagactttccgagccctgctctggaactactggagtaggcaggaggtggaggcagagagaaatggtgttagtcctagagtacggtgataagggtttggataagggtttgaaataacgtgatgatgattgtcatggaagaaaggtccaggtagttcactgcggaactaatgaaatttaagactcagggccttttcttgcttagttccgtctctcaagctgttgaagggaaaattttttgtaaaatatgaaaagatgtttgtatcctccgtctttgctccccaaatgatgtgtttcaggctcccaaacctggatctaccccataattgaaagagactgtggatggccaggagtggtagctcacgcctgtaatcccagcactttgggaggctgaggcgggtggatcacttgaagccaggagtttgagaccagcctggccaacatggtgaaggcctgtctctacgaaaaatacaaaaaagtagctgaatgtggtggtgtgtacctgtagtcctagctacttgggaggctgaggtgggaggatggcttgagccttgggggtggaggttgtagtgagctgagattgtgccactgcactccagcctgtgtgacagagccagaacctgtctaaaataaaataaataaaaagagagagactgactgtgactgtgaagagataatcagtctgggtattgacttgatgtggctatcacgtgatggagaggccaaggtcaaagatgacttttgagattctgggtctggctgactgggaggaacccctcatgagaaagggggatgttgggagcagccagttagggtgcggtagtttcaagccaagtgagtgctctgcactggttagcttcaccagtaaaagaaacattttcttcttatatctgcccacccccatcctcaattgcagttttgcaagcatgataattgtaagttacacagtgctaaggaaaggactcagcatttctgctgattaatgggcttcagcccaaagcacacatcatagtgatgtctttgtaatgtccacagttagtattctgtgtattctaaacctagttgtctgaaacttgtaaatggagtctctccttttttggcataagtcttccacatttggtaaatcatagtgctttaagactattttaaagttgtaacatcagttttctggaaattgtattttgaaggaatttaattgactaagacatggttgaaatgttaatttcaaagctatcgtgccaatgttccagtggcagcacctacctgggaaaggctattgtcagcatttgtttcctctttttcacacaagtaaaatattaaacaaataaaattgaagaatactctttcagatggccaaattgaatcctcaagagtattttcactttccaagtcacaaaatataaatataattaatgtaggggcacagatttcacttttaaatatatatatatatacatatatatatacatatatacacacacacacacacacacacacacacacacatatatatatatatatatagtgtgtatgtgtgtgtgtgttatgctttgctgaaaaggtttttttttttttttttttttttttggaggaaaaatagcacctaaaaacaaagctaaaaacatagtaaagtttgaggcaaatgtccccagagaaagatcattagcaaattcatgacccagagtctggttgagacttctctatgaagccatttattgttttaagaatctccccttgtgtatcagagaggttgaattatctgagtagagaaatacagttgtaaattccaaaatgcttcagaaattcacatattattttggagcaggtattaaggatttaatgactgcaggatttagtttaaaaaaatgatttagaagtatttgcagatgaattctaagaggattctatataacttctcatgttggtctggtgttcctctataaaattagtacagacttgatatttgttacattgtttctcacggtgtagtaaacacaaatatttaaaattataagagttatgcattttaatattcatttatgtatagactcagtggcgggttttcccatttatagcaatgatataaaacattttacatcaaattgatttaagtcaaaagtaaatgtgtgtttaaaaagaatgaatggtagtacatggtggtacctacggcagaagttgggaaagtgcatgattaactaatgggcaacattggcttactggtaaacaatataaattgtgctggtttgtagtagggtaaattttattacgctgtttaataaaacctcatagctgttgataatatatatgttaagatactggctctttaagaagcttttattaaagaaactaaaagttatttaagttcttggtacctggaagttaattaaacagaaaaaagtcactttaattgggtgactcctgctcagttaaaaataaaagtatatgttaaatgctatattattaatatggtttctaggacttcttggcaaaagtagggcaattttatcaaagtcgtgcatgtaccacccactaaaatgatgtggtacaccaaacattatctgtgcaaatgcttttgttaagttgtattagtcaaaagtttggggaaagttctggtttgggtttatatatgttaatacctagcgagaaaagtagacagcatattctttctttccccttaggagcacaagagaaaaaatcaagatatttagaagatgctttgaaattaatttcattcagaaaatatttttatgattctgctgagagaaggcaaaaatatttttagaaatattagaatatctggcaacaaattttcgagcattaaatatggattttatttttagaaagagtacacatttgacattgcataactaatttacttacttcacatttaaaaaacagatttgtgtatgtctgtgaaaaagacaatgtgttgatagtagaactataaggtagaaagttcctctttctccttctgatccttcccctgcccttttcctcaaatgtgactacaaactgttaacagtttgaagtcccctaagttttaaaatcaaatggaatgaaatggcatttaggaacttggaagagtggaaaccttttttccagacctatgctaccaactgagtttatattttcaggcagatatgatgaaattgctgtgggctttggagtcagcccactgttcgaattctgttttcatcctagagcaacaacgcgagtttggaaagttccttacctttcttactaaatgtcacttttcttctgagctttaatctagcctagtctgtctctctcctctctctctttttaataagcagacatgtctaagaagatctggcataagaatatgtgacatattttgtcctggaaaaatcgaatttggtattttaatgacccagcatgcattcatgcagtaatgcactcactcatcaggagaacatttccccactttgcccaaatacctaccttcaggttgtgaaaggtcaacctgtaaaagatgccccaagaatcttcctggaatttagatggcctctgttgggtttcactttgcacttattaataattgagcactgggataaaaataaaaacaaagggtctcatcttgcagtgtgagaacatgggccatgtgtgctaagtcatgcaggtaagatgaggagcaaagccctgtggggtagccaatctaaagaagcattccatgtgggctggtgcctccctcttgcagaatgactccctccaaattaaagggaattaacgtaattgctcctggggaggaaaatgcatttttgcttttcaaaggttgttgtctaagctttaattatctaatccacacacagaagctttctacaagcagccctcccttttagcaaccagtcacctttcaaatactgcggcatctttaggcttaagaaatcactgcattataaccaattctgttatataacctaccccttagggtacagtaaaacctgttgtaatgttggttactgaaaatggtctttagagctagtgttggtttaaatggagttttgtaattatttgagctgcaactagagtgacaattctccatttttagaatctgtgcctcttgtctggcagcacttttagttatttcctttctattgctttttgtttcacactcaataagctttggttggtgtgtgctttatcagaccttcatgtttacttgccaaatgaatatggggttttgttactaaagttagtatttttaatctatttattttatttttctttctttagaaaactcagaatggactcgttttctagtcctgaaatattaataagtaaacatgtaatatattcctagtgaaatagcttaaagctcaaagaaggtctgtaagtagaggaaaaccctactgttaagaaccaagactctgccattcttgtcattgaaatgcatagggttttgatgttgggacatactaaggaaatagtgccactaattttaggtagagaagattgtaggaattaagctcgtttctgactatagaggaaaaggaccaagaccatcggctcagaattaaaaaattaaattgctcttggaataaaattgagctctcccagtggtttgtattgctcttcacattccggccactgcctggctttctcccgccccctgtcctcttctctcagtcctagccacactgacctccttttcctccaacttaccaagctctttcccacctcagggaacttgtctttgtcattctcatgcctggatagccattcctccttccccttagctcttcctgtggttctccccatctagagtctagatcttaccctgaacatcacccagagacccctccctgactaccttgactcaggtagctgctttccaggcccctgtttatttacttttcagcatttaccttagactgtatttatttttgttgattattgtctttgccccacaagcataaattctattaagggaggtgccagtacctgatacagtgcctggcatatactatatactcagtatctatgtatattacctgggagttgttcactggttttaaggaatccttttttgtttgtgtctttaagattagttcatcttgtcagactagagggatttaagtagctttggtatcaaaatccaagataatatgttttccaatactcttacccatacacattttcacccattttattgtgattttattgagtgtctagagagcaacactggctttcctcaagagtaggctgaaaattcagtagataccccatggatattgtgctcactgtgagaagtctttcaaaatttaccaggcactgaaataactcacctcaggtcttcgatgaaggtcagggaggtgtgcgttggtctttggtgagcacacggtatattatgagggtacaactgtcgctgccattgtgtctgttcagtgtgcctttgtaaagagcctgggatggcctcttcatggatctgccctctgtctctaagcttacccatggagaagacaaaggctgctgcgcagcttcatgctgaaaaggaaatgttggcaagttgttgctttgtaaagatcaacactatcaccgtaacagctgtcactcaaagtggaggaagtgaaatgcaaatttggtgagtaattagttttgtgtcattcttgggtgttctaaatgttactatttatctgtcttaggtaatctatttaaagaagacaccagaagaagcctacagagcactcctgtctggctcaaaccccccctatcttccattcaggtataactcctggtgagacttgggttaaacttttgctacagagctggacactttagagttgggttgtagtgttttttaattgtcttaagataataaccattatgttatatggaatgaaatgagatggtagtttttattatttcatttcgtagagttttatccccctagctagcaagaataaaagagctttcttcttgtaggaatttatttttttctttgaatcctttctatatctttacagtttatgtcaagcacaaaaagtgcctcatttataagctaataatcatgtcaagatttgttggatttcagtaatctacatcattgattcatccattcattctttcatttcataagcagtgattgagctctggtcacatgtcagaggccggggatatagaataagaccctctaagattcttcaggagcacctgtttagtggggaccctaaatcaccagtttggcacacaaatctgactggcatccccaggaagcctttctctcattactgtgttttctaagtatcatcaaaagaagatcttttaaaaatttggggtgaacttgagctcatttaaaaagtagaaggggactgggtgcagtagctcatggctgtaatcccagcactttgggaggctgaggctggtggatagcttgagcccaggagttcgagaccagcctgggcaacatggtgaaaccccgtctctactaaaaatacaaaagttagccaggcatagtggtatgtgcttgtagtcccagctacttgagaggctgaagtgggaggatcgcttgagcctgggaggtcaaggctgcagtaagctgagatcgccccactacactccagcgtgggtgacagagtgataccgtttctcaaataaataaatacatacatacatacagtagaagggaccatacatcaaaactcccataacacttacctctgctagaattgtgaatgattctaatatttttgccttttttgcttgtgtgtccaaatctgcaagcatgtgtattgcttattgcttattattattaccataattaaccaacacaatgagcgaaaggaatgggagtgactgagaagactctgcttgtctgtcttcctcattctgctgtaaactctcagagggcaggccccagtgccttatacttaaaagcacttttagtgaatatttgaatgaatacattaagactaaatcccttaagagtcaagggattctcattctgcttctgagatcacaggaggtagctgttagggtaagacatggggagggaagaagcaacacctattgtgcttaattaaagtgaagtcaaggagtaaggcattgggatttggaccctgaggggaaaatattctgaatcaacctagagtctgaggtaatcagccgtggaagggcaaataaaaaatggcagataatgtagatgaaagttttaatggtgaagacaaagcttatttttccttccacttctaatggctcctatactttgaaagtcctttgtaaaatataatcctattttttcagaaaggggtaataatgctgataattctaagttctaagcaaagtggttaggagtatatactttggaggcagagaaacttcaagcagtttgaagcctcattctgcttcttgctgtctgtagtaaataagtatctcggacaaattacttatcctctctcagccacagtttccttatctgtaaaatggcttcaggtctaaactaaggatcaaatgaagtaataaatttatccttctgcctagtgcaatgtttggtttttgtttttcttgttgttagcattatactattattactgttagtaacataattaatagtagtagtaattattattacagggtcttactctgtcgcccaggctggagtgcagtggcacactgcaacctctgcctcctgggttcaagagaatctcctgcttcagccccctgaatagctggaattggaggcccccaccaccatgcctggctaatttttgtatttttagtagagatggacttttgccatgtctgccaagctgctcttgaacccctggcttcaagtgatccacttgcatcagcctcccaaagtgctgggataaaggtgtgagccactgcacccagtcaagaactagaattttaaaataataataccagaatagaagaaaagatagtaagataattaatactacttaacatagaattgatttcaattctacataaatactaaatttatagcctatttttcaaatatttttcactcaaatacttttatgtaaatatttgaaaatataaatacattaacatagttcagaaatttaaaaaatctatataggaaggtttaagtgaaaattatccctcccatccttgatcctcatctgtctagtcctttccaggtaacttctggtattagttgatttgatatcagtctagaatttctttatgcacgtataagtaaatgaagatatgcacccatttcctactaaaagtatgcctttgaatgtaactctaagttctatctttttgatatcttaggataccaagagttgtatttacattaagcttcatttctaaatctagaatcttcataaaccatacatttgaaacagaaaataccacaaagtagtacatttataatttagtgaagaatttagttgaaagaatactactagttttctggaaacttaatttttttattatgctaagataagatgtgagttgtttttagtctacagttcaggccaactaagactaatggacttctatcaagaatcatcctcatactaaattctgggcagccatcattgcgttggccttcattataatctgggttttattatcaccaggtttaaaaaaaaatcccatttcttatgaaattacacttttgtcttcattgtctagattttttcaactgctgatatattaacacttttaattaaaaatgagaagccttaaaggaatttctatttggatgtaattgttttattatttaaaattttttaaaaatgaagatgattttgaaggcttgttgaaggtgtggttggtatgttcatatacacttttcactgaaatgtctgtgttcccatttgtgctatatattttagtttctttctaataaaagagttttatggctactgtgaatttaaataatgctgtttttcaaatttttttcactttgcaaacatttatctgagcagtcacttctgtaaagccttcctcatttttctggagaggcttggcaggtcctttgcctgtgattccctattacattttatgtattacaaggctacatacaacgttaaagcaaacaccttgtattataattatttgtttgcatggctgactcttctcttgagggctgtggttggttcttttcctattgtgtcctgagggagcaagtatactaaaatatatttattgctttttcagtgccagtcactgtgatagtcctatggatcaaaagatgtttaggacaacttggtacctgctgcaggagagctcagtgtatagtctgtatacatgtataggtgtgtaaaacagttacagtgctttgttagaattaggagagaggtgttatgggaatactgaggaaggaggtttaactctgaaatgggggggtaggagaagatgttaggaataggccccatggaatgcctttcatgttaggatgaaaactggagaacagcaattcaggcactgattttaggtgctaattttatttattcgtatggcataggttgtataatggtatgttaggtagtatatataatacgaagttcacagtatgggtacattattataaccaaaagaatgatctgattttattcctacttagattctattcacctagttaaaattaacaaaaaacgagaattgtgtagctttaactgcctattcttgattaaattaagtatagttgactttagagatagttgaatttctggcttgtgtgacagcagtgagtgttgtgatgtcacttgtgagtcagtctcaggatgttctgttgaattggagggtaggtgtgtcaaaaactgtattcacttttactgagaatagccaatgtgttgattaagagtgactttaggtgaaaatcaggggaaaggggtgtttttcatctaccttaattctttgagtcatccattttcagtgttggcttggcagttagccttcaagggaacaagaggcctttcagttctggggtcagactcagcagagtttgaattgacaatctaggtatgaatctttttaggttctcttcctttcagtgtactactaaattatagtgtatactattgagcaaacaaagtcgtattaatctcagcttgtctaaaaccccaggagaccagtgacccttagtggaatgtccagattgttttcatggcagtcagtggcagtggttttcaaatctacattgttggtgctcacaaaacagtatttgtgaaaatttaaagtcccgcaaaacattgaaaagataaccaatctaaattgtacaattcttatttaagatgtctcttgtgcttttaaattcattttatacttatttctttgtttattggtccatatgtatcaggttggtacgttttttagtattggtgataattcctaaatctcctaaaagccagtttttaaaatgacatataggccgggcgcggtggctcacgcctgtaatcccagtactttgggaggtgggcgatcacttgaggtcaggagttcgagaccagcctggccaacaaagtgaaaccctgtctctactaaaaatacaaaaaaaagtagccagccatggtggcatgtgcctgtagtcccagctactcgggaggctgaggcaggagaattgattgaacctgggaggcagaggttgtggtgagccaagatcgcgccactgcactccagcctgggcaacagaacaagactccatctcaaaaaataaataaataaataaataaataaatataaaataaaatgacatatacaattaaacagggaataaaattatgctgacaataaataacatccagggatctagttctgaagacatatccagagagcatggcatgaaaaataatgactaagtctggaggtaaggttaggtagggtaatgtgctgacagtaatggaataaagctgtgaacattcgatgtcttatccctttagttttttcctaaagcttggagaagaggctagaatttacaggtgtttctcaaagttatgttgatcctcaaacttatctgcatacgtggggagctttaaaaaactactgatccctagattctgtgcccagaaattttgctgtaattggtcaagggtgaagtcagagttattgggattttgaaaaactgcatatatgatgccaatatgtgtggtcaaggttgagaactcctgctctgtaagatgtaccatggcaaaatatatatatatatatcaagtatatttatatatatattatatatatatcaagtatatttatatatatattatatatatatcaagtgtgtatatatatatatcaagtaaatttaaaactctccatcttggagatttacaaagcaaatttctgttttaaagattctgaatggttctgagtaatgaagtaacctgtttagctctgtataacccagaattttctttcttctttttgtttttttgagatggaggtttcactttgttgcccagggtgggcttgaactcttgggctcaaatcctgtgtagttgggatcacaggcatgcaccactgcatctggcccagaattttacaaagtactgattttcttcctcctgccccatactttccattaatatccagcagaactcctgttctgaaacactctgaggcatatttcctgatccacacctgtgtggaacaaaaaacatctcttgggattaaaataatatgctagcattttgtggaacattttttttatgctgtttcctgagagtcttggaaatagatggcttatcaaatcatggtattttatttaatgtgaacaggaatatccaagttttcttgctgttgtgaggccagacaatcttctctaacagaggattcacacccctcccactggcaatccttttatgacatctgtcattaaaatggatgcataatgtttgtgttgagggaggtgtttgttgtgttttgggggatgacccttagtgatatcccagttgctgagctctgtggctgagtcttaatgggaaatctcaaaagtaattattttagatcttctgggcatgccagaacttgtaggtctttaaacaaaggctcaaaagggtcaaccactgtaggtctttaaacaaaggctcaaaaagttggtcaaccacttaggacttggcatcaggctgccttctttttcataaagtaaacatgtgctggtagacgttagatgtaatcataaaatatatttccttacataaaacattgaaccagatttttattagcttaaatatgatattgtgatttttgtcgaagtttgtttagcaattaactgtacttcaaagggaaagttctccttaccgtgctttcctcttgagtatcaaaactgtggaaacaatattttatcctcttttaagatgttcctttcattctcaacttttcctcgctgtttctcagtcttgatctttggggtcatttctgccccatggatctttagtaaacttttgcttttggtgcttggtataatggaagctaattcgcgttagttttgactagtggggatgtgccaatttcctgagtgttgaaaatagatggcttttccagtccaaactgttgaatccattcttaacagctggggcatattttgaataagtgtacccccatgaaaaaagactctttgtcagagttttcttgttaaagtgctaagtaagctccgctatacaggacctgagaagagaaacaagtgtaagtgtctccatgacccattaagaactcacatggaggtgagttatattattctattttttgtctgctggaacaagaaggtgctttggtgatttgtgttgcgaaaattcgctcagactactttttttttttttattcctacctttagggttccagatcagttttaccaaacttagtgaagtagggtaggtgccaaagtttttgtactctttacggtatatttccagtagccttagttgataaatatggttttgaataagattgcagtcatttaccttaatgaacatagtaatagttattattttgttgaatgttatgaaaagctcttaaatacctgagttaaaaccaatttgccattatttttatttttaaagaaaaattgttggccgtgtgggtggctcattcctgtaatcccagtgctttaggaggccgaggcaagaggatcacttgaacccatgagttagagaccagtgtgagtaacatagtaagacctggtctctacaaaaaaaaaataaaaataaaaattagtcaggggtagtggcacacatctgtagtcctagttgcctgggaggtttaggtgggaggattgcttgagcccagcagtttgaggctgcagtgagttatgatcgtgctgctgtgacagaatgagtccctgtctctgaaattaaaaaaaaaaaaagaatagaaaaattactggttaaatgggtgtcagtcagatgttgatgaaatgcccagagtacaggtcttggtctgtttttctggtgttattgctagttctagacagattttattctgctgatttcaggtgaccttttaagccatgactttagaattgaattttcatgtatctctgtttctttagatgagtaaaatgattcctgtatagccttatgttaaatctgaaaagctgagattctgtttttttgttgttgttgttgttaggtacaggtcacgttcaactttgggccctgcctcctgaggcatgtggttttgctctttcatgaatgggagatggttttgtcctccctactaattctcaatacagtttcgtcttgtaggtctcaatgatataagctctttcttttattgtagctggtacatatatgtcatagatttgttcagaggctggaaactaggatgtactttggacaactgtgtaaagtattttgggcattgtctagctctgaagtatacggacaatatagtctgcagctgaactgtccagtatgttagctagtagctacatgtgttattgaacacttgaaatcagtctagtccaaactgagatagactgtacatttaaaatacatattggatttcaaagatgtagtataaaaggcggggtgtggtgactcacagctgtaatcccaggctgaggccaggagtttgagatcagcctggacaacatagtgagaccctgtctctcaaaataaaaagatttaatataaaagaaaaatgtaagatatcttatttataattatgttcattaatgctgaaatgagaatattctagatatattggatgagcaaaatacactactaaaatttacttttttcttgttagtttattttaatatggttataaaaaattaaaattatacatgaggctctcttttgaggatggcattatatttccattggacagtgatgatctagagtgtttttgctattgtacatagctcataattaaagattgttctatatactttctcctttatttatttgttttcagaaatagagtctcactctgttagcaggctggggtgcagtggccaaattgtagctcactgcagtcttgaactcctgaattcaaacaattctcctgcctcagccttctaggtagcttgctaccactcctgtctaattaaattttttttttttttaaatagagaaggggtctccctctattgtccaggctagtctcaaactactgggctcaagcaatcctcctgccttggcctctcaaagggatcacaggtgtgagccatcatgcctggacacatttttgcttcaaaaggtcaatagttcttagccaccagaggtgttcaggcataagttgaatgaactcttggtaatgatcatttattcattcctgtattaattcatttagcaacatctataacatactaattttcccaacactgtactatactctgggccaatagacataaaagacacgtttcccgtccttaagaagctcatcttcttgtggaggttgtgaagaggggattcagttcagtgcttataagggttcttagatgacctttatgatcctttccaacccattgctctgcaatttttgcatacctcctaactacttgttacccagagaatttagagaatcaaggacttaagataattgtagatcacagtcatttccaaaatttcttagtctcttttctatcagctctttttgtattttttaatgtagtctccacattgtagacactgtgcttctgttctccattctttcttcttcgagtaacttcattattcataataagaaatgctttcttattttgtgtaaatatgttctttcatctctggtttcatctcccattattaatatttataaggttgcttcattctgagtgatttcttagattctcaggttacaagcagtggtatgttggtaaactggctctataagtaaaaagtatttgctgatttccatggtacaaatacttttaccactgctgatttgggctctcaaaatttctgaatatttaacagttcactcttgagagcctatataagacagtgctgggacaccagtgaaacaagctctttaacatttaattgtggatgttgattctagttttcttaaacttaatttttttcctgctgtttttctgcaaaataaacactaaacacaaaataaacaacaagtcccaattgctccttctatttaaatattattcatttagtttttcattcaagaactatttattgactgcaaattcttcctatggtcatagttgtggatttttataaccactgtataatagctgtatagttcagttgactagtatgccagaagtcacatttagaaagatagaattgtggccaggcgtggtggtttgaaggttgaggagggtaagtgggaagatgagggtgagagggaagaacatgtgacttgcagatgtgcaggttctgtaggaagagcccagtggctactggggagctcagggaagatggggccagatacccccaggccttgtggccacagtgaagatttgaactttcccttgagagcaatgggaagtcagtgaggggttatagctgaagagtgatcagattagatttgccttttaaaaatatcactctggcttcagtgaagaaaaccattaaaaagttttaagagtgggtgtaggaaggcagtggcaatggaattggcaagtgatgcattcaagagatatttaagaggtgaaaccaatggtgcatagtgagggataggataaggggaaagaaaggtgagacttctggcctgtagcttgagtgactgtgggagcttttacccagacagggagcgctgcaagactggattatcgttgcagttgtttttttttggagtgggagcagattcaagagattcttcttacatagtgagtttgaggcatctttaagacacccgaacggaaatgccatgtaggtggttggctgtactatttttgaagctttaagaaggagtttgtgctagagagatttgagggtcattggcagatagatggtaatttatggagatgtctagggcagtgattctcaaaatacatgcctttctagcggcagcctcagctccacctggaaacttgttagaaatgcaaattctcaggccctgcctttggcctactgaattagaaacttgaggtggggcccagcagcctgtgtctgtggaactatccgggtgatgccaatacacactaaagttttagaggccctggtctagagagagagagtatggagtgagaagaattttggtctagagttgaaccttgagaaggtttgacttttaaagactgggaagtgaaggatgactttgcaaaggaggttggaagtagtgtttagagggtagaaggaaaatccaggaaccaagagaagagagcaaagtagggagttacttgttgctgacatattaggctaagatgatgcatgcacaatgttctctgggtttaaaataagtaaatccagacagacagaaaataaattagtggattgccaggggctggaggaaggagaatggggagtgactgcaaatgagtccaaagtttctttttggggtagtaaaaatattttggaattactggtgatggttgtacaacattatgaatacaccaaaccccactgaattgtacactttaaaaaggaagatgagactgggcgcggtggctcacgcctgtaatcccagcactttgggaggccgaggtgggcggatcgcctgaggtcaggagttcgagaccagcctggctgacatggtaaaaccctgtctctacgaaaaatacaaaaattagccaggcatggtggcaggcgcctgtaatcccagctacccgggagggtgaggcaatcgcttgaacccgggaggcagaggttgcagtgagccaagattgtgccagtgcgctccagcctgggctacaagagtgagacttcgtctaaaaaaaaaaaaaaaaaaaaaaaaggaaaaggagtaattctttagagaaatcttgttttagagaggagtccaaaccgggtggaagctgaaggaagatgtggagcttggaaaattttggttggcttgttctttttggagctagtagggacctgaaaatgtttaaattctgttggaaaggatccagaagagagataaagagatgaccaatggtgttgtatggtggtaaaacctcagagtaggaggggacttttgggttcagtagtctgctgttttcctaactcctgacctccatttcatgttataatgcaggtgaaaaaaattccttagaagggatcttccaattccaagtttgaacatcatgtggggcaggtatctttctgtctcccagggccaaccattagatggtcccgactatattggtgagttgaggaaaatcaacagggaaaattgacttacaaaatgggagggaatgttgcctcttaaatggactttcaatcttattttagtcatttcctttatcctcacttccaggagaacacagtgctgccaattcctaagccttttgagacttacctggtattaattgtgttggttatcatttttttttttggtttttttggagatggagtctcactctgttgcccagactggagtgtagtggcacaatcttggctcactgcaacctctgcctcccgggttcaagctattctcctgcctcagcctcccgagtagctgggattacaggtacctgccaccatgcctggctaatttttatatttttaatagagatagggtttcactatgttggaccaggctggtcttgaactccttacctcaggtgatccacctgcttcggcctcccaaagtgctgggattacaggcatgagccactgtgcccaactggttctcagttttttcattgtcagtttagtattcagttttcttggtcttctaacttatttaccactcatctaaatgatttctagctttcaaaattttattgttttgtctcttctcttattctcctagtctttgttggtttccatttaaaaaacaaaagcctttaaaaattcaccttttggtcaggtgcagtggcttacacctgtaatcctagcactttgggaggcagaggtgggtgtatcacttcagctcaggagttccagaccagtctgggcaacatggtgaaaccctggctctacgaaaaatataaaaactagctgggcatggtggcttgtgcctgtagtcccagctaattcaggggctgaggctggaggatcacttgagcccaggaggtggaggctgcagtgagccaagatcataccactgcactccagcctgggtgacagagtgagaccctgtttcaaagaaaaaaaaatctccttttagtggggttcggtagatgcatgggttcaatcttccatctttatcttctctctttctcccccagagaatacataacatgttcttgtgtcccttcactgttatagtattttcctgtgactacgtatgagccacatgccacgattaagccatttctttcttgtccagtctttgggacagattttgagaacctgttggcactatgtggctgtcatgaggattaaatgcgctatgcatataaattacctgacacagtaggtgctcaaaaaaggcatgccgtttccttctctcaatctggaggatatgactaaattctattgcattccttattagatttcaatttgtaaacttctctgtgccttttcagcctgtggtgactgacttgcctagttctgtcggatggcatgttaactttccctcccaactttggaggcctgcagatttgaccaccgggtcaccagagctctccttttagtcactggtaacaattgtggctgtgatggggtaggaggtatcatggaagcctcaccatactttgcagacattcagaaagaataggcctggaactttttctggtagcttacattagtgacattgtttagctgagtctaggggtgggaagacatacttgaaagaataagggatacctctacatcttgtaattttttttttttactttttttaaatataaagaaatttttacccccttttaaaaaacgtaaagcagtagtttttaatctagggtctgtggaagagaattcagagagtcagtgaacttagatgagaaaaaaattatatctttatttttactgaccttaccttatcaattataaagttacatccaattataaatgttgtaaataaactgtagtagcattagcaatataagtgacaatttaatatcacttacagttattatttcttaaaatatttatgctcattccttcctcaaaattgtagtggcagttatcagacttgccactagatcttgttatataatatattaatttgaaaagtgcattttggggtattgcaaatttgtattttagtatatttaaaatacatatttaaactttatttaaatgtaattgaaatagttttctgttaatcctagtttatgcattaaaaacattattctgaggaaatgggttcgcaggcttcctcaggtcactgagagtccatggcacagagactctgaaccccaaagacaagtgtctgcaaaggaatttatggttgtttatataaactaatatttttcttagatccctagtcactcttttctctggcatagcccattaaaatttgctttctaacatatagtttacatttttacaagatatttgaaaagggggctattttattttttgctgacatgtgagttcagatgatatttaaaaacacaaaaacaaagatccctccttttgaaatgagacataaatatttggaataattgaagtttcaggacttaagcattctgttaagttgctttgctaacttcctagttttatgttaggctttcgggatgctgaaactcagggatgatgaagttacatttcacttcatggcttagcagccataggttcaagtgaccttgaatggttgtaaaagttggttttatgttaattataccttaaagcccttaaaggtctattctccccttggaacgtcttctggccccttcctgatggctgccatatgtgcctttcactttgtctagataggtgtctgcctgctctgtttcttgggtcagcagtggaggctgggcagagagcctggagccttgaggtcaagtttcctacctcggacaccttggaacactgtagtgttaaagctctggtgccagttcttgcttaactgacctgaacttgatactttagttttatgttgcctaaagcaggtctgctaaattgctctaaaaacttaaataaagtatgaagcactcaattttcaccacggtaggttcccactccttttgaaggagtacttcatggtgcattagaagctctcgtggctcccagtggctcagaggagattgtttggaagcctgactacattttcctgttttctttcttttcttttcttttttgtaggggaaggatggcatttaatccatgaaaacacctgctaggttctgttggcctacatacattgtctctcctatcttttaagcttgtttttatcatattcctgacaggaggttattcctctgccagaatacctcttgcaatgatgaatgttttacttaatcaaacagttcaattcactgttaataataagaatagtcataatatttatgaagtgcttcctatgtaccagccactatatgaaggactttacatattttaaaaaacataatctgacaacagtcctatgagtgatagctgctatcattaacttcatttcacagatgaggagaccaagattcagcatagaggtaaaataacttgcttaagttcctgtgcagtacctggttgaattggaagtggaactaaggcagtcggactcaggaacgcaggctcttaaatcagcctcttggattaaagcaatttcagaagtgcttcagttaagtgtggtagttaattagtaggatctaatgtattatataagtttaccatgttgatagctgtgaagccaaacaagcacatctccagctgactttggtgttatattttattatttgaatgttctaaatgcaagtttttaatgttgagtttatttatgtttatagggatgcttcctttggaaattgcacttacaatctcaccattctcgactgtttgcagggaatcagaaaggtaataacaattctccttgctgtagttgacacagtagtttaaaaaaatatgagaaaggaataatctcaacatccttatttgttattggagggaagaaaggggagccagtaagtagaaggcttttcacttcttgaaggatgattgatttgtaaaatacaaacaccaggaaaaactgggaggagggagtggcaggggcctttctttgtcgtttaaactatttgtgttccagggcagatttatcaccactatcagctgcagtgcctgtgacattgctttgtcacatgcttagcttcattatcaggcttgatcttggtgtgggagagtcaggaagttatctaagccactgtgctcctctgctgcttggtcccaccccagacccactaaaacaaaaactctgggggtggagccctgcggtctgtatttgaacaacctctccaggtgatttgatgcactccaaagtttgagaaccaagtcatagttatttaattatttctgtatataatggagaagttaaactagaagatttctgagagctctcggaacatgttttagaaacataaattcacaatctgagaagttatataagctatactgtaaattctaatgagggctcaaagtacataatctcgaacatataactatggtttattatcagtcaggaatgtacatattacataacctattgatcataggacatatataataatgtcacatggactataaatatattatcagtagcaattctagttcatttcttggatgtaatataaaactgatttttgctgtgttttgagttgagaaaattggtgtgataaatgtgctacctgttttatacatggttgtttctatttaatttaaaatgaatttaaaccctatcaaactttaaaatggttttcaaatctttttctttctacttaaacaactacagagatactctagcccactcttgcaacaatattaccaaggtgcatttccagtaatgccagttaagagcttctatggagacgttacccaacatataacagttgattatagcatttggaaaatatgcctgagggaaaaaataatttatttatcgtcactattattattttgccttttctaccatctgctacaggccatttgttttataacacttaaaaaatttagaaagttcacactggaatatcgctgcctgtaattatggtaattagtaactcagtatagaaagttgtggcatccttcctgttgtagaggaaaggtatgtaaacttgtttcatcaaatgttggggttaactcaaagacaaatgagattttggaggatctgatagattgtgcagcatgtctttaagcacctgagacatttcctgtaagttcattctcttacataaggcaccatattctgggctatttttgtgtggcaacgagtagtaccattccaagaacctatacagagtatggccacatttttgcctttttagggagcacatttctctgattttaatgtattggcattgtcataagtatagtttatattccatgttatgtgaactactatacatggatataagcaaaccctttgaaaatacagaggaaaaaaaagtgaatccttcagagagtttgtatatttttctcacttttttgtctggaaaggtgcatatggatgaactcagttttttttttttttttagaatggactaatttaaataatttgttctgcttattctgtaggggttgtttaaaccagtgttatcagaattttgcatttctaagaatcacctgggaagctatgctgaaaatggtgatcctgggccccaaccacagcaaatatgatttgatagttctggggtggggcccaggagtctgcttctttcatatgaattaccctaagtgtttctgatgctgatggcgcatgttctgtgttttgaaaaaacactgatagatgtactggagcttggcttgctagtttctttttctatttttaatgacttgatcatgtaacttttaaatgtacctgtggttttgtattctgttgtaatctgtatagcttcatgatttataaaataaaagattctgttctctttaaaatattagatctgagctagctggatagtttttaaaagttctaagtcattgtttacaaaactgagtatgacttttactttgtgataaaaatatgtttttttttttaaattgtaagagcagtcaagtataattctactttgtcagaaactatctcatgaaacagattctcccaaggtagagttttaggaacaaataagggcctattaagtagaaatattaagaaatattacatatatattatgtattgtatatataaatatactatattatgtattatatataaatatactatattatatatagtatatataaatatatactatatattatatataaatatatatattctctcatcaaatattattaaggacctattaagtagaaatattaaggaagaaaaaacagtaaaagatgcagggtttttttggggggctaaatatctccctatgataaaaggaagacaaaaactcataagaataattgatttttcttctcctaacaaagaagttaatcactatgatctattctgtcatagttaggtctagttcccaacaggttctaactataaatttgttttatttcattttgtatacatataattttacatacaaaactgatgtaaattagaaatcaaggcatcttttgtggggctttttcatgttattctaagtgtttttttagttccagtaagacagtcttaatgcaatataaccagttttataaaaagatttctagatatgcattaaacatcaaaggtttcaagctgtctcttcagattagtgaggatcatttctgtaagtaggagttccagaaatgatgagtagagtttatcaatttagcatggaaaaactaattcaaattctgcttttagggattacaacatggattttttgactttgagacatttgatgtggatgaatatgaacattatgaggtttgtacatttaattttttttacaaaacataatttcatgttgattaattttttccccctgtcacactcatgtattgcaaatcgagtgggtgctaaataaaagcattctggagttttccatagtggtcagttttgtcctttcagccttggttatttcctttgaatcaggagtcaccaaaattttattttggaaaaacaacatatctatatatattctctcatttatatacaatcactttgcacctttagtttataagaaaaatctagtagggtagtaaaattatgttacttttattttagaaatcaggttttatttaaaataaaactgaatttgtaccttttatttatttatttttgaggcggtgtctagctcttttgtccaggctgaaatgcagtggcacaatctcggatcactgcaacctctgcctccccaggctcaagctatcctcccacctcagcctcccaagcagctggaattacaggtgcatgccaccatgtctggctaatttttttttttttttaaagacaggatttcaccatgttgcccaggctggtcttgaactcctgagctcaagtgatcctcttgcctcggcctcccaaagtgctgggattacaggcatgagccaccatgccaagcccccttataatatttttggttgtataaattttattttgaaatatggctgaatttacttagttctaaaagttcactgaatttttttttccccatggcatcattacaagacttttgattaatgtcttgactgctcaaaatgcaggcaaaggctatctccaagctggtttgcgctgtaaggagatgttgaagcagagtaggataaggaggagtctagaagtcattaactttttctgaaagatgagaagcctgtacaatgtgagtaggttcaacattctcggaaggtgaactcatccgttgggtttccccagaggagtaatacaatttatctctatccttagtaagataaggacagccctcacatttggggccctagtctagaatagggctgtttggatattctgtttccatgttaaatgcaacatatctgaaaagaaactgatcatcttttacccaaacatggtcctctgctttgtgtgtgttaccacattgccatcctactgagcacccagcctcaaggctagaaacattgctgttttcctccctaacctagtgagtattcggatcacttctactggtgccacaggatgtattaattatatctgtctttcctctctgttctcacttccttccctctgactcaggtctcacgtcttttcctgtggacctttcattttaatagttctctaactgagcacggcccttctcctcccaggctgccttacacacacctgagtgatcctaaaatagagttctcatcttgcttgtcttgttcttggccccaaaccggctgtttctcccattgccctgctgaaatgtggataaactctcctgtcctggcattcttagctgtgatgagctccagcctacccttctagccccatctcctgttacttcactgtacgtactctgtgttccagctcctcaaactgcttagttactgtttcttgaatatccctgttgcttggctgaggttgctttttcccagattcccatccttttaacctcccgctcctccatttcgtttgtgttaaaatcctgcacagattacatctcacctctggagtactcttcttccctgccttcaatttcatgtgttacaatttgtactttccatttttcttatatcatggctatttgtgtacaagcctaattttccttattaggttgcaaattccctgtggatggaattatgaccaaatagaaaaacatatactttgttcttggatagaaagacttaacatcataaagctgctacttttcccaaaattaatacatttaatgcaatttatgaaaaaaacccaaagagagttttttttaataccataaaagcattttagtagtgacaaagtaagattcccctctaaaatccccaagttagaaacaaagggaatatgtacttataagaaagaaggtcagataacttgtagtacatctgaatcactgaatgttatgcagtcattttaaaaaatgaattgagctataccacttatcttggaatgatttctataatgtttgttgaagagaaaggatatggaagagtgctttaataaaatccatctttgtaataaaacaaacaatagtaagacactccctagcccacacatctaggtgtctacattatatgaccagaggtgacttactttgaagctaatgaagcttaaattttagagagcctcaccccctcaacttgtatgggcaccttttacagtcctatacccaattttgtgttaataattttttactctaagatggaccctcaaattaggtgagtttcagaccccaccaaaacctggatctctgccccatgtatatgaacatgaagaatgcaaatggcccattgtattaattattaaatatacagccaaacactaaagccatttcaattaaaggagagatggaggcaggagggggttggaagcggtgagagagaagaaggaacaattcaaggagaaaacttgtggatgttttatttattccttccttccttcctctctgtctaactttaatggtgatgctgagggttagttgaaaaaaatcttgaaaaacctgaagcagacagtgcaattttattcttggaaaccaaccagccaaacaaacaaaaatctgacaagaaggtagtcatggtttcaccttgacaacaaccatctaggtgatgggaggggagcagtcagttttggtgaagacttgatgttgtcaaacaacttcttttttttgagaatgatttatctgttctattataaagcctataaaatagaaaaccactattgtgattggcaggtggtaggtatttcttaatttttagtttcttaatttcttaaatgtttaaggaataaatgaataaaggaactcttttctgacaatctgtgggcccagtcatttcctgtcagatttctcttgctgtttgccctgttctagtgagtatgatatttggtgaacttgtggaatagctgaattcatacattttattagctccagtaaagtcagtattccagtgaaggcagtgtagttttcaaagcaaaattttattgttgacagcaatttgtgagactgtaagccttagatgattaggggatgttcaagatgcaacttttctttgctaaagtacatttagtaaatgatatggctcagaaaaacaaaaaacaaaaaaaccccaaaaaagcctaaaacaataagactgtatctctatgtgagattaaaggggaatcttatagaaagagtgctacttataaatgcttctagtgatgaggtcaacagaatgtgggaaatgctttgttgtgtaaagtctacagataaacctctgcccatcctgcaaaaggttatatgcatcttcctcctgcaattccagggtctaaagcagtgctgtccaatagaaatgtgaaagtcatatcatgaaattagttttaacaatacattttacttgttgtaaatatgttgtttacatatttagtaatatacctaaaatagcatttaacatgtaagcaatacaaaaattattaatgatgtatgtattttgcatttttttttgaattaagcctcagaaacccagtgtgtagtttatttattttatttattgtgtttttttgagagagggtctcgctctgtcacccaggctggagtgcagtggtgcaacctaggctcactgtagccttgaccctctgggctcaagccatcctcccacctcagcctccagagtagctgggaccacaggtgtgtgccaccttgccctgctaatttttgtatttttttgtagagatggggtttcgccatgttgcccaggttggtctcaaactcctggactcaagcaatccgcccaccttgtctttccaaagtcctgggattgcaagtgtgagccactacgcctggcctccagtgtgcagtttatactatagcatatcttaatttagactagccatatttcaagtgcatagtagccacatgtagctagagtatggattctgtaaggacaggctagccaatgtactgtcatagtccatcagtgtgacatgaagcctaggttatatctccttgcttcatgtgatctgtggttcacatgagagttaatttcaaagccctgttctatttagaaagctcgaggtgagatacctcaggctcttgctttattttcatgtgacttaaaaatggcccattgtattaagtattgataaacaacaccaggtgttggcttccgtcttggaaaagtatcttccaaaatgtggtctttccaggtcctttagcaagctgttgtggaactgtacagttccttacatttgccccgatcagacatgaaatttgggcagctatgctgggaaggtccacaaaagtaactgtgagatggtggtccaaaaccttcctctaggaatcagtgtcaaaacatttgtacttctccaacagcttcttaaggtattctcaaagaatatgtaccttgagaaccttgagaacttttactcctttgaaatctagccatttcaaatctagttcagaaaaatgaaagttgaccttttgtcctagggaaaaataatgaagatgatagagcttgaacattcaattaaattaggtagctgtaggtatgtgaggaactatgctcttcagtagtaaagttagtggtgaatgctagtgtaggctgatactctgcttgtaagacctggaagtggcacccatatacagagtctaccttcagtcagctttcttctgtttttttggggggtagctgtccttaccaaacaagatgttgcccaaacaccagtgatcattcatgatgctactgttaagcagttattatttatcagagagaatttgaagttatgtctctagtttgttattttgcttgtccccaagggctttccgctatttaccaaaaggcttgccatggtttgatgatggaagtgtgatgcggtagcagtgtcctgttcttagttgggtttgggggaagaaatgcagagaaatggtgcttcagtggcaacatcggaggttcctcatcactgtggcttacatttattaccccattcaaaattcagcccatgcaatttcaaggagtctccttaaatatctatttggggattaggtggagataaaagttgaaaaatgacttcaaaactgagaaagtactttgactttttttctttgagctattttctagctgccattatctgccccctgccataactcattccttttttgggtgtgaaaaacaaaattatgagaatattttccagaatatcaagctattgtggccttgatcctatacttttaaatgtgaacaaacccaggccacttctttaccattgtcttgatagaagttagagccacatttggcctgcaggcctgatgacagaggcacctgttactgccttgacaacagtcaccgcacagggcttccttttgttttttcatcatggcatatggagaaaatgataatatttgctcaacaccctgtgatgatagctcatagctgttggcaagtggcctggggactctggctgctccagtctgcccaggcagctccattctggtcacactggctaggaagctttgttttacagaaataatgatgtgcagatgaacatttcttatttgaaagtcaagtagccacaccatgctccttatggcctcattctcatagcttttcagttcatttgttgaacagatattaaatgcctcatgtttgctccatatatttgctaggcccaatgtttctttttctttttttgttttttaggaggctaccagtaatatcatctctccatgtgtagggttaaagcctttgctcttgtcacctggtaccatagaatccatgtattcttgtgcctcattctgcagaagttgccatatttgagtcttgcttcaagcccctacttttatgcttatcaatttagttgtgatacaaaatttctcactgatccatgacaggctgaaatgtggactattttgttcctgagatattcaagcaattcacaggttatcattattgctatcttcacctaaagggtgctcttttggggaaagaccatttctattctagaaagtgatttcacattattttagccacattacaatgtagcgcatctgggaactgtttgtgaaaaagcatgggttcattctggatgcctgggattgagtctttcttggatcttgggcctcttcgatcaagacttcacattactatcagggtgtaggttttaaaaattaagtctgattatatcattcccctgttttatcatttccccttcatgggctccacactgactaaaggtgtggaggaaatgcagactccttactacagcacagaaggcccttcttgacatgggcttgtccttcctctccacccttgtccttttccactccctccccatacccaaatccacgcagcttacccggtggcggcttctgagcttttgcacatgctcttgctccctcctcctgcctgtcagctcttctttctggtccactgtatttacatggttgactgttaagtccttctcaaccccatggaagctcttctcatgtagccttgtgtggtactctgtttacacatctgtgtctttcctgtatctgcgggtacttttgggcagcaactttgtcttattcttctttgtttgaataagtaacctactagcacagtacactcatagtgggcagtcattatttgtggaatgaaagaactaatgagtaaatgtgtgaataatactaaaaacaggagtatagcacatttcaagatattttatatgatctgttttcagtggaaagtgcctaaaacatgttgattaagaatccattctgattttgcagtaatattccaagggacaaatttaccatggtagacaacttcttcaaatgatgtttcttttatcagcagccaatctatgctgcaagagtgaggttttttttttttgtttctaagtcagttatttacaacacagattgctagatgttttaatctaagaccagttctgtatggaacatcaatttagtttaatatgtgagtggggacctatctccaggttgactctgtcatccttcactgcataagtaaattttcagattgaccaggtggtgtagagtcctaacaattgctctttagcacctaccttgagaaatagtaaagtttgttaggcctcctgtctctcagcaagtcacattgggtcaagagcaggagtcaatattgttgaacactgaagttatgatgcttcaagactttgtttggattagaatttgtacagcaaactaaaatgtaatctggatgctgcttggtctgccttctttacatgttggtggattatggaactggaaataatgggactgccataggactggggtcaagcagtcctcagaatgcaagtatgtgggcatgtcctcaccacctggagcagttatggaagtacgcctcctgtggcaatttgaatattggaagaactattagaagaagcattctcctggagctgtctggtagtgttcattacaccactccaaagcctcaagtttaaggaagcaaaattacttcctggccaccgcaactgcaaaagtgaggggacccagtgtttccgtatctgttacacccattgctggttcaaagctcacgttggttaagtctataaaatgttttgagacttaccctgacctaaacaattccccatggcttttttttcttcctctttaatgattgtttggtatcttttccttctttaatctccaaacttcttaagagagcagtctcgactctaattatggtctggcctctactgaaactgttcctgctaacacaagcgttcgtaaaaccaagtggccatgcttgttcttcttcctacttggtttattctatggtcgctctctaattcgcattccttccctgatttataatgtgctgtcttttggatttctcctccctccatggctagccatctttctcagcctccctctcaaatcctttctcttcctttgcccaccctgatttgctggggttcttgaggacctcatgatttctggttatacacactttgtatgattaagtgcatccagttccaagtttcaacaactatgtttgtgctgctgactccaaatcatctttgcgtcttgaacattggagtggcatctgcaaatgtgcactggatttttgcaccctgctgttgtaccagcagaggtgttcactgatctggacttttggaatgggcctccacatgttttccaaccccactgtctccctgctgtagctgatgctagcagaggtgaagcagtcatccacatgggacactcctcttttgctccaccacaccgtctccctcaaaagcaagtctaaattaataatctagagtttgattattatttaaagccagatggcatgtcaacttaaaccaaataattcaaatatttactttgctttaagctcataaagtgcctgtccttacagcatatttgcatttatgtaatacaactatactgtcaacactgttttgttgttttagaagttagggaaatataaagaaggcactttttaaatgaattttaaaatgccactgtggttctaccttattaaatttcaaaatagtctttgtgtcactgtcattcctcttacatacttttagtatcgcatgttcaaagtgtaatgtgactttttctttaatggataaaacgaagatgaaaataacatctacctcatagggttgctatgagaagtaagttgtatagaatacactagtgtttaacacagagtcagtggtatccacatatttgctgccatttttgttactgttatttgtcattcccacctgcctttggactctgtaaaagcatagagaatgctttttattattttatgtttgacaccaagttacagtccttgatatataataaaggctcagcaaatgtctaaatgaatgttgaattgcgcttcaaaactgtttctgcatgttttcctagaaaacacatctgttgatataggaaatcaaccttgtaatcgtcaacctcaaagactatcttttctatcttattgtaggtttgttacagtagtaaaaaggtcaaatagttttcagtgtttggacagaaaaatgtatttgtgaccattactatagagtcacaaatgcatttcttagaaatcataaaaattggccgggtgcagtggctcatgcctgtaatcccagcactttgggaggctgaggtgggtggatcatgaggtcaggagttcgagaccagcctggccaacatggtgaaacccggtctctactaaaaatacaaaaaaattagtcgggcctggtggtgtgtgcctgtaatcccagctacttgggaggctaaagcaggagaattgcttgaacccggaggcagaggttgcagtgagctgagatcgcaccgttgcactccagcctgggcaacagaatgcaactccatctccagataaaaaaaaggaattgtaaaaattcatgttttttagtcaaattatattttgagtgcaccaggagagtgagttattcaaaagaaagctgtgaatcttttgtagattggagaatcctatagcacagtgaataacaacacctaaatgtatcactttcaggaattcagatttttttattttggatttttcttacagtgaagaacatctatagttttttttgcatagtatttggtaggtagtaggctttagatcagaagtggtaatatcatactcttgcctcatccttgcttaggtatttgtttacaaaatgtggtagggttggaaagtaccttaagttcctgtctgatctagatttctttgaagtgtatgtgtgtgtttaattagaaaaaccaacttgggtcatataaagtattttattattgataaacattgacatttgtataattcactatgaataaaggcacaaatattaactttggaagactaccaaagtaagcgtatattatattaggtcagttaaaagctgtaacttccttattaattttttctcagatttaggtctaagacctaaatctttttgtttattccatcagccttatcctggctgctgaatataacccaatattatctactatttatctttttgggtaggaggatttgcaaacatattcttttggttctgtgaatgaatgtatcttagggatccccttgcctctctccatatgattaattataaaaggttgctatttaaccaaatggatttctgtaatccaaataagcagatattgcagagcgtatttatctaacctacttggtggtcaaggatacagaaatagtgaccgtagaaacctgttttcttttattgttcataaagaattggttttagtctcttgatgattagtgcatacctttattcttggattttcaaatactgtgttaagcttaataattacttgagagatattggataattaatttgagacttttatttaaacaagcaaattttaattgccataattagattctttatttaagttgttataaatagaagctatgcttgaggtttaatttcacatgtgcaatcataacactcagggtttcttagattttacttagggcattttggatattttttttatttcctttgagacagagtctcactctgtggcccaagctggagtgcaatggtgcaaactcggctcactgcaaccttcatcgctggggctcaagcagttctcctgcctcagcctcccaagtagctgggactacaggcacacaccaccacacctggttaatttttttgtatttttagtagagacggggtttcaccatgttgccctgggtggtcttgcactcctgagctcaggtgattcacctgcattggcctcccaaagtgctgggattacaggcgcgagccgccacgcccagctggagatattatgtttattacaactagattaaatgcagttcagatgtttataagatggtatgcacagtttcacatataactttttataactgggaaaaaaatctgcattaaaaaatgacaattatattttatagccaagttttgattttcatggaaatgataatgggtaatataagtaattaaagtaatggctccagtttttttttgatggccatattccaatttgtttaacaaatatttattgtgttcttatggtagagtacagagtctatattgggtcagttttctactgttgaggtccttgccatataatggggggagaaagctttttatatggatggtaacggatggcccagtgaagagaacaacattgcttccctgccctgaggatggagacaaggagggcaagggtaggggtaggtggggagggggtggtggtggtaaagacagcgtaagtgaagaggtgatatatatattttgtgatgcattgcacaaatgccttctaatgactgcaaaatttggggtaaccttactcgtgccccagtgtcccatggttcggaggcacatggggaagggaagaaaatgggggagatgatggagccatgggaatgtgcttggctactttcttggtcttcttaagccttttctgaggatctcttagcgtgtttagactagaggctgataactggtgctcaaagtcagccaatgggcatgttttatttggtttcacaggagttaaaaacctaatttaaaaagtcaacattttaaaaagagagttttcacatgaaaattcagttggaagatcagctgtgttcagttggctttcctacaaggtgtctcattagctggagtggaggagcacctgactctatgtatgtcccttgcttgaatcttgttatcctccagagtacagcttggctgactctggtttgtggaatggatgcgccaatatcactcgctcctgccttttgccatttccccctctaaaaatcagcattgacaagagataacagccctataaaaagagaaaaaaaattggaagtgtattcatcaggagcttgatatttacagatgttttttcattgtttaaaatatgtttactacattcatggaaagttttcatatttcccattttctcttatttatcgccaagacaagcaatgtttgtttccatttcatttctttgcagtggccaggaaacaaacattttatgcaaaatacctctgccgtaaataaaagtttctaaacatttcatacagtctagacacaagtttttctaaagcggattgaattcctaaatagcattttgagaatcaggtgcatgtttttattttaagctatgtttgtctacatgtatgtctaattagtactaagagtgaaaagcagttttatttgtaagggtttcctaaattgtataagaattataaaatatttttcttctcttttcttacaaaattctgccagcgagttgaaaatggtgacttcaactggattgttccaggaaaatttttagcatttagtggaccacatcctaaaagcaaaattgagaatggtaggtttttttttcctttaccatccaaacatttattttgatttatctttctaagtttcttaacttcctcagataattattttctttggtaatattctccaaagaatatttattcataatttaaaaaattgaacagtagtaatagtgtgttaaatattgtatttccagtaggtggagctataatcactgttttagaacttaacaaatttttagcttgccataaataggatgttcactttacctgacccccaattattagagaagaatctgagaaacaaactggtcaaactcataagcagattgctgtattctttcagtggttctcagatttatttgttggtagagtgctacacatcaagatgttctttgggtaacaccatgttgaataatgatgatgaagacaatctgtcatttactgaatacttaggtgctagttacacagatcacagcatttatctcttttaacactcaacacaactctatgagatacagatattgttatctgcattttagggaggagtaaattgagccttattagtagagaatttgcccaaggtcacaaagtaataggcagaactggtactccaaaccagaggagggctcctaaacattgccactacactgatacacttagttccattgtgacaactaggtacaattttctagctgacagtggttaaactacttatttgcagcataatttattgccatgggcatacatatttaggaaaaaaataaaaacaaaactaaaaataaaccttttgaatgaaacatgatcagctatgcaagttttcccattaagacttattttgtacttactaattttttctatctactaatattccctagaaaacaagtaatgatagacaacagaggttcaagaataatttacaagagaagtacataaaattgaaaaaatatccatgaacaaaatatcccgccccccccctttttttttctatctgatcatagaggtggaataccagtgttctgagggaacctaacttgaaacctctggtctagatttattcttcagctgggcatggtggcatgtgcctgcaatcccagcactttggaaggctgaggtgggaggattgcttaaggccagaagttcaagaccagcctcggcaacatagcaaaaccctgtctcttaaaaaaaaaaaaagatttatttttctttaatcatcatattctagaatctagtttcattgtatattgttattcatgcatttaggttttataatttgagctttcataaatatgcttatcatttcatacctgtgacatatttaatagggaactctgcttgaatcatgattttaccatgcgaatgggcaatccaggtctagagagttaagctcacaaacaggatacctctatggtgaagtcagaatttgatcttcttacttataagcttgctaaataatcttttttggtctggacattcaataattaacctctgtcattttgggttgttaggaattacatgttgagagcctgaggaaactgctttctgacaattggcctttcaagataagactgattaaacctgctttctgtgcaaattatctgactcaggcccaggaaatgttagtagggatattgtttcagtagtagttttgttgttgggtatttggcaaagtcgaaagactttcaccatttgtgattcatgtgtttgactacgttttcttaatgagaaattgagagatataattgtaaaagccatttaaaagtttttatgtatatagacattgtatattctatggatacatgcattttgaaaaaaatttttttttaacaaaagtggcatcataacatagttaatatcttacagccaggtttcttcacttaacatatcacgacttctttttatagcagtaaatgaagatccatgtaatcattttccacgactgcattgcattttgttctaccatatgactgtgccatattgtgttaatttatttttggtttttgcttttgtttatttagagacaggctcttgctttgttgcccaagctggagtgcaatggtgtgatcatagctcattgcaaccttgaactcctgtcctcaaatgatcttcctgcctcagcctcccaagtagctgggactacaaggcacagcccaccacacctggctggtttttttttttttttttaatttttagtagagatgaggtctctatgttgcccgggctggtcttgaactgctgggctcatgtgatcctcctgcctcccaaagcactaggattacagatttaagccactgagcccagcctgttaatttatttttggatgagatctaagttgtttatctcttattcttactctttttttcctttttaaatttcatcatctatttaaccagatgaagtttttcactttttaaaaactgctgtggttggcataaatgttcatacatctttttgcagctgtagtttcttctctaaattgttagaaatagaatcactagataaaaggatacgcaattttgtataataagttataagtgtcaaaaatatttaaaacaatttttggtcctatatttaatatggggaaaaaattatagccaccattcgcttacctgccaggaagggtgctaagcctcttgcatatacatcatctatttaatgatcagaacaaccctctggagcaggtggtatttattttatagaagagaagctggaggcttacaggaattacctaacttgtccaggttcataggccagtaattgttggcgtgtggattcaaacattggtctgtttaattctgaattttgtgttgttttaaattttattatagaggatgtacatgctcactctagaaaatttaagtaatataaagagtaaaactctttaaaaacatcatataatcaagaaataatcactttaagatatcgctctatatgcatattttattctatgcatgtattgtgccctgtcatattgacataaaaaaatctgaaagtacatttatctcacctttgtcagcttttatgatgcctagaacaatttcatttaaggctgccattggtaaaatattgctattttactggaatttccattttaagatctaatattcactagaagcttcactatacttttttgtaaagtactttaactttgtaaatgctttttgaagttgagaaaataattttgtgatggaattaataaacctgatccaattacagtgacgtcttggtaatttttttttttttttgaattgagaaacctgtgtttttctgaggaggctgaaagtcattttagaggctcgttagaaaagctgaggttttaaagaagtgatcaagtagctgttgctaggaggtagctaaaggaagctctaaaatcttgggatctgggcagaatgtattataagagccttaagtgtgtgtttgtgtcaatagggaacactaggagtttcttttagccattttgattcacattgttttgacagtggggaagagaagagccctacttttttttgttaaacatttttgaattgataaatgatggataacagcagaatgaaacagatattttggatttcagattttctgtaaaaatgtctcttaagtgtcactgtcattctcacttctatttaaacacacacacacacgcacacacacacacacacacacacacagagagagagagagagagaaagatagcttcagactgagaatcccgaccatttgaggcatcagcctgctcctttaatgagagaagcccagtgtcccgtttagtaaagagcctgggcaggttgaagcctggctccattcctttttggctgcgtgaacttcagtgagttccacagcttctctgagcatcagttttcctatatatcacagtgggagaaatatgatcctcactgcaggcacctagtgaggattagagatgttatgtgaagtgccttgcagagtattgggcacacataataggcgtttattagatagcaggtattatggttacatttttatcattagctggcctaatcaacagattttatgtctttctacatttgcctgctcagtttgcagtttttacttttaataatgactgagtgaactagtcatttgactctgctgttcttcagttttcgaactttaaaatgagggcctgggaagagatgaataaaaacatctcttttgactctgataccgtgttcatgtgtttggtcagcttaactccaggactttgttgtggttcagtgatgccagcgcaccatcttgtggccagatggagtaagggtcggatgaaggctccataagttctgggtcggcacattatacacattgctaaaaccaatctctcgcaaaaagcactcacgtacatccgtaaaagccacaaacagttgttcacaggtcataggacatttccattgttcgttataatttattctaaacagttttaaggatttttataaaacctactcaccaattctaaccgctcatgttcatatcatgttctcttatttggagtcttaacagatagaatcaagttgaatcttacttgaaattagccccagcatgggtgttggaatctgactgccaggattgaaatactggctctacctcttactagctgtatgtgtacgggccagcttttccaggcaccagaaattgagtaattgtaggttttaatgagataatccacataaagcacttagcatagtggctagcatatagtaagtgcttgataaacgttaggtgcaattattgttgttattattatttcagtgccctgttgccatatttggacaatttctgtccagtgttttcttctcaaaagatgtatacatcgtttctcttaatagtctatttaggcatgttagctatgctgccatttactcatgatggaaattcatatatgaaaagagagattcttgcagcctttgttgcagggaggaaggggataggcactgaaccaattgctaacacaacgtgtgacaggtgctgtcatggaggtcccaggcatgctagcaacccagaggcagaagctctcaccagcccgccacaccagggcaggctgcccaggtgtttatgagcccttctcctccccattcctcacatgatagaaaaaccgttacttcttaatgccaactacagttctttttttgctttaggctataaatctgttgcagggaaataatttgagcaagtaaaccaactaggaaaacagacttgatttttgcagttagaaaagcatgttttctccatgtttgtgtaggttattgtttctacacagaagattttaaataagctctgttttacctgtttgctcaaaagcaacatagcctgtgaaaatcacatatctgagctgtggattaattggtcctgccttccaattctgtcttcatcctttgtgtgacctggccaagtgtaccagttatggctgtccaactctggtaaaaggcagtttttggaatatgttgggtagctcatagactttaagaaaaggctggagaactaggcttagaagatgaacaggacccaagtgggaaaatgggaaccacactaggcatttcaaacataaagcatttaatacaaggagtttatttcaaagaagactaaaaagtaaaaaggcaacactgaagaaaccagaatatgttggagaaaacagctagtacctttaaggctggggggacaaaagggacaaaagtggagttagcagaacctgctcctgttttctgctgctgaagtgatgctgccaggaggacaggaagaattcccttcctcctcctcaggttgaggtttagtgcctcccatttttacaaccaataggaagccagatagaaaggtagtctgggaaatgtagggcgtagtatatggactccagccccagtgtcacagagcataagagtcggcttggagctgagagctgactagcataacagggatccaaggcagcaagaaatacagccaagcacacagcgtggaaacagtctggttcactttgctggctgccgccacccctggaacctcccatcatgaatgggttccaactgagataattgcactcagctggtatgttagggttcagtgaattctgaatgggttacagatgtggccatcagtgtgctgggaacttagtcccctgaacttttggagctgccattgcaaggcctgcaaaggccaaagcccccagtggttgccttggctgattagctaaggctaggtctgtaacccagctgactgtgtagctcccaggaatactcacatgatggtggagccactcaaaaataaaaggggatttaaaggtggagcatcttcctccctcaaaaaaaggaagtgtccacaaaagttattgtttatttttaactaaaaaaatttatattttaattgataaaaattatatatttatggtgtacaacaacttttgaaatatgtatacatcgtagaatggttaagtcaagtcttacttaagtattcacatatttatcattttttgtggtgagaagacttaaattttactttctaaatgactttaaagtatataatacattgttattatagtcactatgttgtacaatagatctctgggacatactcctttctaactgaaattttgttttctttgaccaatatcctcccaacaccccctcttttagtttcttaatctgttaaatggaattagccatacttaagagatggttttgagaatttgaaatgatacgcaattgtgacttgtacatagtaggtgcttaataataattgcttctggggagcattgtactacaaattaaaactatacatatggcaaaaaagcttcagctgtagttgaaaactgtttgtcaagtagagaataaagctcaagagagaataaagtcaccattctaggtctgttatgcacatttgattacttcaagaatgcttttgtcttgggagtgggaagagtatgctcccaggattcgaatctagaggttgagattttgaactttaatgatgtattttcagtacttacagaagttttctttttaacctcctgtggtgcttacagttatgcagattgatgcttgtaggagcttgctgtgacctcttctctcacacaacacactttcctcccaagctttgttgagatttatacacttcattgttgagagttttgtatttctgggttgtggaagatgaaatgcatgccttttgcttactgctcctttgttcctttaggttatcctcttcacgcccctgaagcctactttccttatttcaaaaagcataatgtgactgcagttgtgaggctaaacaaaaagatttatgaggcaaagcgcttcacagacgctggcttcgagcactatgacctcttcttcatagatggcagcacacccagtgacaacatcgtgcgaaggttcctgaacatctgtgagaacaccgaaggggccatcgccgttcactgcaaaggtgtgtgcaaggcctcggtggtggtggctgtgcttatcgaaggggcgggccaaggaagagcaaataacataaaacaaaacctgtttagtgtcttagaaaaacaatgaggttttaaatttcagacaactgggacacaaactcattttaataaccccttcttaaagaaacgattgcttgggtgtggacaattggtggtggtgtggctttcttgatatgccagtttttcagaccttacctttccaggcccacgtgccacaatgaggggaaacacagtagcagtgtctttaggctgcaggaacacctttaaacaggtaaaattctcaagagacaagggttgttagttttcctctctcctttgttttttttcagaattgcccatctcttctccatcctcttgcactgtcgtggttctgttttatgacccagttatctggacccccattccagtctctgcttttccctcccctcctagtctttggcttcatggagcagagcgtcttccatgcctgttgctaggggcaatccgctagcttacaatgctgctgatgtgatgctgcctcatggaataaacttaaagagtttgttttgcaaaaatctctgatctctgggggtggatactttggggcaggaattgttcagactatagaaggtttaggattgccagatttagcaaataaaaatacaggctgcctaattaaatttgaaagttagataaacaatgaatacttttaaaacaaaaagtataaatatgtcccaaatattgcagggaacatgcattctgtattttatctggcaaccccatgtcagctactcagaaaatatgacatgccatttgctctaagcttgtttgacttcgaggaggcttaaaatccactccattccagatctttcggtatggataatactggaaatattccagatattttactgggtctttgatttcagcgaggagaaatcactagggccgccctgggctggagcctcgagttcctcatgtgcagctcctcctagtgtcgctgggtggtgctgtgcttatggttttgggtctagacccggtttccctctcattttatgctaatcatctagtaggtgttggggagggtgctgttcttttcatgtgcctagtgctgctgtaactgacttattcagacgagtatggctttggttctgacagaaattaaaatgccgttttgtaggcccttgtttctatgtttaagatttgagtaggtggaggtactttgtgaacatgtgagcaaaaatgggaagctgcggtttcccagagacccagagagatggaaatgagcagcacgtggcctgggtttggagcagggctccccatgccaggctccctcctcctgggtgggcagagctctccctccccaccctccccattagctagcaggatgggccctggctttgtgggatatcttgtctctggcgtggagtctgttaggaaggtgtcacttgctggctcatttgtgggtgctgctttcaggccacagtggggtgccagtgtgttggcttgtccccatgtgattcatttgcaccctgtttgcttttccattgcattttgttcagtattgcccaggtccaagaaaaagcccacatgtcacgtattttaaacagcaatagaacttgagagctaatgggaacgtttatatcaacgtttagcaggagataatcctatcttctctttcaaactttagttttgtgccataaaaattgtattttttcctgagattaatttggccttatttcttagttcaagtagttttattattactacgtcgtagagtttatctgtggattagccatccgtatcttggattgacacattcaaaggagaagaactgcaaagctttcattaaaactcagtgtgtttcttgatagtatttctcacctgagagaccttgtgcaaagaaaactctctggtgttaaacattcttattacagatattttctctatatccttgacctgtgaatgtttaccttttaaaaaatatatgtatttattttatattgcaaatttcttttcttttcttttctttttttttttttttgagacaaagagtctcgctctgtcacccaggctggagtgcaatggtgcgatctcagctcactgcagcctctgcctcccaggttcaatcaattctcctgcctcagcctcccaagtatctggaattacaggtgcccaccaccactcctggctaattttttatatttttagtagagatggggttctgctggccagaactggtcttgaactcctaacctcaggagaatgttggccaggctggtcttgaactcctgacctcaggtcatccacctgcctcagcctcccaaagtgcggggattacaggtgtgagccaccgtacccagtctgtattgtagatgtttttattttaaatcagaacctttaacattgaagtcagttcttgtataggatagtcacatttacatgtggtaatatctttttgagattgttatttcattttcttccacttgcacacacacgtaggattcttttataaggattacacctttggtttaattacagctgtattgcttttcacagcatacttatctactataggcttattaattattttgacatctgccctaattaagtcagcttagttttctgggaattcaagcagcactcagtcttttaattgaactaaaagaaggaaggagaaagaatcttatcctatgtcaaatgaactttggtggctactgaaaagggaatgaatatgtcatgcctcaacgtaaagtattttatacagagataaactagaaaccaatttgctggggattacatttcaatatctgcatttcactttgtggttgataaaagagatggctatgaattcttgaaattctctaccacaaataataatctaaaatacagcaacgttgtgatagtccagtatgtgattatcgatgttctatagggctttcagaaaatgcctggaactataaagcaattggtgtttgacttggtataaatagaacacttttcaacatcttgtcatgctgtgccagggagccctttaattacaaatgcttaaaaaattttgttaaagtttttatagaaacttagtgaaatgttcctattcagttcagttgtggtaagagctcctaactattgagtgctaagtgcgttctttttatagatcaaaattatagactcttttttaaagggggaagctgctttagtttcagagaaattggaaaatttcctgcacctcctttttggttgtgagtgtgaacaggagcctaagtgagggagccatccaggtctttgcacagtggggagcagtgagagagagtgttgtctccataaggaaggcccttttctctccagatagacacccaaattggtgacttgaaggaagaactctggaaactcactgggctctggcttctgctccaggatgtcacctgtgttttatctatacggttgcctatagtcttgccaggcatctagggaattaacaacgataggcactgggtgaaatagaaggcaaattacgcagaaatcttaatcataaagggagagccccactgagaccaaaattaaacctcactcttcgaaagaacattgatgtttgatctggggcaagggttccttcagattaaaacagaacacacacacacacctcatctaatgaaacagagtatgaatacttcttaaaaaggaagggttagccgggagtggtggcccacgcctgtaatcctagcactttgggaggccgaggagggcagatcacctgaggtcaggacttcgagaccagactgaccaacatggagaaaccctgtctctactaaaaatacaaaattagccgggcatggtggtgcatgcctgtaatcccagctactcgggaggctaaggcaggagaatcgcttgaacctgggaggtggaggttgtggtgagccgagatcgcactattgcattccagcctgggcaacagcagcaaaactcggtctccaaaaaaaaaaaaaaaaaaagaagggttaatgggaaggaaatgtcaggcatctgtagacacaaaattgttgttttagtgggatgaaaaactttttttttttgtataaagcacagatttacataaacagatatgcagtctatctgtgacagtgaaatttcatggggactgattaggaataaaatatctaaagaggctcctggaaggaacaataatgtaaaaaaggttgaggaacaactgatttaaagacatacatttttcatattttaacatttctgaagttagaatggatcttaaaattgatggcatgtcatagtttaattttttctttcttagtggaacttacatactacacgactgtagttttagatttgctgaaatgctgtgtgctcccaattactgggagataagagaagactacctttattgtttgatcagggaaagctgacaaaaggtcccctcaaaagcagaagattcttgaacatgtaaaaaatgaaactatcaatgtttccctactttgttttgttttacacacgcgcgcacacacacacacgcatatgcacacaattttttttctttctttttctaactaaatgttttcatggatgaagtcaacattgtaccagttttctaggtcagaaatgtcacttacctataactttccctgtgacccagtcctaatggatttctaattgagctttacatctttgttgcagttgctcaccctcatccctttccaccctcatcccaaccccccagccacccttgcttccctgccccagccttccatctcatctctcttgcttccatctctggcttttccactccagccagtaatgctgctgccagacccatttgctttttatcacatcactttcttgcccccaaatctatggcaccttcattttgcccttttcattgtttaaagaaaaattgggttttacatgatagcagttatgtttactagctgttgataatatcatcacacttgaatgcagagcagtttctgggcaaggtttgatttcagtgtttttgtggtagcatttgctagactttatatttcttattctgtttcattctcttacagctggtcttggaagaacagggacattgatagcctgttatgtaatgaaacactacaggtttacacatgctgaaataattgcttggattagaatatgccggccaggctctattataggaccccagcagcacttcctggaagagtaagtatattgtccccattaccacattatatcctgttcttgatcctttctacctcttgttcccctggttgtggaccatgtcagcctgtggttataaaatggctgcattgttaagagaagtgtgtgcctctaatagaatattgttgatttgacagctaatgcattctaactttgtaccttttatatctcttagatcaggtgagagtgagaagaaaatcacagagccatctctgcctaccctttttctgtcattttctatgtgtgatctggctacagtgcaattttcttatgacatcccacttggcacttttcattcttttcttttgtttgcatgtcttaaagcataatgagaaaaaaaaaaccacaattaaggtcactcagtgattttggtaagattgctgctctcctgacaactaactaactaaactgctaatgtaggtacaacttatgaatatacccaagaagttaccacagaagaaaaaaggaggagaactgagttttagttctggctctccactaactagctttatgaccattatttagaagaatacttatgtattcactcattcatttattcccacagccattcattcattaactttttgtccagcctcagcccaagagagagagatttaacctgtaggacacaatcctttcttcttagaatgttagaacgtatctcaatgtactcattaataaaacaagaagatgaagttagtactggttgatctaagtccagctctaaaatactatctattagtgatatcttttactgaaatttcatttttttttctttttatgctgggttgactctattttattttaattttaattttttattttttgtagagacgggggcctcactatgttgcccaggctggttttgaactcctgggctcaagcaatcctcccaccttgacttcccaaagtgcagggattacgggtgtgagccactatgcctggctgatggctctcttttgaatagcattcttttccatataattatttatttccaatttaaatataattattcctttccagttttaatgatcatgatcatgtgtgaattcgtaaagaaatgatcatgaatttcataggaagatgccataagtaaactcttagcatctgaaatgattaagaggatttgagcctgctgagggattacttactttagttgccagtcctagaggtaataactgattaagaagtgctgaaaaatgagtggttatactttagcttaaaagaatgatgcagatgtctaatgaatgcattagaaaaaatatccaaggacaggatcattacaaagacagggatttctctctttttacccgtgaggtacaaataagataattctgttattttggagctttattcttgatcagattctcattgtcttcctctatttctctgttttgcattttatgtgcctgtagcctggagctttgtgccatgtatctgccaggttctcattatactaattgctgaagttgaagaaatggtcttagggttaaaaaaccaaatactcctaagcctagttctttaagccatttaatcaatgtcttaaaattattgcttgtcatttaataggtattgctatacctattgccccaggcattctgctaagtacagctcgcaaggtgaggagatatagcagagaattctaccagtcaaggtcacctagctttctcagggtgtcagataacacagccctcatgtttcatggctgcatactccctccaacctccctattatactctttctctctgccatatctcaaaatagtaagagaagaaattagagttatgaggcaaaggcactctaggctgaagaaaggcttttaaatttatagatacttaagctgtatataaagaactctcaaaactcaagaaaacaacttaatataaaatgagtaaatgatttgaacagaaagtcctccaaaatgatatacagatggtgaatattcctcatgatcataaacacagagttcttaaagaaacattgcatatcaaatccagctgtataaaaaagatagtgcatcatgaccatcatggctcaatattagaaaatcaatataattcaccaaattaacacaaaaagtagaaaaattatatgattatcccaatagatgtacaaaaatttgacaaagtttagtacccatttttaatagaaactttcaataaactagaaatagaaggaaatttcctcattcagataaaaataatctatgaaaactctatagctaaaattatatttaatggtgatgcttttcctgtaagatcaggaacaaaacaagggtgtctactctcactacttctaatattatactggaaatcttaaccagtgcaatgaaaaaaaaagaaagaaaaaaaaacttagaactaaagagtgaaattagtaagattgcaggatacaaagtcagttttcagaaattttagcaaaattttaaaattctgctaattaaaagacacacagtatatatatctgacaaaagacttgtacacatatattaaaaagtataaataagcaattttaaaaattaatttttgaatgggcaaaagccttggccagatatctcatagaaggtaatatatgtatatgaaaagatgtccaacatcattagccatcagggaaatagaaattgaaaccacaatgagatactattttatgtcaaccaaaatggcaaacaaaaaagaagttttactacaaaatgctggcaaagatatggagcaactggaactctcatgtgttaaccaattggtgtataattgtttggccatttctcataacgttaatctatatttaactctatgacccaatgatttcatttctaggtatttaaataagggaaatggaaacatttgtctacaaagacttgtacaagaatattcacagttgctttattcatagtagcccaaaattagaaatcatccaaatgtccgtcaacaatttatgagtgaatatatcataatatgttcataaaatgaaatactagccagcaataacaaagaatgaattactgatatactcaacatagatgaatatcatattattgtaagaggaaaaaaaaagccagacacaaaataatacatgctgtatagataaagcccaagaacaagcaaaaccattctgtggtgatagaaatcagaaagcaattgcttctgaggtgtgtcagggaaaactgaccccccaaaaaagcatgacagaactttctagagtgttggaaatgttctgtatcttatcttgggttgtgtttacacaggagcacaatcagttgtaattccatatactagccttaaacaattagaaaataaaacctaaaaaattataccatttacaatgtatctggtaacttcaggttagagatgtgcaatatctctacacagaaaaccgaagaattttttttattgagagaaattaaagaagatataaataagtgaaaagataaagattatcttgaataagatcaaagctggaggatttacactcccagatatggattcattttaaaactgcagcaattatgatattgagatattggtgtcaagacagacaaattaaccaatagaatagaatataaagtgcagaaacaaattcaaaaatatacagacacttgatttatgataaaggtgacatgttagagcaacaggaaaaggtctttttagtaaattctgctgggtcaactggatatctatatggggaaaaagaagaaccttggctcctatctcacaacctattttttaaaggaattcctgatgagttgttgattcaaatgtgacagaaaaatcagtgaagcttctggaagataacataaaataatgtattcatactttgaagttaacaaagatatcttaagtggtacatggaaagcattacctataactgagttgaaattgtaaaattctcttcatcaaagacactattaagagagtgaaaatgaaaaccacaagagtaggagaatatttacatcacataataatgggcactgtacttgtacccagaatacttacactcctacacattaacaataaaaagacaatctgataaaaaatgtgtaagaaacatgaaaagacatttcatagaagagaatgtacaaatggccaataaacatacgaaaagcgattcaccctcattagctatttcttatcttttggtacagctatctgttggagatatacctgtgagtggaacagttgggtatgtgtgcattcagagttagaattattaaacagttttccaaagtagatatgcctgtttatgttctcatcagcaatggtttgtcagtctcttaaatttaagccattagattttttaagtgataacttgctttatagttttaatttgctttttcttgatgactaaggtcaatctttgtatattctagatactagtcctttgtctggtaaatgtttttcaaggtttttttcagtctataacttgtcttttcatcctcttaatagggtcttttacagaataaaagttttaaattttgatgaaatcccttttatcacttttttctttttgatattgtctgagactcttagtttagccctagactcaatgatttctcatatttttttttctaaaaagtttatagttttacattcacatttaagtctgtgatggattttgaggtttttgtttatttcataacgtgtgagacttaggtcaagcttctttttttttggcctatgcatgcccagttgcttcagtaccattttcgttgaaaattcagtttctccactgaattttttctatagcagcatcaaaaatcatttggatatatttgtgttgatctatttctttgttctctattctgttccattgacctatgtgtctccttccttcaatgccacactctcttgattactggacctatatagtgagccttaatattggaagagtgattccttccactttctccttgtttaacaaaatattcttagcaattccactttcttttccttttcatatacattttagagtaagcctgtctaaatctacagataatgtttctgggattttaataggaagtatgttaatcctctatatcgatttggggagaattgacatctttactattgttgagtcttctaatccataaacatgatatgtcttttcatttatttagatcttctttgatttctttcatcagcattgtgtagttttctggatgcaagtccttttttgttaaatttacacctaagtacttatttttttttagcaattataaatggtatttatgtccatatgttcattgctggtatgtagaaatacaattgatttatctttttctttctttctttttttttgagacggtgtttcactctttttgcccaagctggagtccaatggcacgatcttggcttactgcagcctctgcctcctgggttcaagtgattctcctgcctcagcctcccaagtagctgggattacaggcgtgtgccaccacgcccggctaattttttgtatttttagtagagatggggttttaccatgttggccaggctggtcttgaactcctgacctcaggttatcctcccacctcggcctcccaaagtgctgggattacaggtgtgagccaccctgcctggccacaattgatttttctgtttattttgtatcccgaaacctaggagttttatatgggagtgtgtgtgtgtgtatgtatgtgcaaattcttggggattgctttttcatccacaaataggacaattttattttctttctaatctatataccttgtgtttccttttcttcccttgttggacaggctaaaacttccagcgctgtgatgagtaagagtgataagagcagacatccttgtcgtgctcccagtcttggaaggaaagcatccaggcattcacctggattaagtatgttaattgaggttttctatagatgttctttatcaggtcgaggcggttcccctctatttctgtgtttctgagggttcttatcatgaatgagtgttgaatcttgtcaaatacttttttggcattgattgatatgatcacatgattttcttcttaagattgttaatatggtagattgcatcgattgttttttgtatattgaagaaggcttatgtccctggaataaacaccatttggtcatggtgtgtaattctttttatatattgctgaactctgttagttaaaaatttttatgtccatattcataagtaacattggtttgtagttttcttttttttgtctgttttgtctgggttttgtgtcaggataatactagtttcatgaaatgaattgggaattgttcttctctgtttcctggaagagattgtgagagctggtgtgaattcttaaaatgcttggtagaattctccagtgaaattatctgggcctggggatttctttttaaaattatgaattcaatttccttaatagatataaggctatttgaataatccatttcatattgggtgaattatggtagtttgttttttgaggaattagtccgtttcatctaaattgtcaaaattatgtttgtggagtgtgttttttttttttaaagtattcctttatgtttgcagagcctgtagtgattttcttggcttcatttctgatgttagtaatttgtgtatttttttttccctttgtcagtctccctagaagttggacaattttattgatattttcaaagaatcagctctttgtttcattaattttctccttatatttttgtttttaatttcattggttcatgtttttatatttattatttccttctgcttccttgtagttttcagtattttggcaatgtgtctaggtgtggatttcattggaattatccttttttgaggtttactcagcttcttgaatgtttaggtttatgtcttgtcaaatttggaaggttttcagctattatttacttaagtgctttctcaaccctgtcctctttttcctttccttctggaactctgttgacatgagtgttaggtttttgttatagtcccacagctctctgggactctcttcatcattttatttttagtttattttctcttagttattcagattgggtagtttctactattctatcttcccctttacaaattctctcatctctccattctgccatttaacccactcactgaattttacattttggttatatgctattctaaactttctgtttggttttctttatatctatttctttgctgaaacttcctattttgtcagttgtttcatgtgtctttgtaattgtttgttggggcatttttatcatggctacttttaaatctttgtcaaattattctaacatctctgtcatcttggtgttggcatttagcgatcatctcttttcattcagtcaatgtcaatgtgagaaaatgttaacctggacattttcctagtatgttgagactctggatcttactaaaacattctgttgtatctggcttcttacactgcttcagcagaggaaggtggtggcagctgggttggggggcagggggttgccacattgctactaccaggtggaggcaggaatctggattctgtactcagcctctgttgatgtccaaggctgaggggcttcttgttgctggtgggtggaggtgggagttctagttttccatcgggtctgcactgacactgtgataggggtcaccttgttactgaagggtgttggtgaaagtcttcactctccactaggcctcctgtgacaccactccagctgacagaggagggttgctggtcactgcctggttgaggtggacttccaggttccaccattactaccttagtgaggagtggggccgaaattgggggatctcattatctgactcccaacttagccttctttgacacttctgtggcgagggattgacaaagggtaaaggggtgcctacctatagcctggcagcgtggaaatccaggatcccctctcagtctttgctggctggcagggttagggccacagtttatttcctgtggggtttggctggagaagagcagttgttgaaatgttttgttgtctactaggatacccttttcctgttcctttgactagacagagcaggcttttcttcgggctttaaaaatatcagctctgggctgggcacggtggctcatgcctataatcccagcattttaggaggccgaggcgggcagatcgcatgaggtcaagagtttgagaccagcctgatcaatgtggtgaaaccccgtctctactaaaaatacaaaaatcagctgggcatggtggcatgtgcctgtaatcccagctacttcggaggctgaagcaatcaattgaaccttggaggcagaggttgcagtgagccgagattgtgccattgcactccagcctgggcgacacagcaggactctgttgaaaaaaaaatcagctctattggcatttttgaatcatatcttcttcagccctaagactaggctatataaggcaaaaggaaaactcgaggaactcaccaccatttcgttacttaggtctcaaggttccaaccaatctgcctttttcttttctatttttcagagtcttgtttttttttttaaatatatataggattttaaattttacttatgggaagaatagggaaaagtacatctactttattttccagaaatggtgttattgccttatattttaaggtaattagtctgcctataattttcggcatgaaatctgctgtggcagtctgaataatgtctccccaaatacaggcatattttaatccctgtgaaccagctgtgaatgttactgtatatggaaaaagggactttgcagaagtgattaagttaaggaagttgatgtggggagattatcccggattgtttgggtgggcccaattaatcacagtgtccttagaagagggacccagggggagccatttagaggagaagccgatgtgatgactgaaacagattggactgatgcattttaaagatggagtaaggagccataagccaaggaatatgggcagccactgtaaattgaaaaaggcaaggaaacaaattatctcctcaaagcctccatatggaaccagctctgcctactgtcactgctttagctcagtgaaactgatttcagacttccaactccagatctgtaagaaagtaaactggtgttcttttaaaccaccacatttacggtaatgctttacaatatccataggaaattaatacatctgctttgtatagatagcaaatatgtacagcaggagatgcagatcctagtgatgaacatgcatattctgaacttctcttattcatcatactttctaatttggagtatttaattccaaatactccaaattagaaagtatgatgaataagagcatatagaggagtcgtgtgacttaagtgttatttaaggaagcttgagttgcaacaatgtgtaagatgaattgggtggatggagattggaatcagagaggctaaaaaggaggctattatcatccatctcagagagacaaggacttatcaaaagaggatagaagttggactgaagatttagagatgggtaccagggacatttcaagaaaaaagaaaaaaacaaggctttgaagactaactaatgatcagagagatgaagagtatgaagtcaatgatgacgcaaaagcatgaataagtaacgtgttcattaagcaagaaataagagggtaaaaacgttttctgttaggttttcacctgtcaaaaatgactgaacaagttaaagtgattgtattcttttaaaggtgaaaagtcaatcagtgctttttagagaatgttaattccaaatctctgactttagaaaggctggtttgtcatatcctcctagtccttgaggaccaaaatatgtccaggtgcttgattgccatgtcttaaacaagcagccctcttattcactggcagtaagagagatgtttattagcatccttttgagttgttgatgaatttacttattggctgacctctcctttgttacagtctgaaattttatatttaaacttttaaaggatataaagctctctatttgcaaaacaaccatcaggtgtttttcttctatttaaagctgaagttcttaaaccaaaaataccattctgaatcccaaatgtgtcttctatcaaacatcctcaaggttcttaaaatgatgtaaaaatacatctttttgtttttgagccaactctggactcaatgtcctccgagacaacctttagaagtataaaggtggagtcaggctgcttttacaacttggttgattctatttattgaacatttgctgtgtgaatgttcccctgaccttgggtatcattatctatctgtgatagataacctatatcacagatagatagatctatctgtgacagataacctatatcacagatagatctatctgtgacctcggggatcatcatctgttaaagctttcattcattataaagggatcattgagggactagtgtggggctcccacggggattttcagctcacggagatcctttatttatgggtctcaatatggcattgtttttgttttacatttccttctgagacagagagaactcacataaagcctaaatctggctcttgcaggaagttttggctctgtaaagcagagcttccattttgaatgaggttatctttatgaagcacagtattatggttgaactctttttcattcttaaatccataaatcaaaaattcccctgttctactttattacaatagatgttttcatcagcttctactgagttggatattttcagaattctaactttgttgcaagccttccattgtcttcagtgcttctcaaacatgaaaatgcctaggaattgttgggggatcttgttcagtgcagtctctgattcagcaggtctgaggtgagacctgagagtgtgcatttctaacaggctcccaggtggtgtgctgctgctggtccctgaaccatattcaataacaagggtgtttggctcatccttactctgtaaatatcaacttaggctacatcttaatttggtgccaatagtatttcgtaagtttcacaattggattgagctagatcagaaattaatagttaaaccattgcttttttatttcaggaattagcaaaaataagatgaaaaacatctgtttagaaaatggaaaatgcttgaaaaagtctaacactaatggtttgagttttagttgagattgacttctatcatttccttttaaaaaaagttaattcttttttaaatttcaatagcttttgggatacaagtggttattggttacatggatgaattgtatagcatgaactccgagattttagtgcacccatcacctaagtactgtacattgtacccaatatgtagctttttaatctctcttgtccccgaccccaccttctgtgagtctccatagtccgttatattcactctgtgtgcctttgcatacctgtaccatttccttttatggttttcttttagatacatgcagtaggtcaaggaatataggctaaaaaattttaattatttattttaagggtttaaaattttgtgtttcctaaaatacagaaattataatctgaaatactataaaaatcagaatttaacaaaacaagatacagtgttttattagaattacaagcatactgcataggtttgagtttacactatttactgaaaatgacatttttgtagtaacactcaattatagaattttctgattttcaacagttactgctgcattatctgatccatttgttgactgccagttgatactggaactactgactaagcaaaaataaaatcctaatatgggttcaagtattaaggataattaagtatgtatcagaatctttggcagtggttgcatcagaaatttattattaaatactcatgccagttattactctagatagaagactgactttttaaattaatgttttattatggtaaaatatgtataacataaaccttacaattttaaccattattatatgtataattcagtgactttatatatgttcacaatgttgtgcagccatcaccactatttccagactgtttcatcattccaaacagaaactttgtacccattgaacaataaatcaccattatctccaccccctacccaagtccctggaaacctctattctactttctgacattatgaatttgcctgttccagattcctcatataaatggaatcattcaatatttgtcgttttgtgtctggcttattttacttagcatatttgcaacattcatccatgttgtaacatgtatcagaatttcttttagaggctcaataatattccattgtatgtatatatcccattttatttatccattcatttgttgatggacgtttgagttatttctaccttttggttattgtgaataatgcaactgttctgaacattggtacacaagtatctatttgaatccctagtttcaatgattttgggtatatacctaaaagtggagttactggatcatgtggtaattctatgtttatctttctgaggaactgtgaaactgttttcctcaacagctgtgccatttttcattcccaccaacaatgcacgaggggtccagtttctctgtatccttaccatgaatggtttttgtttattttgttttgtgtgctctgaataaaactatatgaaaaaggttagagatgggggaaaaggtattgtaagcagtaagaaagtaagcagtgatatattaggcttagttatgaagtttgcattttggcatgacactccaatgatctagcttctgattgtagggttctatacctaaactagatttagttagttgaatcttttggagaattcccttcctcagttttttccttctagcttcattttctagtatgtttcacaattaactgccttcccttatgctttcagaaattctctaaacatcttcctagtgaatcttccacttgtaccacagcatttgaagaactccttgaatacctgttgccttcccgccccctgcatcttggttactgcttcccatctgtcttcctttgatagcaaggtagaccattttgttagcccacttctttaggccaggaactgtctctgtttccataatagctctgggctggtggaatagaaggtacacaaaacagattggtactcaagtcatggctagagtaggcctaggccaagctagagagtgggttatgtttctatttggagtgaccaaacagtggctttggatggactttggggtcagggttgagttttttgggaaaattgtccaggatggaagaaggataaagataaagagttcggttggtgtggagatgggattgggctgggcttagggaagtgaaggaggacaggtcagccacacacagaagcctgcacaacagcttccattgtgttctggactcagaactaggaatattcactataacagtgtgactgacttgaatttcattagaggaatattaaaagcagatgtaaaaaaagacctgtgaaggctctagatcagaatcaactgtaacttggctcataataagccaagttatttcgttattttcttatgtcccatgcctggctagcctaaacccaactaacccagggcaaggacatggctgaaaacaaggaccccagcactggctatacttcttaaggctctattcaaaccaagacacatctcttcctgtcattttaaagcacatgccctttttagcagagggtcagtaaatttcatgctgtcttagaaaatgcactatattcttggagaatgtactttgagctggtgtgttggcttcataagatttgatttttaaatactaaatgcttaaaaatacatgttttacttcttttgtttgagatgaggcttttagggagtaatagacaccacaataaaagctagcatggtttgcattttcaataaaaaggaatttgcgtgaagtgctgctttttctcaagaagcacttgcgtacagcattgcttagcaacacacaaatcagctctgacaccttattcatctttaatattcaggttcaaatcaagcctttccagagatgggacagattgcgtctttcaaaccaagcaagtgaaagttgtcactttgtaattttcatctttaagttggcagcagcatcagaattttcattttataacttcttttgaaattggaatttttttcaactagcctcttatgtccttctcctctgttctcactttgttttttgttcctaaagactcttaaaaggtctttcctgtatttttggtatcaaatttaaattccttaggatgacatgcaaggcccatctctcatagcctctgcttcagccaaattaaacaattcatgttcataaacatgctgttttctttgatatcactatttttccagcccacattgttttctttgcttggcaatactcttagctgggtaagtcctgctcatctttccagatacttctggaatgttggggaacttctttttgattccatcagattgagtaaggggcctcttttcctgaggtcctgtgcaaatcctgatcatagggtttataatatcggacttcatttgtttgcttttctcatcctaaactagaaatcccttcttgagagacagggattcagtctttcatccttatatcctgtcctacctgtgtgtttcatttatctgaatttcttactatttatgacagagctgaatcttctctttttttaaaatcatgatttttattcttttcaacctatctctctctctctgtgtatatatgtatatacagagagagatatcgaaagatatagatatctatatatatatttttttatactttaagttctagagtacatgtgcacaacgtgcaggcttgggaggctccatccgtgttcccataaatgacatggtcttattcttttttatggctgcatagtattccatggtgtatatgtaccacattttctctatccaatctatcattgatgacatttaggttgattccttgtctttgctattgtgaatagtgctacatgaacatttgcgtgtatgtgtctttatggtagaatgatttatattcctcaagatatatactcagtaatgggattgctgggacgaatggtaattctgtgtctcactctttgaggaattgccacactgctttccacaatggttgaactaatttacactcccaccaacagtgtataagtgttcctttctctctgcaacttcaccagcatctgttattttttaactttttgataatagccattcttactggtgtgtggtggtatctcattatggttttgatttgcatttctctaatgatcagcgttttaacctgaattttatgtgatatgtgaaatctttgtgagaaagtattactcaatcctgttgctttaaaaaatatctatgttcttactggtggcgtctccttgatgatgcaattatttcactagatgttgatattttttatgacgaaccacagtgtttttagtttaattctattctgtacagtgtgttataggatagaaataaagtgattttatggaatagtttatcttataggaaatgtatgaaggtgatccccccaataaaaataaaatcctcagaatgtcattttgcttacatattttaaattatcttcatataactttgaaaacagttgtgattttgccttaatgaatgaaagaaagtttatacatgaacttcaaacacattttcttttctaaggacaatctaattgaggatataagccttgcttttagattctaagagtaggtttttaaagttatgtgtgagggcctttcatggtaccacccaaaagtaggtatgcaatacttttttgggtaatatctccatttaactcaagttctttcatgtacagttttgagtccagttattctctctgtttttataaataggcatatcaaattgctatttgagaaattgaaggtttcaaatttatatttaaaagacaaatgggctcataatctttattgctgtggaatttgttctaagcatctgaggacttcagcagtcaactatatagacaaatattggaggatgacatttgtgtttaatatagaatcttattttggctttttgaaagtgacttcattgttctttattctaagatatcataatctttctagtctgatttgtaaatgcttatttgctaaatcttttcctttataagacatcatacctttgagatgagagtagattgttttaaagataactttttcttgtcgttttgttttgttttgttttttatacagaaaacaagcatcgttgtgggtccaaggagacattttccgatccaaactgaaaaatcgaccatccagtgaaggaagtattaataaaattctttctggcctagatgatatgtctattggtggaaatctttcaaaaacacaaaacatggaacgatttggagaggtaagttttccctaggagattctatcttcttaaaactgatgttctgcatttgtttctcagttggacctatataacatagcagtgtcttttctctggatgccacgagtaccaagtttttagaagtagagccatccgtctatatagcaagaagcagaggaaagaaaccaattgcccttaaaaaaaaaaaagctataatttaaggagtaaattataaaggaggctactctggtaaggggtaatatttatagaaaggaaacagaaaagcaaactttctatttgaaaattaaaataaatatcaagaagaaaaattttaatgtgacaattgaggaaataatacataccacaagtggtgctttgaaagcctcaaattcatgctgatttctaaagtaagtgccaacttgaaaacatgattagggcacttttttaaaaaaaaattaaggctctactgtaaacaaaccacggtaaatagttgatatatattgtctgattaatattcataactacctggtgagttaggtaatactatctctattttataggaaggaaattgcatatcagagatgttctaacctcagtgtcaaacatggttcaatccatgtctgtctgagtccaagcttgtgtttttttatatcacaccctgttacctctgaataaaaatagaagtgatttactaagaattaggattatgagcatttttggaactagaaacaacgttgaaacaccatttgtttggttccactattgtagagacaagaaactggggtcccagaaaatttgtgatttgtgtaaagttccagggttgtttagtagtggggccactttgacaactgggcattcaattcctagtttaggtctttctaccacgttatacctgaggtgaagctaagtatctggtttatacttttatatctctaaaggagaaaaaaagaaaagaaaaaaaggacctgttcaaaatagtggaacaagctaggcagcgtgatgtgtgcctgtgtggtcccagttacttgggagactgaggtgggaggatgtttgagcccagtggtcgaagctgtagtgagctatgatggcgtcactgcactctatcctgggcgacagagcaagcacccgtctaaaaaagtaaaaaagaaaaaaagagaaagaaagaatatagaagcaacaagtgtagatttacattctattagacagtgacccattagacccggacaagggccttaaaccaaatactgtggctcaagcttagcccacaaggagcccagaatggaaggaacacatcatagctctcttaggttaatgactggcatcccaaacagatttctttttagcaagaaagatagccagagtgcttggagattgggagcatgaattttctttcagggacaaaggatggagaccgttggaagaaatgatttttaagcccagtgctctgttctccaggatggctgctgatgaggtgactaagtttacccattcgagtcatctgtcctgatgaaatgtacaccttatccaaggtcatgttgatgttagagcctttgttgacttttctttgtctctgtgttccagtttcacctattaagagcaaataaaaagaaagggtctgaactaagattttaacatgataatatagctaagcaagaatacctttttcttgctctagtcagcatttcctccccaggttgagtacaagtaaatagggctttgagttatgaactctgaaaagacaaacataaagttaatcccgttatctgagaaacatatttaccttgcaggaacatagtactttctatatcataatcttgattaagttaacatctggtagttagaacgttttattctcatactcttttaatccccaatttgttgaatttaagaaacttaacatttatgtatcactgtgagggtaaggaatgcaatatgattggaattttaaataagacagttttaaatataagtgtatataagtctactcccccgtcttagtccatttgggctgctgtaacaaaacactacaggctaggcagcttataaacaacagaaatttatttctcacggttctgcaggttgggaaattcaagatcaaggcatcaacagatttggtgtctggtgagggcctgcctagtggttcatagacagcaccttctgcatcttcacatggcaaaaagggcaaacaaactcttaatgccatcaccttgtggggttgggatttcaacatatgaattttgggggctacaaatattcagaccatagcatcccccatcattattttagttttagccattgaaatgctattgtttctgaaattcaagagcagaaatgaaagaattcagagatgccagagaatgatggtatggtgaatattttacacagcatcatgtatgggccctaggactactttattagctagttaatggctttgtgcaagtaactcttacaagcacttttctttccatgcttatctggtgccagctctggaatatcacatgaatatggaaaattcgcttactcaaaattggtcttaacagagttaatgatgtctttattattcttataaattgcacatgggaaaatagattgagaatgctgtaagaatttaatgtgtttcaagttgcatgtgggtaaaagtctatggaatttctggatttacttagtttgtatatatagaaagtgcaaaaaggcagtattcctcttgagattgacttttaaaaaaaagattaaaagcagagattctaaattattattttctttctaggcctacagtaattttcttgtgattagttactaggaagctctgtattaccagatttggagaattcgaatagagttttttaggccgggcatggtggcttacgcctgtaatcctggcactctgggaggctgaggcagatggatcacttgaggtcaggagtttgagaccaggctggccagcataacgaaaccccatctctactaaaaatagagaaaaaattagccaggtgtgatggcacatgcctgtagtcccagcttcttgggaggctgaggcatgagaatcacttgaacccgagaggcggaggttgcagagctgagatcatgccactgcactccagcctgggcaacagagtgagactcggtctcaaaaacaaaacagaacaaaacaaaacaaaacaaaacaaaaaacaaaaatacagttttttagtgcttaggatgtaggtgaaaggaaaacaaccagaatgttgcaggtcatagtgatggactaagttgtggttttactgaatgttctttgccaacttagagttatgagaaataaaatagaggcttcacctttattgagcctggacttcagtgctgggctgggcactatgaaatatacacagcccatcctgtgggtctaggttaggctccctgctccctgctcctgccttgcactatacttttcccccacagtcctcatgcctccttccctgctcggtgatactctctaggaaggcagagacttttatttgtcttcatcatgattctgtttttggcaaaaggccttaataagtattatgtgaatggatgaagaaggcttatagtttcagagaaaaaaaaaggacagagacatgaaattggtaataatctaagctacacaagtgcattatgtgctcaaatacaaaatagtactagcaataagtgctcactttaacatttaggggcctatgggtccattatggcttggagttatcttaaaagatagaatttaaagtactttatttaaagtgcaaatattaaatcaggatcttagcatgaagttactgtatgccagtaactgttttaggcacttgacattaatgaactctattaatccttacagtagccatatgaaataggcactgttactaggcccatttacaggagacatacctgaggtagaggtcaaaccatctggccaagatcttgggtacatggtgaggtggtcatttgaacttctgtgctctggctccaaagtttgtgccctcagccaccctcccgggaggcctctcactatactctgctaactctctatgaggtcttcattgtggctttagtaaattatgtacagtaattttgagcaaaactgtaaccattccctactaataaacttcttctggaattacaacggtttttacattttgtctttctactctagggctatagtccaatattagcataccaatcagtagatgctcttgacttagtgatattaattagatacaggtgctgctaatattcagccaagttcatacaaattgacaatcaagtagacaagaatgtagtgttttaattacatctttgagacattgtgatttataaaatccatcaagtactcataagcagggtacatcttagaaaaatctatgaagtaaaaattaaatctctaatgtcctgctttttaagcacctttctttcccccattatgacagtgaagaccagttctaatctgaatgccattgggatccaccagaggttattaagcaggggagtgacagcacacagaatcatggtgctgagagatcactctggctatggtgtcatatagggctgagggtggaaggccagggagttggtgatggggaggtccaggttttaaaggtcccaaccagtggcagtgaatggggcagccagaagagagatgtgggcagctctgataaattcaaactttttattgatcagaagcagcttattataaagatgacatctttgcctttccccagcacttacatctcataggttcaacatctgagagctgaaaagaactctagagatgacccagccacctttcctagccaatttattaaaatctgctaaaaattccattctcatctttatcttccagttcttggacttctatttttactcatttctatttaaactgtctatttatgtcatttttctattaggactcttccatctttattccctagtgtgctatattctatctcatagatcttttcttaatgagactttccacagcctttcctatagcttactgtgccacgattttgtttaggttttggtcagcaattactttatctagctgaaatctgtggacacgattgtgcatagagaaaacaactggtggaataaaatatttattcttcatgttgttgtttgttctttcactaggtcatcactcatgttttttttttttaattgtacttcttttggtacaatattttagtttactaaatgatattactaaaatatcattttcttgccttcatgtagggcagcccagtatccaaaaggaagagagttgctgcttaatcctccaaagggcagtggggcatctgagagcagacccctttcctgtgggggacaaagataggagggtcttccctggactaggtagggttcttcattgttgccagcatcagccaagtggttttgtttcttttcagcagattccagggaatctgcctctcctggactagcttaggacaagagagagtctgctctggcattttgtagggagatgggctggagcctaagggcagaatggaggcccaggttgggttctcctcatttgtcatttgtgaatgtgttctttagtcatcatgaagaatgaatctggtataaggaaggaggcctaacagcacctgatgagaaaagtcttcaaacactcccctggctaccaactcatgagattgatttgtgccacacaatatctgcatttgctaataaacattttcctcccacaggctcttatgacctggtacatcttatcggatcaatcccctaataaatataaggcttattatatttatgtctgtgtgtcttattcagtattccaggaggccaaagtccttttccatatagctttttagtttcttaattctgtaatttaatgtaaatatgttttgaataatgttactatttttcttgagtttgaaggctatttattaatcactgagaattttatagtttatatgttctatctctcatagtcctaaaaatgcccacactttgtacaatggccacagagaaaaaataaaagaagattagtttagacaaaaatagtacggtttacattttagtagattttttcagacctatattgcctgtctggatctttcctccttcttccctctccccaagtctgaactcccatgtggtttcccgtaccctaatccagtccatcatctctcatcagaccactgtatagccgcttaaatgtgtccctcccccgagtcttgacctccaattcattctcacagtgatcaatgggaggaaatatatgcaatatatgcaaatgaggggggtcgtgtgggtgtaaagaactcttacaaatcaccaaaatactatgtgcacaaataaaacaatatgggaaccctcctggctggtaaacataaaaaaattctacttccctagaaatggaagagacacaaatttaaatgatgagatgctatttatgcctatcaaatgtattaaaaatgtatgcagtattgacaaacgtttagggaatacaaagctcttaaacattgctagttggaatttacaatggtacagccttttggagggcaatttgatcatatgtggaagatgactttaaaaggaattccacttctatgaatttgtcttaaggcaataataagtcttcataaaccatgtatatataagagtatgtttgttgaggctgtttatagtgatgaaagacagagaacagcctaacctaggctatcggttaaataataaaattaggcatatctagacaatggaattttatggagccataaaacgacagagatttaaaaaaatttgccctgaaaaacttccactatatgttttttaagttaaaaaagttacaaagcagcatatgtatataatacaacctctttttgtaaggaagaagtaggttgggggttttatatagcacagggaaaattctggaagactatgtgccagaatgttaatgtgtgttgcttttgatggtaaatatataggtggttttaatattttttcctgtttacctatactttattactaatgacaaacatatggtaaacatatctccatatatatggtaaatgcatatatatttaaatacataaaaatatatcataaatatatctgcatctctctctctctctctctctctctctctctatatatatatatatatatatatatttttttttttttttttttttttgagacagtctctatggcccaagctggagtgcagtggtgcgatctaggctcactgcaacctctgcctcccgggttcaagtgattcttgtgcctcagtctgccaagtagctgggattacaggcacgcaccaccacattcagctaatttttatatttttagtagagatggggtttcaccatgtgggccaggttggtcttgaactcctggcctcatgtcatccacctgccttggcctcccaaagtgctgggattacaggtgtgagccaccgtgcctagccagatacctttttttgagaaaaaacacctctgccctcgtggtcgtcaccaccgcagccacccgagaggagctggggaagaacagtggcccgcgaggctcatcacagacaatgcggtggctcctgtgagggtgtttaagtaaacttgaggggaggaagtaaaagtatgttaaatctgggtagttaagtgcatggctgtgtattgtagtatttttgttcttttctgattttgagatgtatcataatttacagaaatatttgacctttaagattcacaatagaatgagagaaaaatacatgcaaagtaattataatttaaaatgtactgttatttaattttctgtttaactgtatatcttttaaaatgcttttattcttttcaagcaatatatgatcacagcttaaaaaatatcaacaagcgttgaattctagcaacaaaaaatatcagtctcctttctcacctttctgtatctctggacccacttccaaagggggaaacctctaggaaaattatactattatttttagtgccatatttctattataaatactttgcttatgttgctgttttttaattgatcaattttggacatttttgtattgcctcctggttgttgtagacaggatgcagctcttctagctcactgtcaccaccacttcccaatataactatattcgttaaatcaaataatgtgcacattattactatgtaaacattgttcacggttgagcttagtagtacactatgactgttttcttttttgacgctctctttgtgtgtcctagacttaattgcctttttaaatttgcatagttttctatgcatttaggaaaagataatgctttaaaaagttgtgccaaacaattttaaattttttcaaaatttcaacacagcaaaattccattctaattccattcttttcctgaagacatttctcccttctaacttggactggttgttcttagccctgctgtgtgtgtgtgtgtgtgtgtgtatgtgtgtgtgtgtgtgggtatgtgtgtgtgtgtgaagtcctaggatcagaactatatagcctgattctataactcttcttcatattcttcagttagatccctaattttcttggatctcatgttatctttccttttttcctgaagagcatatcctgtaatagttttctcagaaagattgtatgggaggtaaatttttatatctgttttacctttatacttacctgaaaggttgaattttagaattacaggttgagaatcattttatatttagaattttgaaggtgtttctagtgggaaacataaagatcctcctagttggaggaacaaataagctttcctggtacaaaagcacccagttgacaatgaaactgattgtggcaaggattctgtcaggtcctcctagaagctttcttagccattctcatgaggacctatgtgttttttggcctcacctcatattcaggaaactctggctctgtgctaagtaactgctaacatcccagcacgttgagtgcttactgcagcctagtgaagctaagctcaccttctcaggtgcaccatcccactggcaagcctagctgtcagaccttcctgatttctgttcttgcaggcttcctttgatggtaataagttcctcccccattggggttgtatggatagaactgaatggtaaaactgatttctggagattttttagaagtgcaacttgagactctaagagaatcctctgtcatgaagactccatgatcctgtgactgttgagctggtattcttgcacaggacgacctttcctgggatcttgggctgcgtcacttgcacccattctttaagggattgcctctaggaagcttttgtccttattctttctttcccactggccttgtgctttgcatttctttatttcttttttaaactcagagatgtgatggtgaggtttgatctttttactgtggaacccaacataggtggccgggattgaggaggtattgcgatgagaaatgactcaaatgtgacttgatggaagtacatttttcatcaaacaagagttctagttttaaataggggaggggactattacggctgggagggattttagcaaatccaagcactttgatttttcagttgaggaaaaaaggcaaaatacagtcttcactggtgcaatgacagtgtgctatggcatatattttagaaagaacattgcatcttgggacaataaatctaattttgaagtcacacaaaggtcattaagagcttatgggagcttgggcaatattcctaacttccatgagtatgtccttttttcatcgataataagggtaccagtgcctccccctgcatcagggctattgaagagactagcatttgaagagactagcatggtacttctatttttcaaactttaaagagttatttcagaaggaaagatctagtgaacatggtcctttaaatccttctgaaaagggcttgtgtgcttttactagtgttacatgattactgtgttaataacttactgtatagatatcctaaagtatttttatcttgtatttttgtaaacaggttatggaatttgcagtgatgggtcctggtagtatctaaaaacatatttgtactgcatctgtgggcccttctgtatctaggctatattccaacgtatgattgtgtctgcaggagagtctcctctgttgctgtccagtgtaacaaacagctccttgtatattctaccacatctattcccatgcttcattgatttggaatttgacttgttgcctgttgaactggcaaatagttgagtgttcttttgtgtaaactttgacaatgctgattcacagtacctttagtgacttaatctatattaagataatctgtataaaatgtatctatatatgtagtctgttaagaaacctatataaagccaaattttgacctttctatggaacgtgtatttttttccaggataacttagaagatgatgatgtggaaatgaaaaatggtataacccagggagacaaactacgtgccttaaaaagtcagagacagccacgtacctcaccatcctgtgcatttaggtagatctgttttaaacacttcaatttatagtgtgcttccctttgtgaatagaacatttcatcttctctttaatctgtaatcttctgttttgaattttgttctacaaatactaagtttactattttgtgttgtttattgattattttatcactgttgggagtagctaaagtttagaagtttattgaaagcaactgctgccatctcagtctctggaattctaccttaagctgcaaagcagttatctctgggactctgtttcaaattctgtttggatttctccccttctgctgtgaatgagtttcttgtcctgtgttggatcctcacaggtgtgctgaggctgttgtattgactcatagtgtatataaaagtattgtatgccagtctctggcaatctaagctagttcctcagctttaccttctatttttgaaaattgaataagcaattcttacctgtgcctgtaaagttataagccatcttgactttgaagtctcaaactactcaccagaatcaatgatgggacttgacttctgatcacatttgaaacctgctgatagctcagattgggtttaaaaaaaggggaatcaaaaggtgcaaacgtttgtaaatatcatcattttttaaaattacaatatactgggtggcaaggccccagtccacaaattaatataatggtaagcagcaacatttttttaacttataaataagagatacacatagcagaaggatgttttgccggtatggtaaacaccaaacagattcacagggaatttagttttcatgtgtaatctgggagaaactataacactgtagtcagattgggtctttactgagttcctgatctaaggaataaaggttcatattgctcaaagatgaggttatcattttctgcagtattatgagaaaaggggatagcaagcctggttctgggtagtctaatatccatttgcaaggtttctcccttttgctaatttaatatttttactggtttgataccatttgatgtgccttgtggtctttgtgaaaacgtgtgccctggtgatatgtgagcatctgtctttgatttccgcaggtcagatgatacaaaaggacatccaagagcagtgtcccagcctttcaggtactgccaatgaggttgaatgtctagtagcttgtaaatatatgcttccttttagccatgtttcccaagcctcaaacacgaaaatcaactgtacacagctttttgctttttaaattgcttcctttctcttccatattgtttatgccttatttttaatgctcaccatgaaaaggatttttttttttttttgctggcatgcccacaggactgtgtggtggtggtagagacatcaatgtattttgtgctcttagcacattgtggaggggggtctctaagaaactacaggtgctctgcatttctccttttgatctagtgatagatctagcttaaattgttttcatttttattggtcctctttctattttttcccaatcagcatgcatttgttcccctcctttattttctagtcttattttcttctctaccttccttttcaagaggaaacactagttttgttctgtggaaaaatgtcccctgaaacctccgggagtggtaccacgatctggtgtggcactcagtgagagcagcagagatgtttggccaagagtgttgatgaaataggggaaagaagctcttcacctgctggttcttattcattcttaggtttaggactgtttagtgagggcagttcaaagagggcttaagcatctggagcttctggagaagcttgaattgcttctttgtagaactttttccatttttattttggaggcaaaacatgagcttaagctgctgtttggtgggtggataatgaaggaaagagtctacaagtaaataagcttttctctagcagagaggaaaacagagttcagctatattaaatgatttatctaggatcaaacagatttggtattaagattatgactgggccctggctctccagatttgagtcagtttttcctttttgtccacttggcaaatatttattgagcacctgctcagaatccagcattgtgctagccactgggaattgaaatgagagagaagtctttgccctcaaggagcttacatcaggtaacggagatagacaaatatcagatgacgcaatatggtataagagctatgatttactatgagaatatatgatgaaacatatattgcttgggaactcagagaaggcttgcttgatgaggtaacagctgattggaccattaaaggctaagtgtgatagaagtgggtcaaatggacatggaagataagaggtagaggatgggaaggagatgagaaaatgccatggcagggaaatagtctgtgcaaactggacaaacgtgtggacgctacccattcagggaactcaaggcattcttatgtagctggaatagagatgtccaatgggaaagtgtggaaagaaggacctgtccagattttggaggggctgcatatgccaagccaaagagtttctataggcttgtgggcacagaggaaagatgaaatggtttaaacagtgaagtgacatgattcactgaaggctattcacaatttgaattgtttaggaataagattaaaagatgccacttgtagtcaaggataagaaataaagatggcctcgcctagggtagtttgcagggtgaaaagaagaggatggatttgacatataagaagtggaatctaaggttgtgctgaggaatgaataccagtggcaaagaagggcagtggcccaggaagacaggatcatggctaagagcaggactttgactcctgggtttgaatcccaggtctgctgttcactaactgagtgactggatgaggaacttttcctctgtgtttttgtttcctcacttgtaaagtaaggacagcaatattagctacttcttagggttgttgtaaggacaagctgagctgacatctttaaggttcttagaacagtgcctggcagagttagtgctgtgtcagtggtggctgccgctgctgtcatcactattaggacctgtcatgatatctttaagattgattaatttatcttgtcctagttagttgctgaatgtttaagataagactactttattgtgacactttgccatttttctccgcaaagattaagttcatccctgcaaggatctgcagttactttgaagacatcaaaaatggcactgtccccttcagcaacggccaagaggatcaacagaacttctttgtcttcgggtgccactgtaagaaggtaatttttctctccctcttctaaggtgctggtttgaggtaaaggaagcttgcagcaggcgatgagtttagctgcagttttgtcagaggaggggacaagggagaagaggagaaaccacggaagaccctgtgatgttctggggcttccgttcctgtcttgggaaggcaggagacaaggttgtggagggaatggtgcaaagcgtgctcttcttctagagagtgagcagctggcttagtgtgatccagaaaatggagttcagttgtatatacaaatgatattgtcatttctcagctgacacgtataggcaagggagaactaaccaaaatgggtagggatgtttgatgtagtcatgtgattgaatatgtacttaagtctgcttttaatgctccccttacatggcccttttcctttacttcccaccccagggtaaataaaactctgtgatgttctatttcaagatctgtagtcaaagtgttttagccagtttcttgggtcctagttaactgcttttgacaaagcaacttgatatgtataactcaaggctacatattatcataacaccaagggtgatgaggaagccatcctgacatcattcacattgatcagattcatcttcatcatgttcccctaatgtcatgagtatgtgttttagaaacgtgagctctgtgtgattgtacattgttgtctgttttttccctcctcacttgtgttttccattcagcttttccataaactcccggctagccagttctctagggaacttgaatgctgcaacagatgatccagagaacaaaaagacctcctcatcctctaaggcaggcttcacagccagcccgtttaccaacctcttgaatggcagctcccagccaactaccagaaattaccctgagctcaacaataatcagtacaacagaagcagcaacagcaacgggggcaacctgaacagccccccaggcccccacagcgccaagacagaggagcacaccaccatcctccgaccctcctacaccgggctttcttcttcttcagcgagattcctgagccgttctatccctgtaagtgcgcagacaccacctcctggtcctcagaaccctgaatgcaacttctgtgccttgccttcccagccgaggctgccaccaaagaaatttaatagtgccaaggaagccttctgagcgatgccttccctctgtgctgtgaaactgtctatgcactacattctgctagctcctcttcaagtaaacgccaagtcacaactgggttttcttccttccttctttttcttcttacccccaactcctttttaagtagtttctcttaaaagggaaatagctttcattcttttgattatgggcattgttgacttcagttacttttcagttatgtttccaatcactctgaatatctggtgctaagccaggagctgattcatacagtggatagcatttgctgggggtgcgctggtttggggaattatggctttttccgcatcatatatcagtgaattaattttggagtattgaaacgtggaaggtgctgagtgaacagtatcttcctagaactaagcattaggcccttgaatatttcacctcctgcaaggaactgacccagaataaaataagtggcaagtggaagatatttctaagaagggcttataggtaggtacctgggatgcaaggtggggagcaagcagagtatcaggaaggtgtttaaaagtagccagcactcttctagagaaaggtgggaagacctccaaacacatcttaccaatgagatctctatttaggttaccaagctctctttaacaatcaacaatacctggtaaggtaaactctgttggtaaactcctattatgaattactttaataacctgttttgattgcctctaggggtattgagatctataggaatgtgagtttcgatttgagaggaacaaggacaaataggaaggagaaatcaatcctatgtattaaggaaatatgaagcatggtacatatacatacagtgttgcaacactgatcgtactcagggcatgaacaagccctgggtgtcttggaaggctctggcctggtgtcgcttcacacttgctattcttgaaacatttcctcagccatcatctagggagtgcctgcttctgtagagaagaggggaggaggaaaggtgctggtggcagtgtgctgcgtatggcccactcagcaaaacaggagccccatggttcattcttaatgatatctactttctttagttgacagtttagaaaccatgaggatgggccaggctcagtggctcatgcctataatcccaggactttgggaggccaaggctggtggatcacctgaggtcaggagttcgagaccagcctggccaacatggtgaaaccccgtctctacaaaaaatacaaaattagctgggcgtggtggcgcgcacctgtaatcccagctaccataaggcaggagaatcccttagaacctgggaggtggaagctgcagtgagccaagatcgtgccacggcactccagctgggtgacagagccactctcaaaaaaaaaaaaaaaaaaaaaaaaaaagaaaccatgaggatgaggatgttttctaacatgagaatgcagtgtgtgtgtgtgtgtgtgtgtgtgtgtgtgtgtgtgtgtgttcatgtgtggttgcattagattcattaccactcctgtccctacctgagacctcttttaaaacttttaccctctctgtccactctcaacccattccctaagaggagcctggcatatctgatgttccctgtcctattttacaggcatgagccaccatgcttggccttggcattagtttagattcttttacagattagggtcccaggaaattgccagcccatctaccccttaatctgattctgatcccatgatcccactataaaaattgggtgtataggtatcataaaaacttaaatccatgtaactaaggattagatgtaaaaagataatatatttacattttcctaactatatttataaatcatatactttccagcaggcattgagttcagtcatcattttcacataccgattgtggatcagcctcttcttttggatcagaatgcagatctttccattttcagaaaaagtgctagagatatatagataatcatacagtcatgtgctgcctaatgatgttttggtcaataacagaccatgtatacaatggtggtcccataagactataatggagctgaaaaattcctattgcctagtgacgtcgtagccctcgtagggttataactgcagtactcatgtgttgtggtgatgctggtgtaaacagacctactgtgctgcagccatataaaaatctagcaatacaattatgtacagtgcataatatttgataataaatacctgttactggcctatgtatatactatactgtactttatatcgttattttagagtatacaccttctccttattaaaacaaaagttaactgtaagcctcaggcaggtccttcaggaggtattccagaagaaggcattgttgttataagaaatgacagctccatgtgttactgctcctgaagaccttccagtgggacaagatgtggaggtggaagacagtgatattgattatcctgacctggtgtaggcccaggctaatgtgtgtgtttgtgtcttcattttaaacaaaaaatttagaaagtaaatactaaagatatttaaaataaaaaaaataggataaggatgtaaaggaagaaaatacttggtacagttacacatacaatgcttattttaagtgttaatttcaagtgattgggagttgataaaaacattaaaaaatagtaaactaagtattattacaaaagagtcaaaagttaaaacaattaagtttataaaataaaaatgttacagtaagctaaggttaattgattattcatgaaagaaaaatttttaatatagatttagtataacctaagtgtacagcatttataaagtctacagtagtgttcagtaatgtcctaggccttcatgttcactcaccactcacccactgactcacccagagtaacttcccttcctgcaagctctatccatggtaagtgccctttacaggtgtacaatttttaagtcttttataccatatttttactgtctattttctatgtttaggtatgtttagacacacatacttaccactgtgttatagttgcctgcaatattcagtagagtaacatgctgtacaggtttgcagcctagaagcaataggttataccatttagctcaggtgtgtagcaggctctaccatctaggtttgtataagtgcactctatcgtgcacacagcaatgaaattgcctaaggatgcattctcagaatgtatctttgtcattaagtgatgcatgactatgtaaataccttgcagattacatacgtaaaggtattgtgtaatccacatttatagctgaatgccagtagcattggtagcttgacaagaataatgttctacttttttgttttcctctttgctggtagaaccatgggggcaattctttagacaattgttaatctcccctaatgatgtttacataacttgatttgggtctcgttccgtattttgttatttcttttcacttctcctcctcctcgtccctcttctggctagaatagagtgatttttaaataattcaatttaagtaatagtctgtgtgggcagttgctgccacttcccttctcctccctcctaaatttatcatcttattgtaaagaaaagcatttataaatagaattatcaacacaacattttcctccctctcaccctccctggaagtaagaagcagcaggtctttgtagcagaccttcccccctttaactttgcttagaaaacctcctgtgagagggaaagctccaagtcctacttctgctgacttgtggtcaaaaagctaaattatgatgaaaattcccactttgtgtggaataagataggagattatgagttatttttgtttatggtccagtgcagcttgtctaattatactgggtttattgtcgaaataagatcatacttctagttctagtactactgaagatgtgagattaggagccttgaagaactaggaaaatcactcaataaaaatgttttaaaattcttaggtaggaaaatgaagtctgcatggcaatatcctcccagaacctttaagaaagacccagaaactcttaggggatgggggttatgggtatttagagggaatctaatattttaaaagctacaattagcatctcttttgaaagctgcaattgctcactcactttttgcagcagttcagcccccagaaaaatgtaaaaatgatttccttattctgtcattaaatcgtttaacacagaaaacaagaacaaatgttaaggattccttatggttgtgacagaatgctgaggaacagtcagattttatttttattaatttgtcctcttttgctagtcttgcagtttctactgccctgtgcaatgcacacacacaaggttacatttttgttgacccacttactgtaaaaaatgagtttcactccctgacactcagaggagttttcaaatgcttaagaaatgagggacatgtgattatggtgtaggtggggtggaagtattttattaaattgaaattacttgtggtatctgtcttgaatatttgctatgctttatttttatgacacttaatcactggattactagtcatctacattgaccttacctgacccccaactctgagttagttcatgttgcttctcccataagcctctctacatcccaccttggtctaaatcagaatactctttttcactcagaatttgcataatccactagactatatgctttgtgagggcagggatggtgcctctggtttttatagttatgtgccctgtgcatggcatatattaggcactcattaagtatttgttgattggataaaatgatggatggttaaatgaatgaatgctctgtagctttaataataaaactatacaaataagtgaaacttattatagcctgtaataagctttgttatgcactcttctatcttaatcttcaaacatttgcagggatattctcatagtgaaggttgtaggtaatgtcagtggtgccattgtctcttggaatttttcctttcttctccattcagttgcttcctcatccctgttgtgtttgagtctttgatgatcttcctaacttgtctctttccacctttaattcttactttaaagtagggttggcaaactttttctgtaaagggccagatagtaaagatttttagctttgtgtcccaactattcaactcaatacataaacgaaaagtgtggctaatattaaataaaactttattaacaaaaataggtggtgggttgcatttggatagtgagctgcagtttgccaacccctgctttaaagcattgccagataagagatatagatttcaacatcttatttccctgttcagaaatgaccagtggtcccttagtgctagaacataaatactgactttctttgttgagctttcaggccctctgtactgcatttctgtagtattgtatctttgcaccagcatttaccttgcttattctcttgttttcttctcccacagtgttcatgcctactgctagtctttaggaagccctttcttggaagccccctgctctccttaccaatttctcatctttaaataaagacatatattacctcccatgtcttctgtgaagctctccccagtaagtggaatccaccctataattaatactttattttatcatgtatgctattatatacatgaacatctatatttgtttacatattgtctgtgtatgtaagaattgtctccaaatttaaacttcttttgcagacatttcaaaaagttcttttatagttcatggtttctaacacagtaccggtcacaggagggaattaaaaattaaaatactcatttggttgaaagttgaaagcaaaatggaaatgaaatattgtgtgcttcctactttccctcagcattcttatatgatagttgaagttggcttaaatgtagttctcttttctagtgttagtagcatttttatactcagttggttaatgctgctctttggttatgaagactctggatgttttccacctcaaatttgacaaacgtaagaacaatcttggtagcctatgaataggttaagttcttctgtgttctaacatcaggcagaatacgtatgtgttttaaggaattattggtccttaaagtaggacctggaatgagatcaaaatattagaatctagctttataaaataaccagtttgatgaaaatctgagtgattggcagtgcactaaagcatggttcatttgtactttgggataatgttagtgctgacagtgataagctacttactgattgtttgaatatccattcccagtaaagtgctgatactttccagtggtatgtagtagtgtttcccgatatcaacttgttgtcttttccctctgcctgttctccattttaaaaattggtcatcttgtcctgattttaaataggacatttttattcgtctgcttttgtcgctattaagaaatacctgaggctgggtaattcataaagaaaaatggtttatttggctcacaattctgtgggctgtacgagcatggcaccaacaacctgcttggctttgcgtgagtcctcaggaagcttacaatcatggtggaaggcaaaaggggatcttgtgtatcacatggcaagagggaacaagagaaagggaggatgtgcgaggctcttttaaaccaccagatctcatgtgaactcatagagtgggaactcactcattactgggaggacagcacaaagccattcatgaaggatccaccgccatgacccaagtacctcccactagccccacctccaacactggagtcacatttcaacaggacatttggaggggataaaacatccaaactatatcaatattcatttattaattcatattaatattgttaaatattaactaggtgttaatatttattacagttaaaggtactagctttctatcctcttgttgtatatttatgttgctgtggtttttcatccttcctctttgttgtggcattgctttagatttgatgtaagttttcagctaagggatactaactacatatcaagaacatgagctcaatctcagtattgaaccacatctttggccttcattcaacattgcgattttttttcccttcccaaggggacctgagaatgctacttgacaaagcatcaaattgttatgaggtcagcatggttcggatgatgcctttaaatatgcacataaactgtttatatgtttgcagtatttgtagatatatgtaactataatttaagtttccagtgttaaatagtagtttatgttacttttctgtataaaacctgtcagctgtttttgactgtacatttgaaaagacttgaaaacataaaacttgctttaagtgataaggttgatcagaaatatataataggtaaggattaatttatattttcaatgtattagagttatgaatcaccctggttgttcagcttaattttatactttcttatgtagtgtcaataatactactaggtcaatagaaaagagtcttattttaatcttgcatcttatttttttggctaggagtaaaagaaagcaagtgctttttatatacctataaaagctggctaggtgcaatggctcacactataatcctagcactttaggaggctaaggcgagaggatcacttgaggtcaggagtttgagaccagcctaggcaatacagagagaacccgtatcttaaaaactgaaattaaatgaaatggaaacttatccaattaataaagctatagctaatatttatgtaagtgtctagcttgagcctagtatttttttggtagagcaaggtgagacaaatacatacaagccattgtcctccactagattaaaaacttcatgcaggcatcttctggtagaattgatttgctctcatttttctggtcctttctatttttgcactgctgccagaatccacttaaaataccagtttcctaatgtaagcctttgtttaacagcttctgtggttgaagaataagaccaaatattataagatttttcctctttttcctgaaattctgtagtttcaccataatatagctatatacagattcattattatttatcttgcctggcatcagtgtgtactttcaatcttagggctgcttttttagttatggaaaattctcagccatcattcttctttttttttttgtagagagagtgtcttgctatgttgcccaggttggtctcgaattcctggcctcaagtgatcctcctgctttggcctcccaaattgctgggattacaggcttgagccaccacacccggctccactatctttttggatattgctttactgcctttccccttatttcccttattttctccttttgcaatagccccacaatttttttttttaatagaaggagtctcactctgttacccaggctagagtgcaatctcagctcactgcaacctccacctcccaggttctccacctcccaggttcaagtgaatctcctgcctcagctttctgagtagctgggactacaggtgtgcaccaccacgcctggctaatttttgtatttttagtagagatggggttttgccatgttggccaggatggtctcaaactccttacctcaggtgatctgcctgccttggcctcccaaagtgctgggattacaggcataagccactgcatccagccaatagcccccaaacttatattggagactttcaatctgtcctcaatatatcttaccttctgttttatatttttcagttcctaagctctagctgtattctgattgaattcctcctattattttcaattcgtgaattttctttaatgtgtccattctggagtatatcccccaatccactgacctttgatttcaggggctatatctttcttttccagcatttctaatttgatccttatgatagccatctgttataatttgggcccgcctgtttttgttttatggcttcttattctttttatatgtgtgtgtatatatatagatatatatatatatttttttcacttgaaggatctcaggtgataagccattttgatattgctttgctatttgcatttcatcctgtgagagtttgccttgtggttgcatacttcgtcagttctcataatgttcatttgccttgtgtgttagggaatttggttggtaggttcagatgggatgggagtgttggtgtgtttctctcctctttctctctctgtttttccctcctcgtctgctggccttcttgttggctctgcccgatcatctaggcctttcagtctagaaacagaccttaatgacccaggcttccatctcttggtgagctcctcccaggctttcttctcaggcagggatgtggctccatctcagccctggcccgagggcaatggtcccaatttctctcagcctccttccccatgtgggagagcctgactccacccctgatttcaggccaggggctttcgacctatgtacccacatgaatggaacacccagccacttctgcaggcttccagctgtgtagccagagtcccaccactgtcttgattgtttctgggtcacaaagatgttgatcttgcttttaatttctgctgtgccctttctttcttcttcatctttaaaaaatatttaatgcatgcatccagagggtagtttggagtgtaccatctcgacatgaagtaggtccagtctctgcagcttgctgttcagtgcctttttcagctttccccaaccagctttccaaactcatatccctccactcctgagcatgaaccttctgcttctgccaggcagtttcttatgtccttgaacgtgcatggctcctcctacctctgtgcttttcttacatgctatgtccccaacttggtctcccttcctccctccctttgcttctcacctcctttccatcaggagttgggctaagtctaacctcctcctctgtgaagccttccttaatctcaccagaccatagcaatcatgatgttttttgaagtcattctgtttgtattggttattggccttcctcatccctcttttgtgttgagagtcacctatcttgtggatgtgggccttgaatccccactgaattccttgattgaggttagaaaatgtcttttatttttgttatctccaaagcatctggcattgagctatgcttacctgtttgattgtgggtatactcagtccatacttgcatcttttctaatactgtgtaggtcatttgtttcttccaaaaatttgaattttactgtgtgtgcacatgtgtgtcagatctttaacttagaaaggcatatttttattgcaccttcctcttacacacacatacacatacatgtggatgtgcatgcatgtgcaaacaagcacagacaccacgtgcacattgcttgtaaaatcattggatttgcccgtaacagaaacctttggtaaatgacgcaggctctccttgatagtgaatgtctaaacaactcaaaggttgatatatgtgggagagaactgtttttatcagtttagaagtagatatttttctctcttgggcagactgttgtgagtccttcagccttctgttatgaaaaagcagtagactgtaagagaaaatcatgaagtctcaatttgaaagtgagcaaaataaggttgacccattctatctcattttcccttatttactctttaagtacacattacttactctctggtagctcctgaatctttatggttaagaagggaaaggctgtgttcccatttcctattaggaacctcgtttccatgctctcctgtcttttgaaaacatcatccaaggatactcatatcgttttgtcctcatcactgttatcacctcccttcatccctggaagacttttgcttctactttttagctgcctgggcactgccaacattctggacaactgtaacatttttctaatcattatcatcatccactgtttcttgaataccttctatgtgcctggcatggtattaggtactttatatccattatcttatttatttaacctgctatttacagatggggaaatcaagactcagaatggcaataacttgcccaaggtgtcacagtgatcttattttaaactttcttaacctcagttatctttatttttgttcacttgaaaattcattgaataaaccttcttattgcttagcacattgcttctgacatcttgaatcctgccagcctcctttaaacatttccccctcctcctaactctgctccatgacctctttctgaccctgcctgtttccccagccatctcagttcacctctttccttctacagcctgcatagtcatttttgcttcctttttccaacattctcactgctacttggacattctgtaaccacttgattaccagcctccaaaattagatcaattcaaccatctgttgtatctgttcctcatctctctcctgtgagcactgttggagaaaatcctataactttgccaattggctccatctcaaatgtgtttctaatttacccggcccttcagtgctcctaattagttgttttatccctttttggctccttttctcttccccacctggctgttccaaaactttttaacatttttcaccaacacaaccccttcctgatctccagagccagctgaccctgctttgagatctgctaagaacatagaatttatcagaagtaatttcctctaacttccctcttctctgtctcaaagtttatctgcatctggactcatccatttcttccttcccttttaattccaaagaaactctactgttttccaatgataactctacctacctgtactgttctttccagaatctttcatgaagttgccctaaccacttccttctccttttgtatcttcagcctcttaccctccgtttgcaggtctcctcaactgcaaatgtgcacatccaagttggtaggctggtgggggctggggaggagtcttcccttggccctgtcttcctctcacagtttctcctttatggccacacttggggaaagagaagcctgcacttccccctcccttgtctctttgatactcctccgctctacagctgggaggtggcccctcattctggtgaaagtctctcccgcagattactgccgacttcttcaaggccagatctgatgggctcctgttagtccttctactcctaagcctgccccttaatgattgtccttacattggctctttctctttgggtaacctcctgagcattggacctacactcccagcttcctctgggtgttacctgggatagagagaatacaggttccttccattgccagctcctctttggtttcctagccgaataatctcatctttattcatccagtcatccaagctagacatttggagtcagctttgacactacttctgcctgcctttcccttgtcacaccagtcactaagtcctatcaagtctccctctaaaatgcctctgtccttccattcttaccactgctgccttaattggggtcttcatgaactatcgcatagccctttctgtcttcctgtctcttacctttaatctttcctctatactgttgccagtgttaaatttctgagacacagagctaatcaaatccttctcatgtttggctttgttcagtggctgcactctgcctactgggtcaagtctggctcccctggcttggcattcagggttcttccctgtcgggctgtgtgcctccctgccagcctcctctccagcagctctacctggcacgacctgccttaagcctgaaccctagcacttgcagtccactctgctttcccttgtttctctgcttgattttgtatttcttgacctggctcgatagttatctttttgataagcatttgtgacccatctaaacagaatggctcttcctttctcgactctcctaggagcgctgacactctcatattatagtcagttatacatgattctctctctcctctgctttcctttaagcttctcagaaacatctcttgtttcctgaggttccacagtacagtataagtgcctaataaatacttattgaactaaaagtcagataatgtatctgggttcgtgaatgttaaagtgtttaggagcctgggtctcattgttagcatatgaagcactaacagaaaacaaacaagtttccagctttagctttaatatacggtaatctgggagttgtgtattttttttctagaaatgtggctttactaaaataagagaaaataaattttaactgagtttgcatcaatataattttggtgttcagatgaactgaaaacactcatgtaatggttggctgagtcaagctgggtgtcaacaatctgtcatctaacaattgagctctttgtgattgttgaaaagcatatattaaatttctccagaaaaaagaatctattaaaaatcatgtaggaaggtgaaagactattttatatagcattataatgagcccaaattggctttttaagtcttgaagtccctgaaatgcacagagaacactatggaaaaatgcacacacacctttcgaacctgattttaacacaaaccttcatccttttatcttaatatgatgccaataaaaccatacccagctacatttcatctagtgttattggaggaaatatgtatcatattaacagaggcaaattctttcagtattgtacatgttgggtacaatatacactacttgggtgacaggtgcactaaagtcacagacttcaccactatacaattcatccatgtagccaaaaaccacttgtacctcaaaacctattgaaataaaaaataaaaaatactttcagtattgtgaaaccacagttatggaaataagtatcaatgcacacattttatgtgttaatttgtgagcaatacaaaaactggaaactctattacaaaggcttaaagagacataggagtacagaggcagttatgggtgtatttatttttccccagtgttgtatttgttcattaaaacttaaaacactatagttatgtatataaaataccatgttgccaagcatgtattttttcctttaatttcaatcacattaaaacaaaccatttttattttaggttctttttgcctctgtggttagaacttaaaccagggataactagtacactattgtttattccttaaaggactggggaaaatgtaggaaagaaaatgtcagtgtggcaaaaaagtccatgaacattttgaatcaggattttgaccttagtaggatgctaacattccaggccattggatcctttggttcaagttatttgaacattaagacatcgttacattcatttgctgtcaaggaccttaatctttcattattctttataatttgctgtttttgatagctaacatgttttatttattaaccatctgtacaatatttatatctgtaattattagacatgttcctgccatgattaggtaactgggctgtttaaaaaagaaacacctccagaatagctaaaattttaaagttactacctacatctgccaaaacagattagtagcagatttccagaacagaacaaattgtcttgatctccttacctaacactttgttttatgtcaaatcttactgctttcagggaacaagacttcttgatggaagcttatattttgacataaaaattttgggggctgcaaatgtaaggcaattttatccttatttttcaggttgaatattgctacattattaattttatggtattcatacaataagaataccacatattcataataaacttgatctggtcctaactcactataactctgttgagcttactaattaaatgagcttgaatattatatttgagaaattaaaatctcttggttatataaacaagggctaacttctaaaataatatttgtacttcaggtataaaaattattttcactttctttataaccatcttcactgtcattgttataatttattttgtatttcagattcattaattcattattgtaacaactaaaaacattggccaatcagaattaaaactttaatcaactcataatacttaagcatggatgttcttataatgaaaatttcttttaaatttagaatattcctgaaaattctttgaattcaggcctgatgaaaatcattcaaaaatgtatttatcttttaatgcaacaaatattttttaataattttttttattcactcagaatcatatcttgcctaaggtcattatttgtctatgttagggtgatagagaatgttggattgaatatgtagtgatcacaaggcaaatgctcgctgtcttgagacattaaactatggtagctaagggtttgagctttagagtcagactgctagggttcaaattccagctccaccaattcttaattacatgaattggggctaattactgctttgtgcctcagtttcctcatctgtaaagtgggttgtctgaaacatttaatgcgtgaatatgtataagatgtttagaactgtccttagcatataggaagtactcaaatatctagttcagaataattgatgtgtcaagtaatatatctaatttgttaagaagttcagctagttgtatttaatctatttttgaatacgaaaatcaatagcaataatattgttcatggaattcaaaatgcaaatgcaattttactataaaatgtaattttactataaaaattaaaaatgccagtaactggctatagtcttttctgggatattagtaattttacaatacatggacatttggaaaacattgtatatagttggtagtcctacctgtgactacaaaaaaagcatgaagttatgctttgttacgatgtgtattaggtcccaccaggcactcatctggcttatctatctaacctgtctaagatttgaaatggagagtacttgtgtttttccttgaggtttcctcaactgtggctgagtacaaatgacccagagagaccgtcagcacaaccccgtaggataaccatgtgatacctgaagtttaaatattcctgtcatccaacactgttgctccctgaatagaaaggtctcacagtgttagttatgcttttgttaagtgaatagatcttggagacttgaacaattctcttctccccttagtgcatttctttctttctttttttttttttttgagacggagttttgctgtgtcacccaggctggagtgcaatggagtgatctgagctcgctgcagtttccgcctcccgggttcaagtgattctcctgcctcaacctcccgagtagctgggattacaggaatgtgccaccatgccctgctaatcttttgtagttttagtggtgatggagtttcgccatgttggccaggctggccttgaactcctaacctcagatgatccacccgcctcggcctcccaaagtgctgggattacaggtgtgagccactgtggcccccttagtgcatctgtattaagatttttattttagattgaaaatgaaaggaagttaatttgttacaaaatactgatgtcagaataatttgctgaaccctttttactgatctttcatttcactttcctttataccatataaagaaaccatggaacatgttttgttttgaggactttggtattgtatttttatcctctagtgcttaatagatacaacttatgttcagtaattatttgttgaatgaattgaactggtgggacagaaggtcaattcgttggccaaatggtgtcatcatttgtttgcagaggcctgcagggccagttaggcaacataagagagcaaactagggggttggaaaaggaaatagtggggcttgtggtgagctgtatctgagcctagattaaacaccagccagagtttttgagctctgtggaagtaaaggctttggatagaagactaatgaatatattctccatatgaataatagaaatctttaaaatgttctagactatttctgttttccagttcactgggtactgtgattcactaaataaatatgtaaataaatgaatatatatatgtgtgtgtttatatatataaatatatgcacacacacatatttgcccctctatattgatgtacatatgaaatactttaccctataaaaaagttggtttaacaaaggtcgcttgtctaatgtttatttgctacatctctgtttattgataattgatggagcttgcaaaaacaactttgttctaagttatatgcagtttgaagaatttctgatttctgttagtgataacatgcacaactttactaatcggaacaaaagtaaaagttaaatattctcaagaaagcactagctgagctacacacacacacatacacgcacaacatacctttgtggcattcttatagctgggggacttaactggctctgccctctgactgcttgccagacttagaagaaaccgagaaaaagcaggtagaaaaatgtttatgctctaattgcgagtgtggtagctggcgtccctcaagtggaatgtatatgggcttcaaggcttttgaccaacttcactggactttcttagggtcttacctcttttattcgcactgtgggttcaggtatatttatagtatagtgctctgattcttgatcatctcacacctattttgaagtattagcatgaaccacatacaagaaagtcaatagccaaaccttttccattcttcctacagctcttgaaactggcagccttgagaaccacccatttcccttactacctctcacctaagcctttcctggtgcacgatgttaactttacactatgtatattactatttaatgtcgacaccgctgtcttttcatttcacatctgttatgacattgtggctttcgccctttgcggtcagggaccataactctttgacatactgtgttaacagggacttactcaggaacagccatttggctgttcatggggtgtaaaattcactgcagttttgaagctgagaaaagatagcttgaatccttttgtaagttctttggaaaatggacagattcttttttactgataacctatatcatcaccaaaatggacctgtcttataattgactagacctgttaatgaaatgttacagactaatttgagaaataattattgggtgggagaaaagggcatttactagaaaatcaagtaaactttgttatcctcaggtatttaattggaagaattgagcaaaaaatttgttaatgtttagattgatttatgttcctttttctaatcactgtttcctgctaaaaaaaataactgtttggcaaactttctgtaactctctatcttttcctggtttatgtctgttgtcccaggcattctgattacatatcccaatcacaatccttttatatgttagtatctaatgtgatgtggaagaatttgtatggtttacttgaaaattgcctattgtttattaaattccgacagcaagactcttctgcataaatgtttttgggtcttaagatcagatttcaagctggtagtacttcatttccccttaagggaaaggatgtgtaagatatttataaattcaagcatgcttaaggaatttatttaaatggctgctaattctactgcattagaagcatgccattgatatgtactgaattaaatttaaggatatatcatctcaaagtatattctagtaatctttaattagttaaaagtatcttttaatattgttaagtaaaactcattaattgtagaaatgcttagagatgagtttaggctacctaccgatttttaaattaaaacttaattttttaatcactataaataaattagtaaaccttttaaaatataaagttttcttacaatcactttgcataattgaatatctcattcttacctagctaatgctttgtgtctcctgtctttttgtttctgttttggcttagtttatttcattgatctctaagctgtcttgtgtggaagggagaagctgcatgacttgctagaagttttacatgtgatggaatttaacctcagtttatgtctctccctgcacagtcccttcagtctgaatatgttcattactaaggccttgccactccagtgaaagctgttcttctcttagacacaatttcttcatctggacgagcagtggagagggaaagcaacttcttgctggaagaatatctctgccttcttaccttaaattaaaaagagcactaagataacaccttcaagagacttgaaaacagaaaactggttaatgactactataaatgcactgaaactatgtttatggagatttccatacttttaaagacagttttaatgttgaatttggtactttgaagggttatttttaatgtattttggtaatacatttattattatatttacatgtacagtgttacattatatatgtattgtgaactttaaaagactattttgataaatttataaatatataaaattatgtaaaaactacactatattttgatttagattttcctgctgtttgctaccaaaaatttgtattttaaatctgtttagttttagtatggttttgtctctaatgaataaataattccttcttattaagaagaagtaagggagaaagtttttagaaagtgatttttatgctcgcactataaatatggcaggtcagttcattcttttgggaagtcagtttagttacactgagtttatccaagtttatctctaccaagagtataatggcatgggatggcttatttaggacaattccctttcccattgtttttgttgctgagccaatttgagttagttttgcatcctggggggctttaaaatacagcatgcagtgaaagatcagaattcactgaatatttcttctgagagcatggtttcatggtttttctctatgaaatgactcaatattccaaatgtttttttttccttcctcctttcaaaagagttcttaacccaattaggatatcctgctttgggtatgaggttgttgttgcctgtaatcacacatggtttgacatcagttttaaatcaatggagagaaaaaactgaaaaagatgctgctaagtagttctctgtattaaaggagatatttttaaaacagggtacaaccccctgctgcacacgctagcatatctggaacctactatgaaaatgaaaggacccttataggtactcacagccctttcatgtaagtatgatctgatatttaggtcttcagaagcctgtaggtttcatttctatgaggaatcgaggagcgttacatcctgatatccttccaggctgcttaagaatggactgcttcgacactgaaagtgctagttaaatggattcatatgaagtgctttactcccaaccattgagttatttataatgtatttattaggggagggtaccttgagtctattatatatgcttcatcaaaacatcttgttcatgttttatgtttttaaaaaaggcatttgaatgaatgtttgactcaggtttgttaaattaaccttcagtaactgcagtaccaaaaattacactcaactgatgaaaaaaacgaattgtatgatttaggaatcaaaaactaaaataagtggaattatgtatcttttctaaagttaaaaaagtaaaatattttattatgagttattataaaaattggttaattgtataggaagatgacagtatttttttcaagttatcataaaaagtaattcagatgacatttgagaagtaggggaaagggaatcatgttgacagttttagttctgtgaacactaatttgtgtgaagctattaaaatgattgtaaagttgactactgtaaatttcccataattatgtgtgtatatgtgtcatatgtatgtacatgtatatgtctaaaaattactttacacatgtgcctacatagacacaccaagaagtggatgtatataatatagaaagtatatagcaaagtaattttactctgataataaaaattgtttgacatgtattttgttatgaatagtttatcttccaaaagatattttgctctattttaaagtgtagaagaatacactgctaataaataataaaagttttattcaatttacttattttttggtgtttataatttgaatttttgagttatcaatgtactgaagtctctttataattttatttttggttcagtgtggtcagtgccttgagtgtttcaagatctctattctggattttagtttagcttttattgactttctaggttgtggccattgcctgaaatacatgacagtgagctcacagaaaccttatactttgaatttcacaaaaatcatataatgttaggttcttgcttgctttccctttattttttttactgtcaataaaatactgatcctgatcagtgttttgggtcctgcttagtcatttatgactactgatgactattgtgtgattgatcaccagttccttttgaaaaagaatgccatttttcctaaatgagaaattatagaaatcagttagaagaaacctcacacctgttggatctatgccctgaaaagccagtttgggaggaagaagctacactatttattggagatattttatatagtaaactggatctctttgggttatgatgtttctgaggtttttttttccttaaattttttttttttttttttttagaatgcaaaggaaagtttgtgggtgagaaggtagttttacatttggaattgggatctgcaaatagctgtcctaacaacactgcatgaaacaattggggtaccaaggttttcataggaccacatcttaaagaaggagatttcttatgaattaatgaacctgtttcacagggcagaaggaaatctttttttgtacagattgggtttttatgaaaaagaaagtaaaaaaaacaaatcaattagctggtttcagcagatttctcacctattgagtttacctgtttcttttttatccttagatgtaaaatgatttataaatctcaaaacacacctgggaaaactatctatgtgattcaaatatagcaggaacatgaatttaccaactatacacaaatgtattttgaaaattgtttttacttctatgctttcttcagtgacatgttaaaccattaatatgttgagtctaattaaaccagttgttagtatataagctgaacaggactccgtgg

SEQ ID NO: 25151 - DNA, 23120 bp, Homo Sapiens
tagtgggagtcctttggtagtgacggtccggttcatagacttggggtttgaaaagggttttggcagttggtcaagggcattcatcatgttgaagttttctttcttcagtacagcctcctccccatctcccacttgatggagtgcctctgatgccatctgatttgttcgggatgacacccgtcaccatgcaggacaacccagctgaccagaagcagagagaaactgtgggggcagtggcccacctttagtttggacagtctgcaggtgcaatgagctgacttcataatcatcacagagtgtaacaattacaggccagcctccccccttgatttgaggctactgctgccaggctagctatgtggctggccagaccaagggccagtgtgactgtgaagcagcatcatgagaggggtaaaaccaaggaacagactgcatgagcccttgggccccttccagctctaatactccatggtgatggcagccctgcccttctctgaagatctcaaaatgcctgacacctgtgtccttccgcactgccctgggaaggagaataaggatggtgagagatgggcgtgggatgtagaggatggtggtgtggccctgagagataggcagtattggaaagtgtctgctggggagggaaactttgtccgtagaagctaaggctctctatcctgaaaccataggctgcagactccactgtgcccagtcggttagtgaaagggaaagcccacatggttcataggggttcatggctcacatatgatcagacttcactgctagaattctaaatgtgccacacccacactcccaagtactttcctgtgtggagtgacaatggtggcagttgcagtgggatacagagatgggccacacatgatctctgctctcagagaaaccaccttacagtaggaaaacatgtacacagcttcaggggtggggaggggggctgttagaaagcactggctttgcagagtcagatgtggatgtgaagtccagccctgtgccgcctagctgggtgacctttggcaagtgatttaacctcactgaacctcagtttcttcattggtgaaacagggataaaaaatagcgcctccctcacagatttgtgatgagataaccatgtaaagttttatttcttcctatggatgaggcaaagcaaaggacatttaaaaataccaaatcatatctttttgtgtgtgttctatataaccaaggtttcttgcccttaaaaaaaataaaaaataaaataaaaaatagaggccgggcacggtggctcacacctgtaatccccgcacttcgggagaccaaggcaggaggattgtttgagcccagtagttcgagacctgtgtgggcaacatggtgtaaccccattttgtagaggcgaaacctctacaaaaaatacaaaaattagctgggcaaggtggcacgtgactgtagtcccagctactcaggaggctgaggcaggaggatcgcttgaacccaggaggtcgaggctgcaaagctgagatctcaccagggcactccagcctgggcggccgatcgagaccctgtctcaaccaaaacaaaacaaacttttgaaaaatagacgcaggtgccctctggatgctttgctgcttcttgacacctgtcgtataatctgtaatgatgtgatttctgcgattccttttcattgtctgtctttcccttgctcacagtaagctccctgggggtaagggcgggtcgtcttgtgtcgcattttgtctccagcggagatccgttccgtttggaacggaagctggcgcacagaaggctctttagaaggtcggtgtgtgtgttgcggcagaaggtagaggccgaatgtggccgcgggtggcgtgttgagcgcggagggggtcgtgggactcgggaacctgtgcaggcggtggagaggggcgcagcggctctgccccgtgcggcccgcagatggcgctgcaggccaggtcctcgccgcgcgccagcctggaacccggaagcggcagcgcggcgcgacccggcgggcgggctctgggcgcgggaatcccggcggatcccgggcgggcggatgacccccagccctacccttggtgccgcctcctcctctctcctttctcctccggcagccagcgcgcctgtgtcctctctaggaaggggtaggggaggggcgtctggagaggaccccccgcgaatgcccacgtgacgtgcagtccccctggggctgttccggcctgcggggaacatgggcgtgctcagggtcggactgtgccctggccttaccgaggagatgatccagcttctcaggagccacaggatcaagacaggtgaccgggtgtgcgcgtgccagggagccgcgcgggcctcgcacaacctgggcaggccccgagggctggcgcactgccctggcatacctgcagggcgcttcccctccattcctagagggccgcgcttctggagaggctcaggaagggtgggcgtggggagccaagctctaaaacagggtagagattcctactgtgtgcagggcaccgcgccggctcctgcagctttgttatttcacactggcctcctgagacggcctgccggggggtagaattgacaccccatttgacagatgaggaaaaaccaagtgtgggaggccccagtcctctctgccaatccgctatacgtgttttgttttcagtggtggacctggtttctgcagacctggaagaggtagctcagaaatgtggcttgtcttacaaggtgagctcctgatctccacattccaaacctgagtgtctttttaaaaagtccatcccaagccagctgggcgcggtggctcatgcctgtaatcccagcactttgggaggccgaggcgggtgggtcacttggagtcagaagtcaggagttcgagaccatccaggccaacatggtgaaaccctgtccctactaaaaatacaaaaattagctgggtgtggtggcccacgcctacaatcccagctactcgggaggctgaggaaggagaatcatttgagcccgggaggcagaggttgcagtgagccgagatcgtgctactgcactccaatctgggcgacagagtgagaccctgtctgaaacaacaacaataacaaaagtccatcccaagccaaagggagcagagggttctcagatattgagaagtagggtgaatgacaccctgggatgccagcttctacgggcaatttgttgctgagcagtctggggccctttggcaggccctggttgccctgaggcgggtgctgctggctcagttctcggctttccccgtgaatggcgctgatctctacgaggaactgaagacctccactgccatcctgtccactggcattggcaggtttgtgtgtgtacttggggaagaaggagagaggcaggaggatggggcctcctctcagctctgcttttgatgcttgagtctagacgggaggggttttttttttaaccaataatggatgggaaggaaaggggtcaggacatctgaattcttatcctataacagggttatggggtatctcagccttggcactattgatatttagggacaggtaattatttgttggggggtggaggctgtcctgtgcagtgtaggatgtttagcagcatctctggcctctgcccactagatgccagtagcaccagccctgctccagttgtaaccatcaaaaatgtctcctgacatggctaaatgtcccctgggaggcacaattgcctctggttgagaagcattgtcctataacacaagctgtcagtatctcattattttcaccatcttctctggccctacttcttattttacttaaggatatggcaagagagaacatttactgagtgcctactatgtgcaggcattacctgtatgttctaggtaatctcttcagtgactctaccagttagagataattaaccctacttgagtttagcctaagaggagcaagtggcaaaggtgaggctcaagcgcgggagtatgtggcccagaacttattcaccacatctgcagcagtagagaacaggagagttcagagaaagaaggagttgcggtccagatgcagtgctcatacctgtaatcccagcactttgggaggctgaggcggcagatcactggaggccgggagtttgagacctgcctggcctgcttgcccgcccaaaatgatgaaaccccgtctctactaaacatacaaaaattagtcgggcgtggtggcgggcgcctgtagtcccagctacttgggaggctgcagcaggagaattgcttgaatgtgggaggtggaggttgcagtaggccaagatcgcaccactgcactccagccttggtggcagagcgagactctctcaaaaaaaaggagcagttatgtcccgccacgttgtttggtgggttggggaagagttgcaaagacgacagacgtttgctggccaagtgagtcttgacctttttcctggtctgtttgttcagaaattgatgaataactgccaccataaaggtctttggattggtgtggccctttctgtttccttaacacattctcttggcagggttcatgcagtgtggtgcttgctttccctggttgggggtctgagtctgtgatccatcaagcactggctaagggcctgctgggtgcttggtatgtgcagatgatacatacacgaatgaggcaaggcccctgcccttaaggcctctagttgggtgtaggggaaaatcaagtgaatacaagagagctgtaagcaccgagggaggcaacggtaaggagggagtggtgaacaggaagccgattggccttgggcttagggagtttataaatccaacagacatggagggcgcactcaagtgggaacctgggaggactgcagctgcctcaggtccccgcagggagatcgtggagtggggtcaggaatgctctgaagaaggcaggacttgggcatggaggaacagatggactttcgctgaatgctttcgatgaacgaggcactgcggtcagcacttcacggtacattatttcatttattcgtcacaaccaccaatgagcatgttactgtttaaatcatcattctaggccgggcgcagtggctcacgcctgtgatcacagcactttgggaggctgaggtgggcggatcatgaggtcaggaaatcgagactgtcctggctaacacggtaaaaccccgtctctactaaaagtacaaaatattagctgggcgtggtggcgggcgcctgtagtcccagctactcggaaggctgaggcaggagaatagcatgaacccgggaagcggagcttgcagtgagcggagatcgcaccactgcactccagcctgggcaacagggcaagactccatctcaaaaaaataaaataaaataaaataaaataaaaataaatcatcattctataggtgaagaaattgggactcaggttaaatgacttgttcaagattgtgcagttagcaaacggcagaccagttatttgagttcatgcttgtcacactcctaagtctaagaacgcggctcttaactcatctgcccggctgtctccctggaggcgggaggccattgtgaaagcagggttatagacagtggggtagaggtgtgcagggtggaagggtggcagaggccaagcagggccctggcagtgctggcctggggtatgtgagtccagtctagaacagtgggagacatgttgaagaggaactgtgacaagacctactaccaggaggaatgtattgtgaagaatcaaagctgactcaccaggtttctagcctttctttctttctttcttttttttttttgtcggagtttggaatgtattgtgaagaatcaaagctgactcaccaggtttctagcctttctttctttctttctttctttctttctttctttctttctttctttctttctttcctttcttccttttctttcttccttccttccttccttccttccttccttccttccttcctttccttctttccttctttctttcttttttttgacggagtttcactctgttgccaggctggagtgcagtggcgtgatctcggctcactgcaacctccgcctccagggttcaagtgattctcctgactcagcctcccgagtagctgggactacaggtgcgtgccatcaacgcccagctaattttttgtatttttagtagagatggactttcgccatgttggccaggatggtctcgatcttctgacctcgtgatccgcccgccttggccttccaaagtgctgggattacaggcgtgagctaccatgcccagtctctagcctttcttaccgtgtgctgtggacagttaatggtgtaactttaaaacttgggaggaggggagttctgtagtcagaagtttgagaaatgcctgactaatccaaattaaacaggtttctctgttgtaggccgcctcagaacctttagtgctgaggtgcaatgattccttacagggtgttatagcatgtaacgtactttgggaaaagctatgttgatgagggagattgattattccttataggccagagctaggtctgttcatcccacagtcccctcattttagaataagactgtcaggaaatatgaggcattgaagtggtgtgtgaatggatgactgaaagaatggctaaaaggcagttcagagggaaaggcagaggataagtcccagaaatcacctgtattctaggcagtggtaaaacccaggtgtacttctgcttcatggggcaagacaggggtctctccctgttgacatgcggagttaaaggtgatggggacatattggtaggaaggttctctgggcagtcggagaggcacggaatggaaactcaggtgagaagttggctggaaggtggatttgggaataccttatacagactgatctccacagccaaggatgtggttgattcttgactagagtcaacaccagtgcttcaaccccagctgcacgttagaatcatctgggaaacttgagatattcatgctctggtcccaactctatatattctaatttaattagtctaggtcagtggttcccaaacttgtgtgcccattggagtcacctgaggactcttttaaacattacgaagtccaagtctcccccagaccaattaatctcattcactgtgagtgggacacaggcatcagtattttttaattttttaatttgttttttagagacagggtcttgctctgttgcccaggcaggagtgcagtggtgcacaatcatagttcactgcagccttgaactcctggactcaggcagtctccctgcctcagcctcccaagtagctgggactacaggtgctcaccaccatgcctggctaattaaaaaaaattttttttttttgtagagacaggggtcttgctgtgttgccaaggctggtctcaaattcctgggctcaagcaatcctacctctgtctcccaaagtgttgagatgacaggtatgagccaccatgcctggccaggcatcagtatttttttgaagctcccaggtgaatccaatgtgcagacaactttgggtactgctgacataggcattttttaaaaaactcccctgattttattttatttaattaattaattttatttttttgagacggaatcttgctctgtcgcccaggctggggtgcagtggcgcgatctcggctcactgcaagctccacctcccgggttcatgccattctcctgcttcagcctcccaagtagctgggactacaggcgcccgccaccacgcccagctaattttttgtatttttagtagagacggagtttcaccgtgttagccgggatggtctcgatctcctgacctcgtgatccacccgcctcggcctcccaaagtgctaggattacaggcgagagccactgcgtccagccaactcccctgattttaatgtgcaggcaggattgagactaactactctagtctaatggttctgaaacttgagcaggcttcaaaatcacttggaggccttgttgaaactcaagtttcaagtgtgggctgcattcccagagtttctgattcagtaggtcttggggagcggagctgtgaatttgcatttctagctagtccttaaaggttgctgatgcacctggtctggggaccacactggggttcctctgatctcaatgggaagaatggaatcaggagtggtagaggctggatacttattaaacagagatggggtgagcacaattatctcaagaagccacagggctagagtggtaaccagagtgttttgactggcaggaacctgtgggtataatcatggggagtccctggaattaaaatggttgggggccaggcacggtggctcatgcctataatcccagcactttgggaggccaaggcgagtgggtcacctgaggtcaggagtttgagaccagcctggccaacatggcgaaaccccatctctactaaaaatacaaaaattagccaggcgtggtggtgggtgcctataatcccagctactcgggaggctgaggcaggagaattgtttgaacccgagaggcggaggttgcagtgagccgagagcacaccactgcactccagcctggcgacagagcgagactccgtctcaaaaagaaaaaaaaaatggatgggatgcttactaaagtgctgttcggcatatacagagaggtcatgggaggtcatcaagaaccatctcaaggactggaacctaggaaggtgattgtagggctaggaaaggtacgcatgtggtcaggcattggtacaggccgtggcatagaagaaacttcagcctagagatagggcagggcatggagggtaggtggtgacctgtttcatgtggttgagggagagaacctggtttaggaattggcatgtcatgaggtttatcccaagtctttcacagccagtgttgatgatacagaagcgaaataaaagtgatagcacctttctgttactcatttttctggaatgattattgggtgcctcctgtgtttcaggcactgtgctagtgctggggatgcgacagggatcggacccagtccttgccccatggtgctctcagctagatgagcaagacaaacaaaaacaagcaaataacaaataattacaaactcctaggactagtgaggatacaagaccaacacatacaaatcaactgcatttctctatactcacagtgaacatgtcaaaactaaaataaaaaacactaccatttattggccggccgcagtggctcatgcctgtaatcccagcactttggaaggtcgaggcaagtggatcacctgaggtcaggagttcgagaccagcctggccaatatgatgaaacctggtctttactagaaatacaaaaattagctgggcgtggtggtgggtggttgtaatcccagccacttgggaggctgagacgggagaatcacttgaatctgggagatgcaggttacagtgagcggatattgtgccactgcacttcaacctgggtgacagagtgaaactgtctcaaaaaaacaaaacaaacaaaatggctgggcgtggtggttcacgcctgtaatcccagcactttgggaggctgaggtgggcagatcacaaggtcaggagatcgagaccatcctggctaacacagagaaaccccatctctactgaaaatacaaaaattagctgggcgtggcagtgtgtgcctgtagtcccagctgctggggaggctgaggcacgagaatgacgtgaacctgggaggcagagcttgcagtgagccaagattgcgccactgcactccagcctgggcgacagagcgagactccgtctcaaaaaaacaagcaaataaacaaacaaacaaaaacacaatgccatttatagttgtttcagagaaatgaaatacttgggtataagtctaacaaagcatgtgtagaatctgtatgctgaaaatttttaaattgctgatgaaagagatcaaagatgactcggataaatggatgacatgtactttgttcatggattgggagactgaacataatgaagatttcaattgtccccaagttgatctgtaatttaacgcagttcctattaaaatcccagcaagttttttttttctatagacatagacaagcttattctaataattacgggaagaccagttttacctagattagctaaaacaatttggaaaaaggatagctggaggaatcagtctacccagggttaagacttgctatatagctacataattaagcctagtgtggtattgaccaagggacagatggacacagatcagtggaacagaatagataacccagaaatagacctccacaagtatacacaactaatttttttttttttgagacagagtcttgctctgtcacccaggatggagggtactgctgctattacagctcactgcagccttgacctccctgggctcaggcaatccttccaccccaagcctcccgagtagctgggactacaggtgtgggacaccatgcctggttatttgtatttgtatttttttttttttagacggagtttctctctctctcttttttttttttttgagatggagtttcgctcttgttgcctgacctggagtgcaatggcgtgatctcggctcaccgcaacctccgcctcccgggttcaagcgattctcctacaggcacatgccaccaggcctggctaacttttttgtatttttagtagagacggggtttctccatgttggtcaggctggtctcgaactcctgacctcaggtgatccacccgcctcggactcccaaagtgctgggattacaggtgtgagtcaacgcgcctggcctgagtttctctctttttgcccagactggagtgcaatggcgtgatctcggctcactgcaacccccgcctcccgggtttgattcacctgcctcgacctcacgggtagctgggattacaggtgcatgccaccatgcccagctaatcttgtatttttaatagagatggggtttcaccatgttggccaggctggtcttgaactcctgacctcaggtgatcgcccgcctcggcctcccaaagtgctgggatcactggcgtgagccaccgcgcccagcctgtttgtattttttttatagagacagggtttcattatgttgcccaggctggcctcaaactcctgggctcaagcaatgctcccgcctcagcctcccaaaatgctgggattacacacaattgatttttgacaagggtacagaaacaatgtgttggaggaaagacagcctttgaacaaagggcgctggagctattggacatcataggctaaaaatatacaataatcaacctaaaccttataccttatacaaaaattgaaaatggatcatagacttaaatgtaaaaccaaattgtctaatttttagaacaaaacaggagaaaatctaggcaaagagttcttagatttgatgccaaaagtatgatccatgaaaaaatttttgattaatggggcctaatcaaaatttaaaacttttgctgtgcaaaacagaatgaaaagagaagtacagaatgggaaacatagttacaagccatgtattcaacaaaggacttgtatctagaatgaagaaagaattcttaaaacccaacaataaaaaatcaaacaattcaattagaaaatgggcaagggctggctcacacctgtaatcccagcactttgagaggctgaggtggtcagattgcttgagcccaggagttcaaaactggcctgggcaacgtggcaaaaaccctgtctctaccaaaaaaatacaaaaattagctgggtgtggtggcacatgcctgtagtcccagctacttgggggagctgatgtgggaggatcacctcagcctgggaggtcaagattgcagtgagctgtgaccatgccactgaattctagcctgggtgacacagtgagacgtgagaccctatctcaaaaaaaaaaaaaaagccaggcgtggtggcttacgcctgtaatcccagcacttcgggaggccaaggcaggttgatcacctgaggtcgggagtttgagatcagcctgaccaacatgaagaaacctcgtctctactaaaaatacaaaattagccaggcgtggtggtgcatgcctgtaatcctagctactcgggaggctgaggcaggagaattgcttgaacctgagaggtggaggttgtggtgagccgagatcacgccattgcactccatcctgggcaacaagagtgaaactccgtttcaaaaaaaaaaaaagttcaacactattaactattagggaaatgcaaattaaaaacacagtgagctattatttcatacctatcagaaagactaaaataaaaaaataatgataataccaaatgctgatgaagatgtggagacactggactactcatatatacattgttagcggatatgtaaaatggcatagccactctggaaaatagtttggtagtttcttataaaattaataatgcatttaccataccacccagcaattgtattcttgggcatttatcccaacgttgtaaaaacttgggtttatacaaaaacctgtaaaaaatgcttatagcagttttatttatagtagccccaaagtggaaacaaccaaatgcccttcaatggatgaatggttaaataaactgtggtacatccataccatggaatactttttagcagtaaaaaggaatgaactatccatatatgcaataactgggatggatctcaagggaatgatgctgagtaaaaaagccaatcgcagggccaggcacggtggctcatgtctgtaatccccgcactttgggaggctgtgttgggcggatcacttgaggtcaggagttccagaccagtctgcccaaaatggcaaaaccccgtctctactaaaaatacaaaaattatccaggtgtggtggtgggcgcctgtaatcccaggtactcgggaggctgagacaggagaactgcttgaacctgggaggtggaggttgcaatgagctgagattgcaccactgcactccagcctgggcgacagagcgagactccgtctcaaaaaaaaaaaaaaaagaaaagaaaaaaagccaatcacaaaggttacacagtgtataattctatgtacataactttgttcttgaaataacataatagagattagtggttgccagggattcgggattaggggtgaatgggaggaatgtggctataaaagggtagcaggaggaagacttatagtgatggaaatgttctgtatcttgattatagtagtcgtgtaaatctacatatgtgataaaatggcataggactagacacatcaacacacgtgcttgaatgctaggaacactggtgaaatctgaataagctctgtggatagtaccaacatcagtttgctacttgtgtgatatactatagtccttttttttttttttttttttttttttaaagagaaaagggtcttgctatgttgcctgggctagacttgaactcctggactcaagtgatcctcccaccttagcctcccaagtaactgagactacaggcccctggctagtacaatacattttgtagtacagttgttattattaaggtaaaccaggtgaagggttcatggactttttgcaacttcctgggaatctataattatctcaaagttgttttttcttgttgttgttgttgttgtttgttttgtttttttgagacagagtcttgctctgtcaccaggctggagtgcagtggcgtgatctcggctcactgtaacctccacctcctgggttcaagcgattctcctgcctcagcctcctgagtagctaggactacaggcgtgtgccaccatcaaagtttaaaaaaagcgacaaattttgggaaacgctatcaaggaaacccacaaacagctgggcgtggtgactcacgcctataattgcagcactctgggaggccgaggtgggtggatcgcttgaggtcaggagtttgagaccaggctggccaacatggtgaaaccccgtctctaattaaaaaaactagtcgggtatggtggcgggcacctgtagtcccagctactcgggaggctgaggcaggaaaatcacttgagcctgggaggtggaggttgcagtgagtagagatcacgccactgcactccagcactccggcctggacaacaaagagagactccgtctcaaaaaaaaaaaaaaaaaaaaaaaaaaaggaaacccacagggcctgagatgaaaaatgaagggagaaccttctgatggggtggcagaggcctctctggagagctgatctttaagagtggagggatgaagagagaccagagaaggcacatttgggcattccctccttaccagaagaaaacaccaggagaagcctcctggccagtgatgttcaaagacagaaccagtgcttgaaagaaatgtcttacttttcttcttggtaccttttcccctgtcttcctcctaacctcttgtgttgattttcttctcttctgccatcagtcttgataaactgcttgatgctggtctctatactggagaagtgactgaaattgtaggaggcccaggtagcggcaaaactcaggtacatgtgaggccagcagtcaggaggatttaggggtgagggtggtagatgcatagcccagggtccctgggggagcttcagcgtactaatgggttcagagcccaacagagagaagatgggtaataaggaatggggtcgggactcagcccatttgtgttgctggaatctgggcaaggtttggtggggagctcccatctggaccctctctgaagtgtcaagttcatccaatgcccccacccccaggtatgtctctgtatggcagcaaatgtggcccatggcctgcagcaaaacgtcctatatgtagattccaatggagggctgacagcttcccgcctcctccagctgcttcaggctaaaacccaggatgaggaggaacaggtaagggcaggatgctgggttccattgagattctgacacaggaaaaccccattatcccttaacattgtaagaatttgggttgaatagtcattccttgccttcaaacttgctgttctattaatacatctcgtattccttaagccacccctgttgatgccatcatcccatttgggatgctactcacaccgattcttccaggaaaccctcccaactctttgcatgccctaaaccagggctggcaaacaccaagctttgtgtttccagtccatttctcacctgtgagagacatcactaatcagtcatatccctctttcctgctgagttctgagtactttacagctcagcacccaggcagccaccactgtgacaactgaccattagacaaagctcatttgccaccctggacctgagtccttgcatccaggtgcctcttccttctcagccttaccttgacccccctactccctcttatccaaagtccttgcttttcttttccaccgcttcaggcagaagctctccggaggatccaggtggtgcatgcatttgacatcttccagatgctggatgtgctgcaggagctccgaggcactgtggcccagcaggtgagcctgctgttctgcccctccttgcttaattcagctttctaggtgctatctctgtgggcaggtgtcctactacagactgtttggaaatgcagatgtgcaatctggtgactccaactatgcttgctactcccaggatggaattcccgagcacctaaatcacatacctcattgtttacatgttcatcttccctgctgaacagtaaagccccctgagtggaaggatcatgtcatatttatgtctgcattccccactaggtgagtgaggaatacttttagctgcaagtaatagaggttgtctgacagagacttgaagcttgaggacatttaattatgtcacatgagttgggaggttggcaggtccatgctatcagggcaatagatttgtgtgtctgattttcttgttcttcccctcatggttgcaaagaggctgccaaagctccaagcatcttgtcttcacacatccacatccatattcaaggcagtaaaagatagatggttcttttctgtacctcctcccttttatcagggatgaagaatctttctccagagcccactaatagacgtccctcttccccttacatctagttggccaaaatggggttatgtgtgtatcttggactaagacctgggcccaccatccctgaagtcagatttctgcccagtcgctgaacacattcagagtcatgttaatgggaaggatttagaatggcatttgggttggcactttgctactcatgttgggtgcttagacaggatttggtgcactgatttataaatgactagatgtggaggataccttaaagatagaatagtttatctcaaacttttcctctcaccccaaagcatgacgtgttcacacgggcatccccacgactatatataaagtcaatgatttttacaaactttagaacatataatagttgaacaagctgggagtggtggcccacacctgtaatcctaatgactccagaggctgagacgggaggattgcttgagcctagcagttggaggttgcagtgagctatgatcataccactgtaccttagcctggtcagcagagctagaccccgtctttaaaaaaaaatgttgaacaaatacttacctcagaagtcatagctggttatgacccaccagcttgttgagacatgaagctgagtagtgcttacctcacttttagagatgagaagagtgaaggccggagaagtgaagtgagttgaccaaagttgaccaaatatttagggcaagaactaaccttatagcccaaacctctcaattccagatcagaagactgtattttttactgtaggaccattagatgatatatcttctattattgcataataagttaccaaaaccttagtggcttaagacatagtatttcttatctcacagtttctaggggttaagaatctgagactaggagcggtggctcacgcctaaaatcccaatgctttggaaggccaaggcaggaggatcacttgagcccaggagttcaggaccagcctgggcagcatagcaagaccctgtcttaaaaaaaaaaaaaagaaaaagaaagaagaaaagaaaaagaaccagaatcaggatataagaagtaagggagaagagaaaagaagcatcaaaaacagtttaagtccagggaaaccaggaggattctcctgcttgtgtaaagacagaaaattatggttagaaagatggcacaggctaggcttggtggctcatgcctgtaatcctggcattttgggaggccaaagtggccagatcacttgaggccggatttcgagaccagcctggccaacacggtaaaaccccgtctctgctaaaaatacaaaaattagcacccatagtgtgcacccaatgtgtgcacccatagtcacagctacttaggaagctgaggcatgagaatcgtttgaaccgaggaggcagaggttgcagttagctgagatcatgccactgcactccagcctgggtgacagagcaagacttagggaatttatttggaggcattttagatacggaagatgaggcctagaggcatgatctagaaggagacagtgaagtaaagagaaggctaaactcttcagcaaaggaagttaggaatttgagggtggtagttagcaggacaagggaaagaaaggagggagtcagaaaaggaaaagaagggccttaccaccatggtgggaggctggacacaggagagagatggctgctgagagatccatgaccagaggcctcaggactctctgcggagctttctgaaatttgatgactttaatgtagtttttagttattttattttattttttttgagacagagtcttgctctgtcgcccaggctggaatgcagcggtgtgatctcagttcactgcaacccccgcctcccagtttcaagcgattctcctgcctcagcctcctgagtagctgggattacaggtgtgcaccaccacgcccagctaatttttgtatgtttagtggagacggggtttcaccatgttggccaggctggtctcgaactcctgacctcaagtgatccaccgccttggcctcccaaagtgctgggattacaggcgtgagccactgcgcccagccactttagtgtagttttgatgtcctgtgatttaaaccctttctttctacccaagtcttcattgaagtctgttacacatgccaatgggacgagggagacattgctgctgatgacattctgtgatgcccgtgcagcttgctgtatttgggatgggggggctatttcttactagttttagatagaaaagcaagcttgtcctgtaatgtgtcctagaggctgacaggttcatgagtgcttcccccacattccttcaggtgactggttcttcaggaactgtgaaggtggtggttgtggactcggtcactgcggtggtttccccacttctgggaggtcagcagagggaaggtgagtgatgtggcagagcctggggccagtggaatgtgacctcgcctcccagctctggagtctggtctctggccagccccatccctggttccccactgccctccctctctgcttctcctcctcctgcaggcttggccttgatgatgcagctggcccgagagctgaagaccctggcccgggaccttggcatggcagtggtggtgaggaagcaggcttggccaatgaacttgatttctagttattgcgagctctttatttcccttaaatgtcagcttctgaaccccaaagtggccctttaggaaagggacatatcccagcttccctgggtcagctacagctttgcaccataaatagctaagggaatcaggaatcgtcttgttgtttttttgttgttttgttttgtttctacattttttctttttagtcaggtttattgaggtataatttacatagagtaactttctccttgtttgaagtttgactaatggatatagttgtatccagtcttgtgaccccaccaaaaggtcccccaggcccaggcaaccactgatctgttttccatcccaatagtttggccttttccagagcttcatataaatggatctttttgctattgaagtaactttttctgcttatgaggtagtttttttaaagtctgcatgcttctcatagaaaggatagaaaataaatatgattcaaatttgtcatcaatctccacatccacagaaaccatattaatatttttacatatctccatacaatactttttctgcatatttacttatacttttagccaactttctttctttcttttttttttcttttgagatagggtttcgctctgtttcccaggctggagtgcaggggcacaatcacagctcactgcagctcgaccttccaggctcaagcaatccacccgcctcagcctcccaaagtgttggtattacaggtgtgagcccacacttaaccagctttctaactaaactaacctcatgaaaaaataaaaaaaaataggccaggtgcgctggtttatgcgtgtaatcccagcactttgagaagccaaggctggtggatcacttgagcccaggagttcgagactagcctgggcaacatggcaaaaccccacctctacaaaaaatacaaaaactaggtggccttggtggcaggagaattgcttgagcctgggagatcgaggctgcagtgagctgtgatcatgccactgcactccagcctgggcaacagagcaaaacctcatctcaaaaacaaacaaaccaaaacaacaacataaaaaataccatctgagtccatttcctatgttttaaaatagattttttagaaatgtaatttttagcagctatatattttttccagtttcttttattgtggtaaaatacatgtaacataaaatttactatcttaaccactttaaggtatacagttcggtggtgttaaatacattcataacgctgtacaaccatcaccaccatccatctctataactcttcaccttgtaaaactgaaactctgtacccattaaaaataactcattttccccttccccagcccctgacaaccaccattctactttctgtatctatgctttttgactactctaggaacctcatatacatggaatcatatggtatttactttttgtgactggagtatttcacttagcataatgtccagaaggttcatccaccttgtagcatgtgtcagactttccttccttttaaaggctgagtgtctgggcgtggtggcccacacttgtaatcccagcactttgggaggctgaggctggcggactgcatgagctcaagagtttgagaccagcctggaaagcatggtgacatgtgccccatcgccttctggttcgggtcaaacctgaggcatcgagatttagtggaaagagcggggcacaagtcaggaggcccaggttctagttccagacctgccattaggttttgtaaccttggggaagttatttctctgtgctaggcctctgttttcctctccgtaaaatgaagcggtagtaatcgatgtcctctatactagcattatggatctgtaagtctgtttctgctgcaggtgaccaaccacataactcgagacagggacagcgggaggctcaaacctgccctcggacgctcctggagctttgtgcccagcactcggattctcctggacaccatcgagggagcaggagcatcaggcggccggcgcatggcgtgtctggccaaatcttcccgacaggtgagccagccccaggaagatgccagtaatcttgggccctggagggtggtttccatacccacagatgtcttcgagaagaactctttagaggctgaaaccttgcaactaaagaagctacccacttgggttgcttaactccactgactccttacttcttcttccagccaacaggtttccaggagatggtagacattgggacctgggggacctcagagcagagtgccacattacagggtgatcagacatgacctgtgctgttgtttgggaaacagggaagcattggggacccctcccaacttttcttcccagtaacgcctgctgtttactgccacctggcactggtgactacagacgttctcaggctggccagaagagacatcttgggttccttggcctcactctctgtaagcatataaaccacaggcgaaagaggatgctgcattgcgaggacccagaaattcatactggtgccacgtttccttcccttatttctaacgtgtatgtttctggtggaaaccaagttcaccctggctgggagcatctctgatgaggcatgctggcgactggatggataatcctgtgcatcaccattgtgtcctgtgctccctcctagcgcagtggccaagccgggaaagcctctaacttgcctttgctgctgctgccttttttttcttttgtctctgcctttccatttgttagatgggggcccactcttccttagctctgtctctgagttactgggtggaaataagcttataaatgaaatactcttcttcatctctgttttgctcttaaaaatataaaaaggcaattccccgagccctagagccacctgatttccccttagaaggctgtttttcagtttcccccagtgaggcccaaagaacagtttattcctcctttcctcttgctgatttggtttcagacctgcctgcatcaccatgactaggtgagaacgtgtgggctcgctgcagttccagggatataatttaacagaaagggagggtatgacctgctcctggtgaatccagccactcatttaatatgcatggtgccctgtggggcccctccacagtacagcataaccagaggtgctgaaccatggccttgcccataaacagacagaggagaatttgcacagtaaatagagccagctgggaaaattgatgctgacgtaaataatacatggcaaatctagtcctttatgcagaaattcattgctggtggctccaagatgcaatataattacacctctcttcctgccagctgtaccacagctagtgccctagtgtatgaaataatccctctgtctttcaccagcactgtggccatccgtctgagagccatgaccctggctgggaggggacgaagacaccagggaatggaaaataaaaggaaaagtacagaaatgatcaggattggttactggccacatcttttaaaggaaggtcatctttcttggttagagagcctgttgtgtaattaatcagttatgtcttggctgcaggaaaggagggtccgagttacactcagaaagtaatgacatttagaggtgatgaatgcaacagggatagaatcatggaggattgggaaggagtggcaaactggcaccagggtgttggattcaggacagggttggtaagcctaagcctgggggaatcctagcgcttgctttcacagaagacctcaggagaaattaatcttcagtatctttataccatgggtgattggcacattcctgcaaccacagtaagatgcaatacatgaagctggaaattgcaaattcttgccactcaaggtactatttgggcatcttcagcccacagcagacatgaccaatcgggcacaagcactcttttttgtggaagtcaaagtgtttttagaagtttttctcaatatagcactccagggggccactaccagtcagttggagttggtattcaaggtggagtctggttgccgtctctgccctgttcccattatgtagtgagttcaggtacttaatacctaactgaggaccctaggactgcagtttgagatcatctggggccaggcacagtggctcacacctataatggtagcactttgggagcctgaggcgggaggatcacttgagcccaggagtttaacagtttaaaatcagcctgggcaacatgatgagacatcgtttctacaaaaaaattttttaaattagctaggcattgtgatgtgcacctgtggtccctgctacttgggagcctgaggcaggagaatcgcttgaaccttggaggttgtggctgcagtgagccctgatcgcaccactacaccccagcctgggtaacagagcaagaccctgtctcaaggaaaaaaaaaatcatctggcccatcctgttacttaacagagaaggtacctgaggctcaaaaaggatgactgacagtcctagtggcagaatggaggtgggatctggaacccacaacttgattcctaggac

SEQ ID NO: 25152 - DNA, 61358 bp, Homo Sapiens
agttttgctgagaggctagatggattatgatttttgtttatttttcctgtttatccatatattatttttcaacaatgagtattgattacttatataataattttaaggctgtacacattgcagacagcaccccactgtttgaaaaactcctcctcagtagaacatggcagaccttcatcttccttccctgaaccttttccaaccttaggcttgccattctccaccagtgctaatgtcatgtctcttgaaatctgtattgaagtcagtatttcattcttgccagtttccactgtgtgtttaaatttggagtctggtgtctagcattagctggggttggagcttccactcctctcagcattggtaagcctcctcacccaccccatcccatgtccaagatcacccagttacacacttaccatctacccagttcattcacatcatcagtcccagagctgcagagatgctctttttctacctcctacttctctggctcttagagaggcagcatgggataatggggcaagcgaatagggccttaaagtagagggacaagggttctcttccctatctgccacttattagctatgtgacctcgtgtaagtctcttttctttttgagacagggtctccctctgtcacctaggctggagtacagtggtatgatcatagctcactgcagcctcgaactcctgggctcaagctatccttccaccttagccttctgagcagcagggactacaggcacatgccaccatgtccggctgatttatttatttttatttgggaagatgggggtctcactatgtcgcccaggctggtcatgaactcctggtctcaagcaaccctccaaccttggactcccaaagtgctgggattacaggtgtgagccctggccttgcctcaatttcctcatctgtaaaacggggttagtgaaactcacatcctatcagtggttttgaggatgggccgactcttgtattgcctgctctagtacaatcagcagctaaggcggctcactttccggccgtgctacaataggtaagaactaggatgctttagacgtgtgactgggcagtgggagcccctcacatgatcccgagatgccagacagtgtctctccgcacagggcgtgtgctggtccagaggcccgtttttccagtcgccccacaccccgggtccgcgatcacgctccccccacccatagccgagcctgacgcggcggtggctcatgcgcctttccgtcccagcctttagccacggaccacacgtcccatctcaggcgccccgcccctcccccgccccccgcccccggcgcgcctccccaggctgccggctccggtgtctgagcggccgcgcccgcgagccgtgagcgatgattggctgcgccacggcggcgggcggtccgtgggcgcacacaccctccccgcgcagccaatgggcgtgcgcacgtcactgatccggaggcccgcgggccggcagcccctcaataagccacattgttgcatgaaactccggcgcaggagtcccgggctgccgctggcaacatcgtgtcacccagctaagaaaatccgcgggcccgagccacgcgcctgtgaatcggagaggtcccactgcccgagtggagccgggctgagattcttctcaagttgagcctcagtgatcctgtggccgaagttagcgccttgacgtgggacaaccggacacgtcgccaggagagaactgaggcgccttctagcagttgtgacgccaaaatcacgtctccggagacccgcgccctccgccagccgggcgcaccctcgccggtagccttctttgtgcgccgtccggactcccagctcccggcccggcagccgagccccagcacaaagcagtcggaccgcgccgcccgcctcccctctcgcgtctccgcctcggtttcccaactctgcgccgtcgggccgcggcaggatgattgcctcgcatctgcttgcctacttcttcacggagctcaaccatgaccaagtgcagaaggtaagtcagcgcgggcggggcggcaggctgggctctggcaaagtggtctggcctccatcagtctcttcctcgaccctgcggggacccgcttcctccctactcggggcctgggagcggaaaaagtttgggcagccgggacactcctgggcgccaggagccacgtccgctaagcacagccggcgagtgcgcgcgggcggggagccgaggtcgcgctccgccgggcgccctccctccctgagctccggcacgcgctcacgctctctcccccagtccctttttccctgttactggaggggcgggtcaccccgcaggtagtcagggattgctgcgcccacgtgggagggagcccccttctgcagcgcgagttccggcgagagcacgtggagagaatcgtggctgcgggaggctgctccgctgccgcgtggggccgccgggggccgtccgcgctcgcggaccgcgtgtaggagacgagcggttcccttctccttccccgcggccctgcgggggtgggctcgaggagaagctgacccgggaaggagtaggaaaggggcagaggaactccgcccgccgcgccccctccccggaactgtggcgcccggaactgaggctcggcgaggggcgtcccccattaacccccgcccctccaaatcagcctcgggaccgcccagcctcgtgtcctcaggatctgcctctgagtaaggggaggactttggttgttactttctggtttgccctaaaagttactcggagaggccaacgcgccgcgttcctggattacttgagattcttgagatttatgtccttccgaaaacgagcttttttttccttaagcctcgacctgtctgttcccacctggctccgcagctccctatggctgagcgctcaccgcggccgggtcatttacataagaaagagcctcaggccaagccgggaagctctcattccccgcctcggggtatgggggtggggatggggccggggccggggacgggcagggccaggggcgcgctcagaattgagtttctgaaatgcccgggattaggggattggctcctggcccgggcctgggctacgatttgaggtaggggacaagttgggaagggattagctggagggaggttgttttaagagctgtgaggcaacggagcgttgctcagttacatacttggaatttcaatatctgatgggaacacatttttgggaaaatgtcttgccattaccgttctgtgcgacaacctgctcatattcccattctggcggtcccgagggcataggaggcatattaatgtagtgatggcgcgtgaacctccaagaaaagcagaagttacccagcctcaagtctggaggagcgagcagaggcggttgatttacttgggttttactgtttgtaaatggctgttattctctaattcctgggatgtggctctgcaccttgattcagtttacttaaaaacgtgcctttgatttgagctggcaggatcttggtaacttctcaacttctaagaactcttggggaaggctatcatctcttggcaagtcctaaaatacacagtggagcgtcattaatctcagggagttctcctttgggtattaccccaggacatttgaatccttgcataaatttactcttcctcaatccagaggagggcaccagggttggaaccccgttggagttataccactctcaatcttggaatgggggtcatctctcttcccccagagtggaacgggaattaaccagggtatctggaaatgagttgtaatctctgtcttgtggtttattaaccatagcaccctgagcctctttggacagcccgtttctctttgtgaaatgcaataataacagtaggcttgtccactttatggagttgcgattattaagcgctgcagtgtgcaactgtcattcctgtaggttttctctacccttgcagccacctgtcagtttgagaagtgtccctgaagacccttgggtgtatttcctctaaactaccaataggggcagaattgaatcaggcctttaactcagtaattgtcagaacctgggatttgactcccagcttaggtgagcgaagctgtttgattccagtggcagttacatagaaagcagagactcagagtatcttggaaccatctttctgagctgccattggaaagaagaattaagagagaagaatgaaaatttagtataactttagagtcttttgaaaagaccttttgatttggacccttctgaaatccccttgtgataagataatcttacatattctgggttgtagtctgaggacgtggaaggcttgggttcacctgcccaacgaggtcacttgtcgtctcctgatggacaagcccagtgttttggggcattagagatgagaatcagggttatttcctcacttttgccaattggaactcaggagcgactgcagagcacctactgtgtacctggcactgttctaagctcttaggtatgtcagcttattaacattcaaatcagccccatgaggtgaagactgattgttattagcatccctgtttaactgaggcccaggggtaacttgcccaaggtctccagcttttctgtacgagctgggaatcgaagccatgcatttggctttagagcaccatgctcttgagcacatacttgcctgtctctggggaatgtgagcgggctcctggcccgggcctctgcccactcctggctgctggtagcacccccacccatcatgaccacagatggaactagctcttctgttggtttgatcagtggcaccagtaccctctggctactccagctgagagtcctggattcattttcatcaactctctaactctgtcaactggtctcttggttactttggaggcctgctaagggtgtccctaaaactctttctggagccagactggatcatttcaggagctctctacagctcttaattgcctcccgcttctaccccccagcttagcctcatcttcctctccatcctttcattcctctgtcctgcctgttcacactaggtccttttgcccttgtcttttttttttttttttttttttgagacacagtttcactctgtcaccaggctggagtgcagtggcgctatctctgcttagtgcaacctctgcctcccaggttcaagcgattctcctgcctcagcctcctgagtagttgggattacaggcgtgcgccaccatgcccagctattttttgtatttttagtagagacagggtttcaccatgttggccaggatggtctcgatctccttaccttgtgatccacctgcctcagcctcccgtagtgttgggattacaggcgtgagccaccgcacgaggcctgcccttgccatttttgtggccctgaactctgcttggcttctttccacttaaccccttccagctcaaatgcagtttactgtcttaattttctttctgcttccttctccccctcctgtgtgccaacattagtgtgtttgaaccttgcatgacatttgtttcattccaccatctgttagagttgatggttttcagtttgggttccttcctcagggcagggagaatcttggctgttaggtttgtcgctgcagttcctggccactggtgaggtgctcagtgagtacaagagtaaaggaggagacctttctggagaaagaagctaaaccagggctgcaggaagtggaggagctgggcagggccagctagtcttaggctaaagggatggtatatgggtggacacttggaggggtagttcgcagttatctcttcatccaaagcatgacctgaggccaaagcatgacctgaggccggtcctgaggagggagagagaaagggaggagagtttcctgtccttcagcaatcaagactgtgtgtcctgcctatggagagatggaagattctttctatttttttttttttttttttgagacggagtctcgctctgtcgcccaggctggagtgcagtggcgcaatctcagctcactgcaaactccacctcccgggttcacgccattctcctgcctcagcctcccgagtagctgggactacaggcgcctgccaccatgcccgggtatttttttgtatttttagtagagacgaggtttcaccgtgttatccaggatggtctcaatctcctgacctcgtgatctgcctgactccgcctcccaaagtggtgggattacaggagtgagccaccgcgcctggctgattctttctattgattgagataagttagtatacaagatgcaggattttgtcatttaagaatggagaatcagggttaaccatagagataaaatgaagtatatactcctttctctgaccattgaccaaattgttttaatacgcatagactggtgacatttgcactggaatcctgtaatagacatagctcatgtagattccttgttgtatgagcaaggggtgaccttcaatgctgggcttgagaggaatatcttggaagcgaaaagattgaacagagaccccaagagtcaagaaagccaagaattttaatgtttttttaagaacctacagtgagtgcaaggccctctgagtgtgatatgggagacagaaacccagatacttttcagttgtctagagagatatggctgctaggtcaaaagagtgaattaccatgggtggggctggagttagagcctcaaggaaccttggcacattttggacacctaccacgtgccattagtccgcacgtatgggattagagtatcaagagtaaattgctgattgaaaccttaataatattatttttgtctatgttaattttgattggacaaactgacattgacaggtacaattcactccatttgttcaatatgtaacatcttggtaacctaactctgtccctttctctgctcagaagacaactgatggtagttaggaatactttgtagcttttgttaaccatccgtttgttttatattgccaaacttacatttcagagagagctaagaagcactttttcctctacctttgaatgaattaactcccctgagctcagccaaagtcaatttttttttttttttgtgagacagagtttcgctctgtcaccaggctggagtgcagtggcacaatcttggctcactgcaacctccacctcctgggttcaagtgattctcctacctcagtctcccaagtagctgggactacaggtgcgcaccaccatgcccagctaatttttttttagtagagatggggtttcaccatgttgaccaggatggtctcgatctcttgacctcgtgatctgcccactttggcctcccaaagtgctgggattacaggcgtgagccactgcgcctggccttttttttttttttttttttttgagatggagtctcactctgtcgcccaggctggagtacagtggcgtgatctcagctcactgcaacctcggcctcctgggttcctgccgttcgcctgcctcagcctcccgagtagctgggactacaggcgcccaccaccatgtccggttaatttttttatatctttagtagagatggggtttttcactgtgttagccaggatggtcttatctcctgacctcatgatccacctgcctaggcctcccaaagtactgggattactttggcgtgagccaccgcgccaggcattttttttttttttttaaacatcacttttcaaagttgaacttttccagtactctggggagtttggggcaattggaggtccttttccaaggggggaatcagagcaacacaaaccacagttggcaatgggagtaaggagatctgatgaactgaaagaacttggagccccagaaaactggcttcctttgttcagatacttccggtttaaaagaccacatcttgataagacgttcctcattatcatcgttgagctttgaagtcagcaggtttggtttgttttccaacactgtacgtagtctgtctttgccttttcaaagctgtgggggttatgccgggcgcggtggctcacgcctgtaatcccagcactttgagaggccaaggcgggcggatcacgaggtcaggatatcaagaccatcctggctaacacggtgaaaccccgtctctactaaaaatacaaaaaaaaaaaaaaaaaattagccgggcgtggtggcaggcacctgtagtcccagctacttgggaggctgaggcaggagaatcagttgagcccgggaggtggagcttgcagtgagctgagatcgcaccaatgcactccagcctgggcgacagagcaagactctgtctcaaaaaaaaaaaaaaaaaaaaaaaaaagctgtgggggttgggatgtggcaaattaaatccccatagctcactggacacgtcttcatatcacactctgtggatcacacaccatgcttccttgtgctggagtggctctttctgcttatctttaaagcagttttctcagccttggtgctattgacattttgggacagatacgttttttgtgaggggctatcccagcctatcataaagagcaagaatttccaccttactcaaatttccagagacaaagcctatctttttaaaattcttcatttagagcagtagttttcaagtaggagtgattttataccccagtggactttggcaatgtctggagacatttttggttgtcacaaaggtttgggtgagtgtgtgttactgacatctagtaagcagaggcaggtttgggtgagtgtgtgttactgatatctagtaagcagaggctaggaatgttgctgaatattccaccatgcacaagatagctccccacaacaaaaaattacctggcccaaaatgtctacagtgtcaaatttgagaaactgctttagaagaacatggtccatccctgccacccccttcagttttcaggtgtattgctgatggtcatacagcaagttagtagccctagttgggatcagagccctgagttgtcaacagtgtgccatgtcttgtgaccgtcatggtgggaaatgggcttctacaaaagacgaacttaagatgaggtctacagttcacagcagtctgcagatgcccacagttccttgctggggggcaggtttccagggaacgggagctagttgctgtttctgtattctcaaccagagaaatgtgggcaatacaagtgctccagaaagccagcaagaggagtttagtcagttgcccttggaagatgctcaccctggtgctgctgtagtttccatggaggctgggcatgagccaggcttcccaacaagacaggcatgtgagctggtgtaatggaaattcagaaggcacttgagctggggagcagaggaggtaggccagtgacatccactgagggacagcctgacagttactgggagaggctgtttgatgagctggagtcaggctccctggggttgaactctggctttctgcataacacgcagtgtgagcttgggtcagttactctacctgtctaggcctcagtttcttttccctataaaatgcaaagattgtttggataacactttaattgagtagttgtaagaatgaaagagaaagagggttaacaggtgtcaagctctgagaactgtgcctgacatatagtcaatgctttatgtattaagtattggtacttaacaatggttcaacttgatttttttttgacttcacaatggcacaaaagtgatacgcattcagtagaacctgtactttcagtatttatataaccattatgttttgcactttcagtacagtattcaataaattacatgagatattcaacactttattgtaaaataggctttgtgttcgatggtaggttaggtgtacgaaatgcatttttgacttactaatcgggacataacctcattgtaagtcggagcatctgtacatagggagagacacagtcttagatgtcccactgcaccgtccgcctggacaggagcaaaaagaggccctgctttaccctggataactcccaagagcttcttttagagtaagtggtttcaggtccatttgtgtctctgtgtgacgttggattgaatcagaggacagagaagtcagaaggatggaaagttcctgaagccagggaagaaggatgcgtccaccgtgcttctaaaaccttctctttcctgggcgtaggagatccatccttaagctcttcctctaaattgcttttcttctggtcctctacagaggtggctcccccattcgaggtctctgggatgcctgggacattagtgcacttcaggttgaagcatccttgcgatgtcgcaggagacacagttgtgctgaatgatcacagggttagttccagctccttttccctaacctctgtctccccggtaactaacccagagaagagcagaggcttcagagggcattgtggaggctgcttacttgggatttcatattcttctgctgtggagtttgtcagttaaatacttgctcactcatcctcacatctctcccagacctggctttccacaggggaaatcatttgcagtgccctgtgctgaagagtcacaggacccgccatgataggtttggccccaccgacccctggaatttcacagaagggaatggccattctcacattctttcggcagattgggtgaggttccctgggcatcctgggatttggcagtcagctctttgcccctcatatacagaccctgggctgttgagtgtgttccttcctgctgagcccagggtgccctgggttcttcacgaagcccagggggattctgcatgtgcaacccataccctccatcccacctcttgaacagccgttgccttatccacgtcaggagtcaggagtcttggccctgttcctgtgaacagagaatctcatttcccctaaaatgctgccctcttttaggggtggtcactcattttgtttgcagatggatctctaagcatttcccggacattctttcctgccttggttaaatcttatctcagcgttaaccaggagagtgagtcaggctctgagaaactggctctggaagcccttggggcccacccacctcctgcccactcagccttcctgcctttccaccatttctgccctggatgcttggaggtggtccatgttcttaaaaggcctttttcccaatcccttccttctggcatctccatattgtctgaaggaataaagccagatgaaccatctgacagctttaattagggttaaatgagggcattcgaaactgccacttttccttctttcccatttgagggacttcctcttcctgcttcctgtttcctcccaaacttttctgtctcagtcccctccatgaagtcctgtagcctcttcccatcagctctgtgtgtagtaactcaggccaccctcaagctgccctccaggtaggtcctgttattatctattattcaaatgaagagaccaggcacaaaataggatagtaccttgccccagggcaagccagaatccagacccaggcaatgtgactccagagccagtgcccttaacccccagcacaaagctgctgggacaactatgtttcagtttcacttatgtttcagtttcatggggttatgagtcaggtatcagctgggaagggacctttgggaccatgtagtctaaacaaacccttcattttacagttaaggaaaccagatgttgtgtactaagggaccagcccaagctcacataggataagccccagatctggaacccagtttcttgatccccatcatgtttttttaaaacacagtttgtgcagcatgaactcttatcattttaggtgtcagtttcccaagatcaaaggcaggatttacttagctgtatctagggggatgccctaattgtccaaactgggccgcttttgaaaatggaggaaagcactatcagtagttatgccatgaccacaggtgtaaactgagattgtcttgggtaagcagggaagtgtgggtaccttgcctgtggtgggtgtgatcttggggtggatggggcagactgggacagacccagaggtatttgatccagcaagtggaccgctggcagcagacaggagtggggagttcagatgccactgtggggcaagaggctcagaggcagattctggtccctggcctggggctgtcgaggggtaggcagagtctgacttctagggacctagcatcctaggcagggcagacaggtggactgggaggaaaccatgctgctgcggggatcccatgcagtgtgggcgccagcctgaagagcaaggcccgacacagagcacctggtcagtcgggagtagccagctcttccccttcaccaagttacttgtcaacttttctctttggtgttcccatagccccttgtgtataactataacaaaggtttcttgagcacctattatatcctagtattgagatagctgctgctatgactgcagagaggccatttatgctgggctatggagggtcagtgggagtttgttagacaaggggaggggacattttgggcagtgaggccaacacatacacatttctaaccatttcaagacaaacactcctcagattcacattgatgtatgtgatttaagtgattgtaaatccatattttattaatgtaaaggaaactgcctactgttctgcccttcctgtcagtttgtaattacttgttaatgtatctgtcttctgccaatagactcagccccttcctggcagaggctggtgtctcctttatcccagtatcctcagtgcccagccctggcacactcaacttggcactcagtcaatatctgttggcaggtgaactgtgccagggtcacatgcatctgggacataatccccctttgctctgctgctccgcagtcagaacagaatgtctgaggacaggaggaccctgggccgggtgtcccaaatgcccatctcctggaccctggacaggtgctgctgcctaaggtctgtctggctgtaacttgatgcagctgagactgagaactggaagaacaggaagccctgtgactcacaaccgctgcaacaggatcctggaggagtggcccgtatgcctccctggtcagctctgcgcttacccgctgcctcgggtttgtgagtctgcagtgtgtcagagctggcattggcctgaggtggcatggctgccctggcgaggacaagttccttgtcccatctgaagaagtggcataggagatctgagtttcggttcatgggctttcagaggacaggagacttacagaatccatgttctgctgtgtgtcttccccccggctcatctttttttcttttatcagaaacatctggccctgccctggcaactttgtagaataaacttgctgctctttgtacagcctcagccttcccaggaggagtctgtgagggcattattattaatgaggtcactgacagcagttgcttggctttcccagggtgggcacacctgtgccctaggttagggcactcggctggtcactggatgctatgggtcttcagggactaggcctgtgatttggggaggcttctccaagtcttggtttccttgtcagagagttgtggtaaaacactggcaaaggaataatgcaaaaatatgaaattcttttgaaattaagttgcaagcatgtgtcagcacagagtcactggaagtctttgtgtggccagatttaaatgatggatctctctttgtttggcctcttttgacctctttaatcttctttggctctttgactgtgtatagtgggtaaacttgggccaagtcagtgcaacctgcctttttttttccagcgtcttttgaattgaagtataatgcacatgggaaactgaaagcagcaggtaaccaccatccagatccagtaacagatcattacctgaaccagccccgtgttctcctacccaccaccaccatcaaatgtaatcactgtcctgactaacagcataggtctgtttttgtacttaatataaatagactcatacaggatataaaagatgccatttgtgtctggcatttttcagccagtgttttactgtattttgagattcatctatgtggttgcatgtagtggtaggtggtgcattcttgttgctgtatactatctcttgcaccactctggcttgtttttgtttttaagagacagggtcttgcactgttgcccaggctgagtgcagcagcgtgatcatggctcactacagccttgacctcctggcttcaaatgatcctcctcagccaaagtattaggattactggtgtgagccactgtgcccatcccaccaccctgttttgactgtggttgatttaaagcagacgaaagtagtcataataaggcccctgacttccagaaggtatggtcctttctaagtttctgtcaaaggggccaaataggagtgttgacctaatatatagatgacccgattgtatcttcaggacaagaacatgcatgttaagaaaggtgaagttcaatcagttggtcttctagggtctagaaactaaaaggtaggatttttagctgtggtcatctagggcacctggagagacggttctagataatcaattagaaatatcccaagactggggagacaaagttcagctgtgccacaggcatcctgcatcctttgctttgatgcttctatgcttgtggagtaactttcttatcctatgtgatcacttgaattcagccctctaccaggagggtgtgccctgcagacacaagtgatgaacatttgcttattcatgtattatgtattttctgcttgcttactaaaaggatttagtgatttggttcagctttcagtaaaaagatttctagaacgagagtcatcaaactggcgagatgattactgaaaaacttgacaggccaggtgtggtggctcatgcttgtaatcccagcactttgggaggccaagatggaaggattgcttaaggccaggagtttgagaccagtctggacaacgcagtgagactctgtctctacagaaaaaataaaattaaaaaaatcagctgggtacgagggtgcatacctatagtcttagctacttgggaggctgcagtggaaggatcatgagcccaggagtttaaggctgcagcctaggagtttgaggctgcagtgaaccatgattgcgtcattgcactccagcctgggcagccgagcaagactctgtctctaaagttaaacaaacttgacgaagctccaagcttcctgacagtcaaggcaaaaaggatagttagttctctttgagtcagtcgttttcatcccatcggcctataacaggtagcacagtgtgtctgggcagccagactttctcctgacactaacccttactggggactgaatggctagggaagcattagtgaaagacacagcagctttacctggtgcagtggtctttatagtctttcctgtgagcccttgattaaaagtgatagaactaaacctatgaagcatttcatggggagctaatgtaatgttgtgaaggtgaggagctttctgttcctggaattggtaatttcccagggtcttaggggcttgcccatgcctcctgagccttttcacactgctgtctctaggtaagcatttatctgctaaggtggctgagctccaaaagtatcccctttgattgccagtctctcaggccacttaaatctgtgacacttcccatgggctgccttgtattgtgcccgacattcttattagacaagactcatctctccacgcattctagagacactcattggtctataatatgagccagcttctttgatataaagtcctagagagcagggctgttgatttcttaaaatttttaagaattgtaataaaatattaatcacaaaatttaccattttaaccattttaagtgtacaatttagtggcattaagtgtgttattcacattgctgtgcaactaccaccactattcatttccagaattaatttcttgtaaaattatgtttctgtacactagtgctttgtatttaatagctgttccataaatgccataacatggaagatgctggggttgcaacagtagtcaggattcagggattgaatgatacggatcttacagacttagacattgaaatttaaggtttcgtttcgtctacacttcccttttaaaacccttgagtaccttactcaaggtaggatctgtagtacttcatataaaaactgtcaaaattggaatattgctgtcttctggatgtaaataatttgatcaaggccaggttcccacagggaccagatggggtgggctcaggatccaggcagtggcaccagtctttcagttgcattgggcctgcagaatgagatgggcgcttctgggccagaagggttgacattcatccaggtgatccagattctagtttcaactgtgtgacctgggtcgaggctgctccccgatgggcctggtttctctgagatccctttcttgcagtcacctccaggcctttccttcctgggcttccccatacctggccaggactgtgtatggcccaccctgcacactgcatacttcgaagtggagcctccatgaatgtccccttttgttctctccatttgttgctttgtgacagtgacacaatttcctctccttttttaagtgctggtctggaggaaaatgcaggtacttaaggggatgggtgttaatggcttcccattttgggtattatcttatttcctagagagtatggggttaatttgtctttagggcttcccctgacaccaaccccaattctgtagaggaagtgggcatgtcagactggtatgttatgggaaaaactgaaactgaccaaaattacccaatgaggaagctctgatctaacccttgctgaagaaatatcaactaacagtgctatctctgtctaacacgccctcgcttcctgggctggcagcttggcaggcagacgggaaggtaacccgttcttcagccaggctttgctctggcctgcctccgattccccagcctggaatgccccctcctcctttcctcctctcccagatagagatttaaagagaagcagccttgtccatgcccatcacagaaagagaaggaatagtttggggaaacagcctctgctttgtgactaaggagggttgagaaatgtctgtgattgcctgaaggtgaccctgggtggagagaagctttagaagaaagaaggggtggaaggaaagggggggtgatagagaactcttttgtccccacagttatgctaatgactctgtcatgtggggctattcatcctgttttgtggcaaggaagctggggttcagatgaagagtcctctaatgtcgcacacctgtacgaacgctaccactaggatttgcatactggtgtttctgatgccagagcactcctttcaccaccaccagctacaaatcaagggttgacctgaatgagtctgctttgatagtatccagaaacttacatctcttaaaaacaaatgcagagtttgtcttcccaactcccagcaggctggatcaacacaggattacttcacagggtcacacctggcctaatatcttaaccaccgactctcaaagattccaggcagaaaagtgatatgcagtgttgatcagaacagggccaaccacgatcacgttattggcatattggaaacctcccagaggagaggggaaggtgtttgagccccagccttagaggtgtcatttggttagtctggaatggatccttggaattcttactgttttctttaaaagctcctcatgtgattctgatgtgcagcaagtttggaaactcttatcacaagtgacagaatggagattaggcagaagtatcagaaagcagatttatctttgattgaggaaactctttgaaacaagtagagctgttcaaaaatggaatttagagaaatagcgagcctctcaggcttggaagtattcaaacctaggccacatgactatcaattgggtggagagagacaaactagataaattcgaatactatgtttagtgggattttcgaactagttaccctaagggcctttcctttctatggatgaatacttttcagctgcagtcccactgctgtgtgtacatctgctatcacctgcttggctttctcctttgactttgggcctggtgctccctcccactgatggcactgtgggtgaaagttggcaagattctgaaaattgcattcatctccttctcaatccaggaaaatcatctttgtatggtggctgcttcttgtttctgacttctgcttcccttggctaccaacacagcagtgcctaccagggctgggtgggctccactggtgtgtttaggaaactgtggcattaagtgattattaattatcccttcctgagtggccctaataagctgagtggacacatcatcatgccctggtgccatctgttctcaagttttgagagttcaaagagctctgatgtgaaagaggggaagtttgggccaagctactggcctggacatttttcactgtttcatatccacagctgtttcatatcttctctcttagtctcctcatgtgatggagaggaaaataaggtcccagggtcatccaagaaaccacagggcaggctgggagtgcccatccacactaagaggggcccacaggacaggcgagggtggctgtcctgacggcctggcagtggggccagacagacctctgtggaatcccatctctgcccctcattacccaagtgatctataaaacggaggtgcagaagttttacgaagacaatggagaacaggtcaggaaagccggaagtgcctgacaggtgagaaatgcttgaggaatgcttagccgctgtaaccatcaccccattactgttttcatctgtcattgaacatgtggaagatggttatctatggggcaaaaggcaacgtggataaagggtgactgtttaactcgattcttcaagggttgaggatgagaagtgtctgactggatttccaacatgtcttgaaacagtttaaacatcgaagataaactaagattggctgtcgtagaatttgcttttttgtgtgcataacctcatgcttctggacatgatgataggaccatttaatgaggtggaacaggctcagctcctcagtgcaggaactcctgtgccctttgcaaacacctgaagccttccatagagggtggaggtggggcgggggcaccaagaagcttctgggcctctcttctctttgggaaagtagtgaggtgagagtgtctttgtcaggtgtcaccctcatgacaatgttcagagacatgtctgctgccccagacctgctcagtcacctctgtgtgcctcactctccactgcgtgctgttcatgtctgcattgggaggtgactggaatagaagatggccttttaatggatatggacagcctgcattccctgcaatgctgtttgacctgtatagaccctgctgtatccaggcaggcagggggcagtcatctagcagagtggacaagagcacagaccagccaaacttctctatcaagccaaacgtggcccctcgtgtctgtgtgacttcccctctctgtagaatagagatgctggcacttcctacctcagagggctgttctaaggatgaaatgaactaatgggagcaaacccggagaataggatctggcacaaagcaggagccacgtgagggcttgccattattacagttgcccatgaggacatctcaggcttttcctggatgtggcctcgcattggcttctggtctgggtagccccagactttgcacattagccctgagatgtgaaagttgtaatgtagcattcctgggccagtcagtgtctcattggatctggagtgggaagcctccagggtggtcagagttacccttgaactagggtcactggagatggctagagatttgtctgacacttcactgaaaagaaaggggccttgtctagtgtcaggctgaagctgcaccctttttcctcctggggagcctcaaatgtccttgttggggaggcccaggcctcctcaggagcaccttggttcccagatattgtaggaaccagagatcagagacccagcttgtgggatggagggtggggggctagtgccccacagccctggaggttgtggtagattccaggagttggaaacaagctgggcaatatagcaagaccctgtctcaaaaataacaattaaaagattaaaaaaaaaaaacaacaaaaaacgagtgagagttatctgatgcttctcattctcctggtattaaatctgggaaaagttcatgtgaatttatgtgggaaacaggatcagtgaaagaactagggagagttgcctccgcatgagcacagaggctgcattatcatttacatagagcctctccattgtgccaggcaccgtgccagcctccaggtatgcaaaggtgaacaagcagacattgttctagcctttggtacttatgatttggaccctaataaatatttagttccaaattgtggatagtgttgcgaagggaaaagctcaagttcttagaataacagggaggcctggctgttgtgatctggaggatgagaagaggcctctacagagagaggcctgaaggagtggtagcagatcgtcagggcatgtacctggagggcctgtgtgtgtgagctccaaggcagggatgggcaagttggggaagttggggaactgaaccagggagagaatctacacaaagagtccagaccttaccataagattaggaggtggggccgggtgtggtggctcgctcctttaatcccagcactttgggaggccgaggcaggtggatagcttgagtccaggagtttgagaccagcctagacaacatggtgaaaccctgtctctgctaaaaatacaaaaattagctgggtgtggtggtgcaccgctgtaatcccagctactcgggaggctgaggcactagaattgcttgaacccgggaggcagaggttgcagtgagtcgagattgcgccactctactccagcctgggtgacagggtgagactcagcctcaaaacaacaacaacaacaacaacaacaacaacaacaacaacaacaacaaaattagccagacatggtggcacgtgcctgaaagtcccagctgctcaggaggctgaggtgggaggatcacctgaggctggctgagatctcatcactgcactccagcctggacaactggagcgataccctgtcaaaaaaaaaaaagataaaaagattaggaggtggctagaggcccgatcatgtggggccctgaaaggattttgagctttgttccaatggaaagccctgaaagccggggatcagcggagtctggctgggtgtggaaagtggatggaagaggtaaaagcggaactggggattgtaggcgtccgggaaaaaggtgatggctacctggcctagggtgaggggcaatgggattgctgtgactggccatgtcaggtgctgggggaacaagagatgagggtaatgaaccctggctccagtgatgttgtcacaggccttccgactcaaccattctgaaaagaactctcctctgtcctaataggcctttcctcaggtatgcaccagttctccaaaaattaggtctatttttataattttaattttttggttttttttttttaagacaaagtcctgtcaaatcggttcctactaatggtctttaataataactttctgtacataacagattttgttcttttgaagagctgagtggtgttccatgacgtacacctatgccataatttatttaaccagtggtttctgctcttgtcttcctcctttttcaggttgaccagtatctctaccacatgcgcctctctgatgagaccctcttggagatctctaagcggttccgcaaggagatggagaaagggcttggagccaccactcaccctactgcagcagtgaagatgctgcccacctttgtgaggtccactccagatgggacaggtactgcatctgggggatggctctagctgctgcgttactcaggggtgatttagttggctttgctcagggacccaaataactcaaaagcctcagaaaccaaccctggctaagggaagcatccagggaattgaatggaaggctgtgtgacggatggacaggaagcttgggaaaagctggcagtcctggcagttaagggagggcacctttgtcagccctactgtggcatcactgttggccatttgttttctacctgtgtgctgagaaaggctgcttggctcagtttggcattttatggtcccactgagattgcacgcagtgatggtgatgaactacaacaaacgtacctcacgtggccacaactgtaggccgtgggagccgctctgtggctcacctgtgcatgctctaactgggacgccggacgccgtgtaggcatgtgggagggacagtgtagtgcagattgacctagatttttttcttgagccccatgtaaaaagtactagaaatccaaatagacttggacaaagtatggagcgtcacagtgcatatatatatatttttttgagacagtttcactcttgttgcccaggctggcgtgcaatgatgcgatctcggctcaccgcaacctccgcctcctgggttcaagtgattctcctgcctcaccctctggagtagctgggattacaggcatgtgccaccaagcccggctaattttgtatttttagtagagatggggtttctcatgttggtcaggttggtctcgaactcctgacctcaggtgatccgcccgcttcagcctcccaaagtgctaggattacagctaccgcgcccgctgccacagtgcatattaaggaattaaaggctcagaagtcctgcaatacaaacctattaagctttgtttaatcatcttatttggatacagagtacttttttttgagatggagtctcgctctgtcacccaggctagagcgcagtggcgtgatctccattagccagaatggtctatatcttttgacctcgtacccgcccacctcggcctcccaaagtgctgggattacaggcgtggctaccgcacccagcccagaatccttattttatggtacaccacccagcaagtgatttaatcaggcaggggaaaaaggatcacggtggagattcaagttggaaaggtccagtggattagggctaggtcactgaaggccttgaatgcaagcctaaaacatttaatctctgcagtagcattggggagtaaatgcaaggttttgaggggtgtcttggtaatgttacatcattggcagtataggtagagtggagggggagcgaggcccagctggtagagcacaagacatggctctggtgggtgggcaaaaagagtattcaagggtggggcccggctgttgagcccagctgcctgggaatggcaacatcccagagaaggggaccgaacaaagttgtgtcagagcttttatttaatcctcataataggtgcctccattttagagatgaggtgcttgtgaggcccatgacgggtggtgggtggggggtaggtactcacatctagaggacaggagagagaacccaaggggcagctgccagggcagaggaagaaccaggaggcacagtgtccaagaatctaagggggacgagatctccaggaagctggcaggtcgctggtgaggcatctacaggggcgttgttgggaggggagtaggggcagggcgtgggtcagggcttgttaatgccacgcgcctgtgctgtttccagcacatgtgtgtccttgaggctcatctccctaagtgcctctagggacctggttcgtctgagactgtatcgttcccaaaataagtaagtgtttgctgaagccttgggacccagcctggacccagtgctgagggtatgaccttgcttaggattgtttcctgagtgtgtttcttggcccttcaaagagcccctcgaggtgaggggcctcttatctcttccatgtcctctagattggcatgtttacctaccactccctctgactggaaaccacacccacttctgagatttttatttgacattcagataaatgtacacactccggaaggccagggccttgtctttatttcacccagcactaacactaagtaagtaccctaaatcttttctaaatacatatgggctaaggactcttttgggcacctcaatgtattaactcatttacttttcaaaaacctttatggtaagtacaaattttatccacaatttttagatgaggaatttgaggttcaaatgtcaaacaagttgtccaaaatcctacagccagtgggaggccgagttaggaatcaagcttgtgtaagccaaagttcaggcatcggtactgcacgtgatgtgttatatgtgttcatgtatgtgttagcctgtgcacttggcgctggagcacactgcaaatgctcaactaaaatttttttggaacggagttgggactgattgtttggactgtattataggcaggtgaattaagtttgttggggagaactaattatggggcaagctttcaaaattctcattgctttcctgaagctggaggctccaagacctcccatgcaccttgaagcttgcactgtttgcagcacatactggaatgtcttactcactgaaacaaaggaagtggcccctggaataatggagaccagattgcaggaaacccacacctaatccctccctccgcatttgcagggggtccataggttagctcctcacctccatactctctgggactcagcctttgcttttgtaaagtaaagaggttggacctagcagttctagtctgttctgcacatctactagaactattgtgctagtctattcacacaaacacttctgagatcctgtaatgggagataaacccttggtgttcattggatggtgtcttagttcatttttgtgttgctgtaaagtgggacatatgtatatatgacaactcagcaattccacttccaactatatgccctgaacagactcctgtatgaatccaaggagacatggctgaataatgttcattacagtgttgcttaatcgcacctataatcccagctactcaggaggccgaggcagagagaatcaatcacctgaacctgggagatggaggttgcagtgagccgaagttgcgccactgcactccagcctgggtgacagcatgagactctgtctcaaaaaacaaacaaaaatagataaatttaaaaaaaataaagtggtcagcatcagggctctcaagttttgctttgtcagttgggggtatgagttatggaatatggcagtgaaaataggtgactcctaagttgatacagactatcaaaaatgaaaattctctattgtcagcaccccagtgaagtgctgcgaggaaaggccgaggtgaagttgtgttagcgattccccccatgtggtcgcacacagcctgggtgcctgccgctgctgctgggggtgaagctgcatccctctcccacagaaggctcgaggccttttctccaggggcacctgttcagtgccacctttctcagaacattcgtttctcagcccgttcatggctagtattcttttcaaacctgagaaaccaaaccccagatctagagggagccaatttttaaatccatagctttctaacttttctgggctatatcttcacagcaagaaacacatgcatataaatatttatatgaaaggaaataaatttggggaccagaatttattcttaaacatgatgaagttgggtttgtcttctattctttaagaaagttgctagtcagaacctgctaaatgtttttcactttgcagtttgaaagccactgccttaaatgatccttggcccagtttgattctagatgagcatttcctttcttgctggcacgaaatatgtagtttcaggacagtgtggggtgagaggtgagaatcagaattataggttcaaatgggtttgaattcaagctgtgtgcttcagagcgatttatgatgtgatcctctatttcctcatttgtgaaaaggggaaacttcagggggatcggttttctgagaattaagggagaatcagatatgtgactttctcacatgtgttacaaacactcctgcagccacaaaccaccactgcaaaaggcactctcattgccaaatttactaagaaaaggtgtgtaagactcccaggttttaattttggaagattggcatcaagggagcaggtgtgagggttcatccccatcaccaggggccctgcattttggagtgaagaccaggccccagctcttataccagctccaattatctaattgtaatcaaagtcctattagaaaatgtggagaaaccagaaagtttcaggccatttatttgtggtggaggcctccccatcacggcttatgggctcttgtgtgagaaggcagggaatgtcagtagccactgaaccccgtaggggtgaaatgttcaaggtaaatcgtgaagtacctgtgcttcataggttgtgtggcctacacagtgtgaagaaacacagttggcataattaaaagtgcaatagacataaacggtccaggaatgtcttactcaatgactgaatttggtgtcagccagaatacattaaaaatggtctctatttgtcgttttgcttctttcccaaacagttttaagaagttgaaagaattctatagtggtcatctatattttacttggtttgctttatcaaccccccaatccttctatccatcagtccagcttgttataattgatgcattacaaaacataaattgctgagaaagtatagtaaatactaatactgaactctagttactatgtatgctgaagttttagggttcagacgtatacttacatagtaactagagttcaatatttgctgtattttcttgtgatgtaagatctagatgaagtgaaataaatcttaagagtattatctgataaaaaaataaatagaaggccgggcatggtgtctcatgcctgcaatcccagcactttgggaggctgaggcgggcagatcacaaggtcaggagatcgagatcatcctggctaacacggtgaaaccctgtctctactaaaaatacaaaaaattagccaggcgtggtggcaggcggctgaagcaggaagaatggtgtgaacccgggaggcagagcattccagcctgggccacagagcgagactccatctcaaaaaaaaagagtattatctgatgaattgacaaatacacctgtttaatacaacctccatcagaaaagggaatgcttatacactgttggtgggaatgtaaataagtacatcctctatggaaaacagtatggagatttctcaaagaactaaaaatagaactgccattccatccagcaatctcactattgagtatctacccaaaggaaaagaaatcataccaaaaagatgcctgcacttgtatgtttatcacagcaccattcacaatagcaaagatgtggagtcgatgcccatcaatggacagatgattggataaagaaactgtggtatatatacataatagaatactgttcagtcttaaaatagaatgaaataatgtattttgcagcatcatggatggaactggaggctgttattttaagtgaaacagctccaaaacagacaaataccgcacgttttcacttataagtgggagctaaacagtgtgtccacatggacatagaaagtggaatgatagaccatggagacttggaagggtgagggtaggagggtggggggcatgagggtaggagggtggggggtggtgtggatgatgagaaattacttaacggatgtagtgggtgttggatacactaaaagccctcacttcaccattgtgcagtatatccatgtaacaaaattatgtttgcacctcataaatttaaacaactaaaaaaaacctccatcaagatacagaacattaccatcaccccagaaagttaccttgagccccttcccagtcaatccctgtacctgatccccccagaggcaatcacattctactattttccacatatgtgagttttgcctgttccagaacttcacatataaatcgactcacacagtatttgttttttatgcaagtctttttttatttgtcataatgtgggatttatctgtgttgtgtctatcagtgtctcgttccttttggctgctgattccatggtatgattagaatctgatatgaatattgatggacacccgggcagtttccagtttttggctatttgagtaaagctgctatgaacattattgcacaagcccttttgtggacacgtttttagttccttgtataaacaactaggagtggaattactgggtcattcatagaatttggtatatgtttaatttttagaaactgccagacatttcccccaaattgttgaaccatttatactcccactaataatgtatgagagctctgcctgctccatatcctcaatagcatttgttgtctgtatgtccttgtttctttttttcagtggagagttaattaaagaaagcattcatttgcgtttgctaggaaacacaccatcttgacctctctgtaggcagccctaatctgtgccacaaccctgcgtgtgactgtggtaccagccctaacgcagttctgtcaggggccccaccacacacataggggccacacataggggcctggctttcagaggacagttccattttaaaagggaatgcaggggtcgggcacggtggcttacgcctgtaatcctaacactttgggaggccaaggtgggtggatcacttgaggtcaggaccagcctggccaacatgttgaaaccccatctctactaaaaatataaaaaattagccggttgtggtggcatggacctgtaatcccagctactggggggctgagacacgagaatcgcttgaatctgggaggcagaggttgcagtgagctgagatcatgctgctgcactccagcctgggcgacagagtgagactccgaaaaaaaaaaaaagggaatgcaggaagaattgatagcatttaatgagcacccatggtgtctgtactaggccatttacataaatctgttttactctccacaaaaactttacaagagagtcattctcactttaaaaatgaggcaaccaaggctaaaaaaggattgatggctgccaaggtcacctgtgggcagatggtgacagttgggatgtaagcatagatagtcctgactccacggccataagattcacagtttacattggcttgtactgctgaaccaaagtttctagggaaaatcagatgattatctttttaaatggatcctaaatacgagttggctttgtatcattccaataagaagctcaagtacaacccaactgaaaatgtgccagccgcatgttctaacttagaaatgaagtaactgtggtgcctttatcacccttgtcttggcaagatcgtttggttataactatgccttatgagacagagtgagggtaaggcagtgtcagatcgatcatttgactcttcttcacctcggaattgtgaattatgttcacaggtaagtatacctccatcctctagccagacttaaaccctctagagagcagggaaccatgatgctgatggtgacggtgatgatgatgatgataaaaattgtagacatcgttagtgccaggtactgtgctgaacgctgtgtttgagctatctcatcatttcttacagtcatccagtggtaggtacgctgaacttcactttacagaaaaaggcaatagatttggagcaattaggcaacttgcccaaagtcacagtgagcaagtggcagcattgggattggaacttggccagccaaattgctaatgcctgggcttttaagcacaccaccagtggcacattggtgctgtgctgctagcacaatgtgtggattcttctcttactaacctaggcctagctgttcagctcattcaacagtcctctccgaggcttggtcctctgtgcagcagcagtgtgctaagctgcctcgtgccctttaaagagtgaaagttgtgctggggagataaggcccatgtagacaaaacaattagagatatcgggccatataatgcaagcacatgatgtgataaagggagaccgggctggtgatacgttgcatggaagctggttaaacctgaaggaagcccttatcttggttgctctgcattatattaacaactgtacagcggagacatacatccagagctagcacacagcaagttaattggggtacttacgtagtccaggcgatataaattgaagattgtactgatagatagcctcagtacagcagatggcacttacattgtcaggcgttgtgccaaacgccttacacttccttgcactgaatcttgacaaggtgcgtgtgtgtatgtgtgcgtgtatatgtgtgtgttttcctgtgttcttgttctgggttgtggagggaggtgctgactagaaggaggttatcgttacccttttaaaacagatgatgaaatctgagtgtcagatttctaataaattgcccaaagccacatggctaatgcatgttagagtgggatttgaacccaggtctgcctgcctaaaaagctgaacatgctcagagcttacacaatattgaaacataatcatgttttaaccctttgaagagtggtttcacatctgtggggctaattacacctctctgtgactggcacgtattttgagcttaagaaacacttcctgggtaaaaagagcaccagagtggtgcattccaagaggtgtcctaggagctttagggtgccagtcatgtgttttacgtgttccacacccctcccttcagttggagcagctctgtttttctctattttacgttgtggcatttggcccaccaattttatttggaaataagcattctgttgcttaaaatggtttgaaaacaaatgatgtagaagatcagatcactccattcctagtctgtaccagacaccagcgttaactgtgattcagtgcctttaatgacacggagtattgaatacttctgtatggctgagctcttgaatggtggccggcattgcattgtaatggagtaattggaatcctggggtttaaaaagaggctgccaggtgtggtagtgatcatggcgattccgggtacatggaaaatacgtgccttgagacctgtgtcttgctacattacctgcttaggacttggagatgtatcttttcggtcctcgtttcatttggagtatatgccatacattctcagagcagtccactgttgtgtgctagcaggtgcttgaaaactaaaggaaaaaaacaagatcccctcaacccagagtcaccccatagaggatgattggaatgttcagtgcagttacctggggccactggaaatgatattgtagggcagaaagggcaggtccctttaggggcattaagttataaatatagggctggttcaggaactgaatgtgaaagtatgcgtttgtgactttgacccacctccaagtttacggctgcatgcctcaggcattgagtgacaaggaagagccagaggctctaaggttggatcaaatacagtccagtgttctgatttgcctgagcctctcccagttttggcattgaaagtcccatgtcataggaaacccctccatcctgggcaaactgggatggttggccaccctacatggccctggagctcatgccctcactgctgctcagctcaactgtggcagcagcccttgagctgcttccttgtgctatcccagccctccacagtgccactagagccactagagcccttttggaaacagatctgaccttcttaagaacgaaagaaagtccttggcaatggtatttgctgtgcgtttatagccatgtcacgtgagccctatgttgtagctactctggacatgccattttttggcacccacaaattaatgccaacttatagttataccaaacctctgtcctgccttactggacaccagagcatgccacaaacctccatggccttgacagggagaaagggaacaagtaccttgataggatctattaacggaggaataatttactgtgtttcttctttgttgttgttgtcatttgtttgttttttttttgagacagagtctggctctattgcccaggctggggtacagtggcgagatctcagttcactgcaacctccacttcctgggttctagtgattctcttgcctcagcctcccaagtaactgggattacagggctacgccaccatgcccggcaaatttttgtattattagtagagacagggtttcaccatgttgaccaggctggtctcaaactccagacctcaagtaatctgcccgccttggcctcccaaagtgctgggaatacaagcatgagccaccacacccagcctgtgtgtttctatatgttcacatacaacatagtccatgtttcacgtaagcatcacaaccgctgggagatgtcagcattatgaatcctgttctacaggtgaggtgacatgctcagagagccctgtgatgtgcccacaccacacaggtagtgaagctgctgagctggaattcaaaatgaggcctgcctacctgtctaaggtccagtgcctaaccactgctctggcatgggcacgtaaccatgcgtgggcgttacgagagggcccgtctcaggattgccgagtcacagtgctaggcctgcctcagattccggacttggaaggaatgcagtcattggctatggtggttgtggcttcctatgtgtgtggaggagggctgcagggaggaggggtgtcagggaatgtgtgttccagaggagtcctgtaagcaaagcaagagaggacctccttcctgggaacaggttcatcagcaatactttattatttgtgttttcccttcagtccatcagaaaatcctgcacaccacccgttcttggtggagctgtggcctctgagtccagctgggctggcctcggatgatgacccaccaggggcagcctcgccacctcggtcccctgtggtcactgattcagcggatcgcgtgtatcctggacttgagagtgctgatgaggcatttcatctttgatatccctttcatccctcatgacagccaccacgttgtgtttcctagaatttggctgagttcccactaccagggaaggctcagagctggagtgtctggaaaagccacccatggccatgaggcaggcaggctaaccccagatgagggcgatgttgctgtagctagcccgcagctgtagctagtggtggggccacctctagtcactgggcaggaaatggaaaattagtgcccctaaggaggaatgctgccgtcactggagccaattccagtgacttttcttggacaggtttctgcaatcccttctgctttcgttggcctggaagagtcaagtgaggctgtgggacagggtctgcctagagcccggagagagagtacctagtacttactgagtgtgtcctgagttcttggtcctgcaccacacttgtgtgtctaatttttcccctcacagcaacccaatgagatgcaatgttcccattttagagatgaagcagctgaggctcagaggctcaggaacttgcctctgctaaatagtggccggggttctggagcaggtgatgtgggctccagagccagtctccgtgtgtcacatcgcctgacacacttctggttgtgtggtctctggtggatgatgtctaccgttttccctcttgggaccctagggactgtgggtggtgttctcagggagctggtcagatgtgacttttctcagggcctaagtgctggaggtgctgagtgcacctgggtgtaaaacaaacattcttgggttattgagtcagagcatctccctgacctctgacccattccgcttcacttcagtgctgttctcccaccaggaaaggggttgagtgttgacaaacatgccaataagtgaaccccccaggaaattgccttgtatccttgtatcctttgagaaggttgtggcagggcagcagaagactggcggtgctgctcgcagttggggcagtcacctgcggatgcgccttgcctgctccgccagcccctgccctgctgcaggttccgcgcctcttcagcactttcattctgtgccacacaatggggcccttccccatagtcggtggtattatcacccaggatctggatgtttcctgtctacactgctgtttcctggagggtaggaactgcaccttcccagtgacacatgacagtcttcacccatctgtgtctgtggctcctttctggagtctcactcatcctctttcctgctcccccacagcttttctgttgcttcagtggcctgactcttgtcgtacatacatgctctggggtcagcattctcttgcattctgataagcctgagatcctttgagggggcacctgcttgccttattcaccaggcctcaatgtgttggtcctcattccactccatcacatgacccctctggtcttgctgcaggacatggccctcataatatgcaaacattagaaagtaaatttagtactgcaattgcaatatgcaaacataatatgcaaacattagaaagtaaatttaataccgtgcttgcaatttggtgttctgggggtatgaggaacaggatggaggcatgcacccctggcatggggcttgctgaaagcactgaggaggtagtcggctctcaggagggggtgagcacatcgttggatgcgaaactgtcttatattgttgattgaattataaaagtaatgtatatgcgacagaatactacttagccataaaaaggaacaaattaatggcattcgtagcaacctggatgggattggagaccattattctaagtgaagtaactctggaatggaaaaccaaacatcatatgttctcactcataattgggaactaagctatgaggatgcaaaagcataagaataatacaattgactttggagactcagaggaaaggatgggaagggagtgagggattaaaaaaaaaacagccctgtgagtttccagttttaataaagctctgagaattaaaaaaataataatgtaaaggtgtatagcatgaaattagactatatgtaatgtctgtagaggagtgaatcccactggccgccccttacccacagatattcctggagggacttggagttttaagtctcggttggttcctggaagaattttgcccaaaattaatagtggcccttcctttctctgcagaacacggagagttcctggctctggatcttggagggaccaacttccgtgtgctttgggtgaaagtaacggacaatgggctccagaaggtggagatggagaatcagatctatgccatccctgaggacatcatgcgaggcagtggcacccaggtatgacccttctctcagggcagcccctggtgacaaaaaacttccttggcatgttctttctgtactttctccagccgctcccagcgtgtggataggcagtcacccaagacactcatggatgccagcacagctgtaagggctccctctcagccggagctcaggctgttctggttgtattttatacccaacatgtatactcagtattaaaaggagtgactagagaagaagcatgaaatccaagtaagacgctgttcagtgttgtcacatctcgggcctcagggcttggaagaggtcaagccctctgattcgtggtcggctgttccctctcccacacaaggctccctcctgggaaaggaatttctgaccatgagtagaacacgctggggagatatttttagactcattatttgtctttggggtggccttgaggtaaacctgctttccttgttatcatgctggggttggagaagggaggctgcatccctagggctgtgggcatttgagctttaccgaagttgtcacgtggctccagtataacgtcaggagggacacagagggtagcggcccttccactgccactcctatgcctgcaccaagctgaggtattaaagagattgggtcctgtattcaggcactctagctgtgtgattctgggcaagtgatagacctcagtttattcatctgtaaaaagggatgatagtgtacggattgtggtgtagattagaggagatgatacctgttaagtatttggcatagtgctggtgcataatctagtactcttcgtgtttttttcacaggggtttttgtctgtttatctaattgcttcttgtgctgtcactttctgtggctagtaattgcattgttccctgttgtgggggatgtggttgccttttcttcccgttgcctcgatctcctgccttgggccacatcccccagatgataaatgtttaagaaccaagtaaactagataagacaaaacaaaacaaacaaaataacatctaaagtttggctgtgattatgtaaaagacttgtaacgtgatggtgacttgttaggtggatttttaagttttacaagaacaacaccctccctgttgcttgtatcctgacaacatgcaggggccaggcaccttgcagtccctgcagcgtcatccctagagcctggcaaggacaatgaagtgcgtctctgccaattgagaaaaaaaatccattttaaacattcaagatgtgagtgaagttcttcttgaaaaaagcttaaaattgctcagaccacctagttagagggtatcaagaaaacctactctccatgcaatatataagaaaaacagtatagtccggattaaaaaaaaaaacaactatgagacccaccttgaagagcattaaaactgttgagatattagaaagattttaagtaagtgaaaaatgctatttaaaaatgaaaaggaaagaaagctagaagaaaatataggtatctttgatcctaaggaataggaagactgctgtgtacctaaaagcagcagaaaacacttggaaaaaaggctgaaaggaagttcattgtggctattttagtggtggaattactggtgctatttttcccatattttcccccttttttggtacttggtatcagtattttacttaaaggaaaacaaatggattgtaaatatacactttggttaagaacaaatcttggaatcccaaacttgcaaaggtttttgaagaattgtgaacctgggcaatgggggtccttcggtaaagtctgtcttccggcacattaacttctcctgaagagcagtggattgcaaacctgaatggcagccactttaagattttaaacgtatatctcgtggaaagggaagtgagcagattttcagaccagtaaggaaaaggaaaccattttaacttcataaaatgatgccctttgagcctttttatgacaggaacgtgttagctctttctctgcatcttacccatagatcctcctcaaagagaacgagattgtcttccaattcaaggaagcagaaggtctcctcttcccacttgagaaaagatgtaggttctttgaacccagccctagccagtggaacttcttgcagcaatggaactgtctcctatcttccctgtgcaatatgataggcactgaccctgtggcatcgagcccttgaagtgtggctggtgtgacggaggaactgaatttttaaggtcttttttcttttcttttcttttttttttttttttttgagacagtctcactctgtcacccaagcgtgacacccaagagtgcggtggcaccatcccggctctctgcaatttctgccccccaggttcaagcgattctccttcctcagcctcccgagtagctgggactacaggtgtgcaccaccaggcccggctaattttttgaatttttagtagagacagctaattttttgaatcaccatgttggctttgagcttctgacctcaagtgatctgcccgtcttcgcctcccgaagtgctgggattacaggcaggagccactgcgccggcctgttttaaaaattctaattaattgacatagccacagatggccagtggctactatattgggcagggcagtatttaatgcttcttcacggtctatttttctctaccttcctatgttaggagcgcaactggaaagaaagcagtgatcagagctgggggaggagaaaccattttgcttttcccccttctaacccccacctccagtctttgatgattggccttatctctttgcacaacttctgcatctccctttttttttttttttttttttgggataaaaactatttgtactaaagatcattttgactagagtgccaggaagaaggtgctgggaatttgtttaatatacgtatcatataattcatctctagtcaccttcccgacagaacagaatttgctgaatatatccctattttcatgttaaaatacttgaactctgttcaagggagttggctcacctgcactggtgatccccatggcaagagagccttgtcctccccagcctttgctcttgaaaatgttttggtttggaggtcgaaggttcagcctcagctgttgttaactttgcatgggatcagacagagggacagacagaatggatgtgggaagtttagttagatctggccatcttccagattggggtggccttgtcttcctgggtccctcctgctgaccataccctaggcatcaggagatccaacaggtctgtcagtttccctctcccaacctctcagttcctttataaatgtaaaaactttctgtggtttggcatagtggttctcaacctactgctccaggatcacctggagggcggaaggcttgctaacagatggctgggccccacccccagagtttctgctatagtcggtctgtgggggcgggcctagaccctagaatgtacatttctaacatgttcccaggttaagggagtgaggttgctgttccaggagcacactttgaaaagccatggtttagtcgaatcttcttgcaccttcctggataggaaaaggatagttgacctcttatccaccttggcttttagattttgccacgtagtcaacctggcccttggaatctgcccagcctctttggcctctgcttactttttacacctgaatgcctctagtctcagccttcacctaaagggtcagcagcttctctttgagcgtgtagggtggggcaagaaggacgccaggggattgtgggctttggggctgattgaaagcctggcttattatgaatacagcttttttaaggcttaggagctctgggtcctgcacagtgagtgcgtgcggtcacggttgtgaggctgctcacccacaaaatgtgatttatttctcagcgctcttcatggacttactggatgttctgtttagaaagttagaaaacaaagataacttctttgaattgccctcaggagattagttttctagaatggagaaaaaaatataaaaattacttgtttttgttaagttggttcatagaatgccaacagagaatgctgtccctgcaaaccaccccccaccccatcaccagagacagggatactaaaatacttcttggcagcaagatgggctggcctttggtatgatcgtcaactgggcttccatgtcaatgggtttctgacagggccaccaaagaatgttctgttccccgggcatgaagtgactttctgattaatgttggccatgatttcccctacctcacagggttatcttgacagcagtttagaaaaatggcttaagtagaggacaatatttagtgggcaaaaactaatgttaagcctttatgtattgactcatgtactccttttcataactccatgaggacaggtccagttataattccctttttgtaggtgagcaaatgaagatatcagaggagatatgggttttgcacacattcagctagttacgtgctgagcctgaagtgcatgcccttaatctctatgctgttcgacctctctgctcaccaccctgtgtcatgtatccttagctgtttgaccacattgccgaatgcctggctaacttcatggataagctacaaatcaaagacaagaagctcccactgggttttaccttctcgttcccctgccaccagactaaactagacgaggtaagatgggctcctcagacacttgttgcttcactcttggggctgggagggctgagagggacttctgagccacctgctgtggtggtggtggtagcactggaggattgtggagatgaagttctgcctttctgggtgactgtgtatgtcgatgggggggctggtgaagaaatctggggggttgggagtgccctttatcaccctctctcccacacacattgcacagtatccttatcccctccacagaaacaggaatgagaaatcaggaactccccagtctaaagtgttatgataaagacccttggaagaaagatacttggagagttaatgatgtaaggacacaagtacagtcatgtattgcataacaatggggatatgttctgagaaatgctttattaggtgatttcacttatgtataaacatcatagagtgcacttacacaaacctagatggtatagactactacacacctaggctgtatgggacagcctgttaactcctaggccacaaatctgtatagcatgttactgtactgaatgctataggcaattgtaacacagtgatatctgtgtatctaactaggcaataggaacttttcagctctattataatcttgttaccaccgcagtatacacaatctgtcactgactgaaacattgttatgcggcacatgactgtgtcttatagtgccagttgtcctgagtttctttttcctaggctagccaggaagtaacacacaaattcaatcatgactttaccccagtggcagaggtctctgctaatgacggaggtttgaggggtgtggtgtgagtttcagttttagtgggaaatcaatattcacttcttggtccctttccagagtttcctggtctcatggaccaagggattcaagtccagtggagtggaaggcagagacgttgtggctctgatccggaaggccatccagaggagaggggtgagtggggtggcaggagcttggggtctgtgggcttttctgggtccaccctgaagactccctgagtgtccttgactcatcattgtttgcttacgtggagcttaaggagagttctcttttccctgacacatgtactcaataattttgtatgcgatctgctgctttgggggtttttagattatcaaatggataaataatcttagccttggcacaagaaaagctctttagttcttaacctgaagaagacttgaatgtgatttccaagtaagaaagttggaatgatgttgacatgggagtggaatggctcagagagagaatgaattaaaagtcttatcacaggaggagttatggggagggaggggggagagagagagaaggaggaggaggaggaggaggagtgatatatagctggtgttaggaaagtcgccctctgtgatgatgaaggtcagagccctcccatttgtctccacaggactttgatatcgacattgtggctgtggtgaatgacacagttgggaccatgatgacctgtggttatgatgaccacaactgtgagattggtctcattgtgggtgagtgaacaccgtgcatgaagggcccgtgctggccaagggatgggggtgtgggctggaaagggagaaggggcccatgggctgggtgttcctttgtagttcatattagaagataatggtccagtcactttggagagccgagcagggactcatggagttgggggtggcagaagattagaccatgtattgtgatgcccccagagtctgcagtgagaaatcccagccatcctggccgggcagtctcgggacagtagtataagagggaagaggggtgggaaggggccggagcaggcgtgtgcatagccgtcccttgttttggcaggcacgggcagcaacgcctgctacatggaagagatgcgccacatcgacatggtggaaggcgatgaggggcggatgtgtatcaatatggagtggggggccttcggggacgatggctcgctcaacgacattcgcactgagtttgaccaggagattgacatgggctcactgaacccgggaaagcaactgtgagtaggcccttcctgtgcgagtgggcttggcgggggcctggagctgagtctggggctggtcggggccagggggttgtttctttacagtcttacatccccaaagcttgccaaggtggccactggtcataggaatgtctgtgactataaattgctgagaggatctaaaacagagagcaagcggatataccagattatagctaataatgtgtttccttcacaggagtcattttggaaggttctattctgagtgtaagtgggtggccctgctctttctttccaccttctatttgtaaattgtccatgggaactgtgagccacctaaggaaagttgtgttgaggtggccaagattggggtctctgaaagctcctttcatagctccaactccatcaccacccagaggacaggctgacagctggctgctcattgctgctccctggggtcccagggcctcctgctgcagctgcaggcagacccatggcccctggagacattggctgaggagcttccttggcctccttcacttggaccttggcccaactatgtcctgggatggattggaggaggggcgtctagcattttggatcctgaatattgtattctccagcctggcctgcctttgtttttagttgcttttatctcttacaaaaccttatttcaccctcacaaacatttgccaaatgtgcgtgtgaaagatcttgaaacagggattgcttcaaggtctgaagcagttgcaaaatattttgagcaatacagatcatctctggtcttgtgactgttgtagaaaagcttttcgtgcagatctctacttggacaggaaaattgaaccctataaatcaagtcagtggtgggtaacccaggagagtccttgctttcgtttttttttttttttttttgagacagagtctctctctgttgcccaggctggtgtgcaatggcgcaatcttggctcaccgcaatctctgcctcccgggttcaagcgattctcctacctcagcttcctgagtagctgggattacaggcgcctgccaccacgcccagctaatttttgtatttttattagagacagggtttcaccatgctggccagactggtctcgaactcccgacctcaggcggtccgccctcctcggcctcccaaagtgctgggattacaggcgtgagccaccgcgcccggcctgagagtccttgctttgtcaaagcatggtttatttatctaagtcacaagcttgtttcacatgttgaaatgagtcctttacttgaaatttctgaggatcatactggttgtgtctgccatggctgatgagaggtttatgagctgaaaagtcactcagtgcctgcctccatgaatgaggcacacccaagtcattccgaggaactaaaggccctttcaaatgtcaaaagacaaatttgccagccagaccatgacagcacacccccggcttatcctttgacacccaccaaattgtcatccatggtagccctgaagtcactacagacaatttttgtcccctctaatatatttccaagtaagtatcttccaaatgttgactggaacaaagtgtttttaaaaactagaataaaaacttagcaacacggagttccttactgttgaagccaggctcccatccacgctggtttccttctcctgaagctctgcctgtgtgggtgcactaacatttaaaatgcgcgctgtcatcttcacaattttgccagctctcagttagccctgatgctgctgtactcggccttgggtcttgagcaggctgcttcctggaggcctgggtttcctctcggaaaggtaaccttggaatcccttccacatctcagtcctgggcctcctcctcgctggggctcatcctagttagtggcagcaggcccatgtgcctcctctaagacacaggttctttctcaaacacccagaaatgggccttttgtcaaaaagaattatcaccagggcttggtttcctctcagttctagtcagaaagaccaattatgaaagaaaacagtgccacctagtgttaaaattaaatcaccggaccgcactgctggtttgggggccgtcccctgcctttctaaaacatcttgtcacctgcctgcttagaagcctgtttcactcccagacccctgagacctgtcatttagagctcggagcccagtgcagattcctctatcccaacctgcctttataatgttgccccatcatcccctgccccaggtggttttcacaccattttctctggagcccatgaacggcttgcaggggtggacagtatgagctgatgagtttctaggcctgtgctacatatctaatcagatcgccttttttctcttgtaaataaatattgggctatgtaagatattaattttaaaaatgatttcctggctagagaagaattttaaagattaccaccctacgcataactttacctaaaatacaggctgttccagaatgttccatactccctgtgtgtttcatttggctgcttaagtttcatttattcttctccataggtcaaggcccatcagcctgcagggacaacccaagccagcccctctgagccgtcacctctccacgtatcttactcctgggccgtgctgcacacattaacccttagttgtgaagttgcacgtgtgcgcatcttgcttcaacagggaagctatgagtacatgggcagtggggactttatgtttttggtttgtgtcttccggcaggtttgagaagatgatcagtgggatgtacatgggggagctggtgaggcttatcctggtgaagatggccaaggaggagctgctctttggggggaagctcagcccagagcttctcaacaccggtcgctttgagaccaaagacatctcagacattgaagggtgagcttctggccagccccctctatttgctggatcaccacacgagttgacgggtagttggggaatgaggagggggctgtaccttttgactcttcaagtatagactgcaagagggtctcacatgacgtggaccatggcgggcctgtggcttcacttcacttaccagtctccactcttgtcgatttcgattgtgattgctaccagtgactcatggtactgggaacggtggttggcctccatatgcagggacttgggctgttgcactgggtttaaagctggaggaccccagagggcccccgaaagacttagctgcatctgcctccttttccttctcctgaagctctgacatctgattccctattggcaattctcaaaaaggactctgtcatgacccctgcttcataatagaaagctaggtctttgaattggccagagatatagctacccaattaattctaataagcagagctggggcctgcattttcacagcccagcaggggcaagagtgaggatggcttgatttttgttgttgttaacaatatcccaagagtcaggcgggcctcgtttactgttcttgagatttccacttgtagattgaagaagtcctggtgtttcagggaccagatggtggagaggaggtgtctttggagccaaatggagcagtggaacagtgccaatgactttgttttaaggggaaactcttgaaggaatggggcctacttgttgctataccccaaggtgatgcaagtaccccaaggtgatgcaagatttagttcccttgagaagggtgctaaggttatagcactagccccttaccaaccatctttagacacaagctaaagcagtgccaagtccatggtgaaatgcaatagactcctactgctttagagagagaaaccaggtgggcatcaccgcagggttcacatgttgagagtggctgacagcagagacactgtctctgtctcccctaacacaagcagatgtaacacaaactctcacacacacaacttggtggtaaagcaccaagaacagggccttgtttttacatagcacatgcataagaaatacttgtgtttctcaactccgtgtgtctctgtgtgtgtgtgtgtgtgtgtgtgtgcgcacgcacatgcgtgtgcgtgtgtgtgtggtgtctgggagaggagcctcagggtggctgtgctatattttgcacccccttcctcctcctcctgcccctgcacaggtggactaagcaatgaagagggattctgtccccactgggtggtgaatttgctggaactaaagggcttccttgccaccccccgacacacacactggccacagtgggtcagacacaggcccacatgctgtctttctgtttcccagggagaaggatggcatccggaaggcccgtgaggtcctgatgcggttgggcctggacccgactcaggaggactgcgtggccactcaccggatctgccagatcgtgtccacacgctccgccagcctgtgcgcagccaccctggccgccgtgctgcagcgcatcaaggagaacaaaggcgaggagcggctgcgctctactattggggtcgacggttccgtctacaagaaacacccccagtgagtcagtgtgcagggcctggagatgcggagttcctggagtacctggggctgagtgactcctcatgccagctccattttgcatttcaggggtggtgtggagggaccatagagctgagggtcttggtggaatgaaagttcccacctgggcaagggggaatgggaggaagtcatatctggtgtgggtggaggtgatttctgaaggctactgatgactcgggctctccgcagagctcctctggctgctggacactctctttgccaccctcttgtatgcgttattgttcctgtctttactcttagaattcttggtgattcctgcaggtgctatgtcctctgccagggaccaccccagcccagtgagggttaccagcttctctggctgaccttggtattaaattgatcctgccctgtccacattttgatccctcaggtcataggtaccagaatattcacatgtcagctgagacctggaagatgtctctttattgtgcctacttatttccccatcattttcacctaataagaatgccaggtcaatgtgcctttgttttcttaacttgtcggtgcaggaggcctcagccctgagattccctcttcctacccagtgttgcaaaaactcgagtgtgcacgtgaatcacatggggatcttgctaagaggcagattctgatcagaaggtctggggtgagtctgagatcccgcatctctaacagcccccagtaggctgcagcctactcctgcacttggagtaggaaggccctggagaccatggctccaagtggccactacccagagagttcctggctgaacacgttgtctttagctgtgcagacacctttgggatcattggcagaaactggcaaaagagaggctaaagtccagaagagcatctctagcttttaattttgggtctttcccagacagcagctagtgaaatgagtgatagaacaagacagataggtggcatcagaaccacctaataccacagggctgctccatcaaagaggctgatggtaccatgttgggcaagggagcagtggccagggggccttcttcagtgaggaagaggaggtcttgtgtggctgcatgtaggggacagtggcttattaaaaggtcttttcctttcattggcgggggtgaaccaatcctgggtggtcatagttgatatggttcttgtagtggttcctaacttgggacagtggagagaggatgtttagggcagcacccactcctgcaggtgccttttggcatttggattaaggcggtgggcaactgtctaactatttgcaccattgaccctaaccatggacacctgtctcttacccgccctggggaactgcagttttgccaagcgtctacataagaccgtgcggcggctggtgcccggctgcgatgtccgcttcctccgctccgaggatggcagtggcaaaggtgcagccatggtgacagcagtggcttaccggctggccgatcaacaccgtgcccgccagaagacattagagcatctgcagctgagccatgaccagctgctggaggtcaagaggaggatgaaggtagaaatggagcgaggtctgagcaaggagactcatgccagtgcccccgtcaagatgctgcccacctacgtgtgtgctaccccggacggcacaggtacacggcagggttgccacctggctcacatggtgggcctttgtcctggtgttgataccctgggagggatcccttagcattagcattggacatttgaaccagaacacgtttcttcagccgtattactagggagttctagtctttgataaactcaaacaaggtgctcctctgcaaacagtagtaatggtcaacacttattgaatgcttactgtgtgtcaaagcactttatgtgtatgagctcatttaatctttgttaactgttaaaaaatattagcagttaattttatgtattcacctatgtttgacagaaaactgaggcgcagagaagttaagacacctgcctaaattcacacaactagaaaatgtcggagctgggattcaaacccaggaattcaggttctagaatctgctcttgcaatcaccacattggtctgagtcagggttggcaaactatggcccatgggctgaatctggcccaccacctgtttttgtacataaggttttattattacacagccatgcccatgcgtctgcacgttgcttatggttgttttgcactgtcttggcaaagttgagtggtggcagcaaagactgcatgacccacagggcctaaaacgtttgctgtctgggcctttacagaaaaagatttctgacccctgctgtaagtcttgtaacctcagaaatggtggtcttattccaattcagagaagacagtcgatgagcaggccagtgtagcacagttgttacaggttccagagacagactgggatttggtccctgctctaccctgtcctggtcgtatggccccgggcaagtgatttaactatcagccagatcccaatcatccttaagagaggaatgcagtgtctccctcacagggctgcctaagggttgaacgaggactgtgtgtgaagcatgtggcacactgtaattgtccaacaagggagggttttctcagtttaaaagatttcccttcagcttccttcagggagctggactcttctgttccttctgtattctagaatgtaatataaagtggcatttgatggaacaggaatggtgtatttggatcgttttaagtgtactgtctccacattccccatgttctgccccaacttatcacttccctgggcttattttccagagaaaggggacttcttggccttggaccttggaggaacaaatttccgggtcctgctggtccgtgttcggaatgggaagtggggtggagtggagatgcacaacaagatctacgccatcccgcaggaggtcatgcacggcaccggggacgaggtgagcagggcggcgccttcaggagggggcccctggtggacgtcacctcttgccttcgaggacagtgctttctctgctcatctgtgaccctggggagggctagctggacccagggctgcagcctggtcttgactcaggtttgtgcctgagcctgcatttcttctgggtggaaagaaacattgatgttgtgcgcaggccctactgggggcagcctgccctgcccagggcccctccctcagtgtcctaacttctccctgcagctctttgaccacattgtccagtgcatcgcggacttcctcgagtacatgggcatgaagggcgtgtccctgcctctgggttttaccttctccttcccctgccagcagaacagcctggacgaggtaacagcaccttcctggagggctctcctgtgggctttattgactctaaacaaaaccagccaggtatggagcaggggagaaagttgagctaagactaaggaaaggagggcgtgagttaccagtagtggggaggggctccttgatgggaatgagtaagttgaggctggtggaggttaagtaggttagctcagctgtgacagcctttgggacaacgatgatgatgctactcaatgttaacaactgccgggtgtggtgactcatacctgtaatctcagcactttgggaggctgaggcaggaggattacttgaggccaggatttcaagactagcctaggcaacataggaagacccccatctctattgaacttatatatatatatatagcatttttaagcacttactgtgtgccaggtactatgttaggtttcttacctgcattatctcgtttaaccctcacagcaaccatataagagatatgtttgaatacccattctacagaaaggaagataagccccacagaggtgctgggtgtcttgctccaggtcataatagcttgggactggccaagccaagatttggattctgggttcctgatgcctgagcctgtgctgtcagttatgctgtggggctcctgaggcccttgttatgggctcagggcattttcatgccatatcctgttgtttggatgccctggctcttctctggtctcatcttgcttctcactcctcttcaggttaccttgggtgaatgaagtaggtgcatgaggatctggcactcccagatgttctggacatgagtgccccgagaagtggaggagaactgagtaggcagtgctggatctgctgatgactggtagccctaagcattaggtatctggagactgtttttaagcagttgtgtctctgtctcagtcatgtaggagtgcacgtgcacgctgccggtgtgtggtatgttgcacatgccactgctaggtataaaaggcatggctcctacctttagatgcttacaaacaagctgggctgatgaagcaagctcagaaaaggaagagctgctgtttggaatgtggccctcgtgggatggatactgaagcccccaggacaggtagtgagacagatgttaatccgagtgcatacctgggggatgtcaggaggacttggaacaagtcagaagaatgagttgatgggaaagaaaggtgagcaggctgcccattgtggagagggtcatgtaggtgggagcaagtgacagaaagagctgggccagcgcagaagagcctaccctagtgacaaggaaagagcagcatttcccacagggtccctgcaacagtggccctcaccttggcttcactgagttttgtagatgcctccttctcctccttatctgagagaattccccatgtgcactagtataattaaggttttaggaagttctgcaataaaaactcagcttagtctggcatttctcaacacctattaacattcatgtagtgttaaccagactagcgttgctttatgcctcatgtggacaaattcttatgtactatttaatggaccattacttattataacaaagatattagaaacaaacttgctgaatagtgagatagtagttaaataaattatgacccacttattagctagtatcagccactagttatttgtaataaattttaatcacatgaaaaattactggtggtatgactaaaaagttttaaaactacttttctttagaaatggtaacctctttataaaaaaacataaaatacaattaacgggatgataaaagcataaccctccagtgtatatgcttcttctagacttcctaccaaaatattttcaagtagatactatcttaacttttcatgccaacaggttatatatttatttatatatttgccagggaaaccagaatgtgtgttaactgtttctgtctgaattgtgagattccaggccattggattaggttttattctgtgttccaggtttctctgaggagcacgtgttaggtctagagccgtaaaaattaagagcaaataaagcagaagtcatttcttcctgtgggctctggcaagatcctcctgtgatggggaaatcccaccagtgcagaggcccctggggttagaggccccagggctctgtggcccccagctgtgtttcccagctgttgggcctccacttgcctcatcagtaaggatcacctgaaattatgttatttgaacatcccgtaaacacaaacttgcgtcaaacatgtgaagctaacttgtagagagctgggtggagatcagcacacactggtcagccagctctctgagggtatgtgctttgtttttctgaatctcctggggtctgaacacagtgtgacacctccaggttgatgtgaatgaaatgccaagctgatgggcatgaatccctgagcaaggcctggagaaatcatgcaagtgggtgggttatgagcacacagctcatttatggaagccgagctcttgggtaaggagtctgaagccctgaggcttgtttcctggtgggctgtggcagcagagagggcatcagggaataaaacccaaagcatttctcccaggttcaaagccgtcaagcatctgctcccagaggaccacattgaaggcaaggggccactgaggatgctgaggaggagcctggagttgttttcctcactgaaagacatggggtggtggtgaagcctagctgtcacccagctgtgggcaaagcacttgttcgccagatgctggagtttgaaaattaggagacatacactgacccttctgatgtaaaggatagggacagagcaaactgctttgcccagtgagcgaaccaagcacataggaagaagttgcacagcagggtcagctgcgtggtgcttatgagcccattcactggggtcggagggcctcggagtgcatcctgcttctctcttccaagctgtaggccttgagcaagtcactccagagcctcagtttcttataaagtggccataaacatgatagatgttccacaagggtgctgtgagggttaaataatgtaatgcatgatctatgcttagcccagtacctgctacacagtaggtgctcaataaatccaagtaagtaccttaggaacagtttaatttgcgggtgagatgattggtgactctgggggatccgtctgacctgtgaggttgagagctagaagcacagctggacccccagaactgacctgggagctcttccctgatgtcctttccatgcttgtgtgtgatttttagagcatcctcctcaagtggacaaaaggcttcaaggcatctggctgcgagggcgaggacgtggtgaccctgctgaaggaagcgatccaccggcgagaggtaggagacacatggcacgaggtctgatgtgtcagctcctcaatgattggcctggtctgtgtgttcagaaagtgaaggcaacagtaagtgtggctgcatgggttgggaggaagattaactcaagcgtcgttcagcagtttagtgtgcactgtgtgtcaagcaatgctctcagcactggcggttcaggagtgaccacaacaaagctttgttctataaagtccatgacctagtggcaggtgctgttaagagctgtgaaacacacacacacacacacacacacacacacacacacacacagtaaaggaataaaagaatggccactccataagcaaaacagccatgagggctgctggttgcacatttttatggttatttcttgattatatgctaaacaaggggtgtattattcatgccttccctttttagaccatatagagtttaaaaaaaaaaaagaaagaaaaggagtgaagtggggtgaggagagcagatggagcaagtgtgctggaaaggggcactgttaaatagcacaacttgggagggtctcaccaaagaggtgacatttaagcacagacctgaatggaatgagagggtcagccatggtgtatgatatatattttatatacctgtaaatctcccatgcaattgtctgaaaggagaatattggggttcacctgtgaactgggcatctgcttcttccctctcaggagtttgacctggatgtggttgctgtggtgaacgacacagtcggaactatgatgacctgtggctttgaagaccctcactgtgaagttggcctcattgttggtaaggacccagactgtcctttccacatggggatgcacagccttgggtgtggaggggttggtgctgagtgaggccctggtatcctgtgattggcaggcacgggcagcaatgcctgctacatggaggagatgcgcaacgtggaactggtggaaggagaagaggggcggatgtgtgtgaacatggaatggggggccttcggggacaatggatgcctagatgacttccgcacagaatttgatgtggctgtggatgagctttcactcaacccgggcaagcagaggtaggcacccaactggggccctgttaagtgtatcccaggactggatggcaacaagtgatcagagcttccacaatggcatctcccaggacgccggttctcgtgagatgttaataaaggaggttttcttggaaagggtttcttgtcgaatgcacctggaaagttctgagttagtaaatgtaagaagcatctcccacccaaaagcctaggagaacaggtgggagaatactagaccctaggtctggcactctaaggagaaacaagtagaaagttgaagcacctgctgctgacaggctgaagagcatctcttgggtgatgcagacaggagcaaatcctctccctcctccatcttccagcgccgagcaccacctactgtcagaattgagcaaggggccagccccagtgtcacaaggtcctgtgcatggtaggggagcggggtctgagctaagagacaatagcttaagatctaacacacttctcattaagatgttgtctgtagtgtttcctaactagattaatcaaacaccctagtcctgcagaatacgctttgcaaaacatgtgtctagaatagaagttacagactaaaatgcctctaggggccaggcaggcaacattaatgaaggaagcaggctgggtcaagataagatggggtggtgatgggctattggttgaaactagggacctcgtttttttttcaaggcaggattcaggaccaaaagaccctcaagccactgcataataacgtttagttccagtggccaggatgggggccctacagctggcagtagttacttgagtaatgatggttaggtccaagagaatgtatactgaatgcctagtgaggttaaagattaagactcagcattctcccctgctccgagaagtccagtggggttatggtgtgttccttctcgagttgcttcttgaaatttcgaaataagccttggaaaggaaatgagttcctttccctgtgggttcctttccaaggcttatttccccaggagccccacgggcctcgggcactgtggtcagtgttgctgaaggttgtgaattagcatgcaaagacaccagggatcctgcccaagtgaatcaagtagcaattcctttcccatcaggggagtctgcctgtctgccactgctgatgcactgggggtgactaagctggcctgtcctgtctcaacacatccctccaccttcctacttaacctccatgaatgttacttgcattgcaggttcgagaaaatgatcagtggaatgtacctgggtgagattgtccgtaacattctcatcgatttcaccaagcgtggactactcttccgaggccgcatctcagagcggctcaagacaaggggcatctttgaaaccaagttcttgtctcagattgagaggtgagagcttagggctcagggtagcaggggggccatgtccttttttctcactggcagacaaactgaaggatttccataactcagggcatgactcatacaaaagtcagtttagtggcaaacacattcatgtctatagtgtttactaaaagcacattatgggcagttgtcattttaagggcaaacagagcattctcatgaaagtttgtgctaagcctggcctgaggtcatgcaaagtgatattgttgggttttagaccatgtatcaaaggtagaaagatacctgctcatagcatgtaaattgaaacgcacagaggaagataacctattaaagcatccacacttggcttgaaagcccttcctaactgctggctgcagtaatcaggcagccaggattgagtaaaggttggaacgtcaggcaatgcagacacatgccacacagtggctcattagagcaaagcctccctcctacagtcaaatggtggaaaatctccaaattagaacagtgaatttcagagccctttaaaaattaatgctgtgccattactctcagggcagagaagaacaggaactagacaactgatgtgagtagacccctcgggcatctgcaccagtgaatagaaagatatattctagcttataggtctgttatgttcagcgaggtgattccaggcttctaaaatagctttctttatataggagggtttattttctttctataactttatttacacttccttcgtaaatagcatataaatacagttcagaccacccagagcagcagagcagaaataaagcacgagtctaatgctgcttggttagttcctgccctgcaaacccatgaacagcagcgagaaaatggacatgaaagagctttgtaactgaccactgtgataaacagtgaatttgctttgttttgagtatctactttgtagtagtaatggtctatctggagtagggagagtagaatgaggagctgtttgtattcctgtcaccgtcaggaagagtcaatgcagtgcagtaggttgagcagtggtctgaatttaggaatgggaaccacctcgaggggccagctcctggagagctagacccccacagagcctcccctgtaaggactcaggccctggtgtggtaggctaccagccttcttggtgcatgactgaacacttgctgtctccctcccaccccagtgactgcctggccctgctgcaagtccgagccatcctgcaacacttagggcttgagagcacctgtgacgacagcatcattgttaaggaggtgtgcactgtggtggcccggcgggcagcccagctctgtggcgcaggcatggccgctgtggtggacaggatacgagaaaaccgtgggctggacgctctcaaagtgacagtgggtgtggatgggaccctctacaagctacatcctcagtgagtgcctgatcccagccctccctgcctaccttctttctgtctttgttctttcccttttctttctctctttcctttgttactttatagtgaattatcagccattccaaatagtgtatataatacatggattatagtttaaagattcataatcagaagtaggcctgtgtttcaccccccaccgtgggaagccccctccgagcccctccacaactgtgtcatcattctcccatgccaggggtaagtgttgtgctgaatcagtcccttgcttttcttttccacccccatatatgtaggtatgcatccatattgtttagttttacttatttttgaacttgccacaaatagaatcacatggtatctcttctgtggctggcttttctcacacagtgtttgttttgagacgcatccgcattgaagtatacagttggtagttcattaattttcagagctgtatagcgtacctttgagtatgttgttttttctatcgttgaggtgatatttaggttacttctagattttgaccattacaaacagtgctactgtgaacattctggcaaatgtaatgctagaactctggagcaagattttttttcaacattctagagcaggggttgacaggcaacagccacaggctgttattgtacatatagtttcatgaggattgggagggggcagaagcccagccaccaaccctgggacatggcatcctcagctttgtagatggggagggtgtcctgaccctgctgtattggggcagatcacaactctctctttctctggtccatataggaaggatctgtgatcactgtgatatcctagcagtgactctgtaagtctgcttcttttgcctccgatgacattttggagcacatgtggctctgatatgaggctatgcgccaggaaaatagaaaatcacattcatgagtcctggtcctggtctccccctccagagttgtgctcctctgttaggcacacttgtggcttccatggttgttgaacttctcttttactgactattagttttaagaacacagtttgccaggatctcagacgtttgtcccagaattgaatcctagctctcctaatggctgatatgatgtggaaattgggcatagtactagtgtctccaagccacggttttctggtacttaataatatatagtaaatgtttaatacattatagctgtcatccttctcctcttcttaattatttctgtgtttccagcatcgcttcttagctttcatttctaagtgcaaatacaaaccaatcatgactaagatggtttttcctgtgtcttcctcccaccttttccagctttgccaaagtcatgcatgagacagtgaaggacctggctccgaaatgtgatgtgtctttcctgcagtcagaggatggcagcgggaagggggcggcgctcatcactgctgtggcctgccgcatccgtgaggctggacagcgatagaacccctgaaatcggaagggacttcctctttctctccttcttccctgttttaaattataagatgtcatccccttgtgtcagagacagaccccttggcttttgcttggcagagaggaccccactggactgggttttgtctctgcatctcattgtagagcttggtggctgagcttggccctattaagataaatagagttccaaataaggatttgttcacatgcatcataaccattcccattggttctcctaaaacatgaaaatgatctcccttagtaatcccccttgccaaattccatgtccctgtataattctacaggatggggacactaatgaagatacggttgcttcaccttggagcctgaacatgacatttctaagtggggtgcatcccccagcactgatgttgttactgattctcctgtcagagatctgggaggtctccactgaggatgtgagcctgattatcctataggcagacgtggggagggtggaggggtgacagtggaggaaaatccatggatatccacgcagcagcccctctttaacctcatctacaagcatttgccctgtggattccagcatttgccattcctggaatcaaggaatcctgagtctgggcaatgaaaccaaagccaggagttgacgcatcctgcagttgggccagctgttgcatctcagcggggcgcacatgttatccacaagcaatggacctttggggaagggggagtttttagtttgttttacaaatttttcctgcaaaagtggaatcactgtattttcattttaacttatatttgaaattttatttagttcttgaagtagatctgcttcttcatcttgacatgtaatgaatggtcagttgtacgtaatgtatttatatgttaatttgttatgtatatagatgtgcaagtcttgtcagaattggcctcagtgtagttaaagggcagaaggggaagatactgactagtcatagaaatacctcattcgcctgtgggaagagaagggaagcctcttcagggtgagtgaatggcaaagcggttgcttctggctcctccttcccctgtggtcttggaagtgtgtggaaggcagggacagagatggaggccgagccaatagactgaagagaccacagcaattggctcctccatctagagattttcttggcagtattccatgggatgttaagcaaaggaaaccaaaggaatcgtttcaaatggactcatggcttagaaatctttattcttagggcagtcagtagtattctaaagctttctgacaagataaaggaagtcaccaaaatttctttttttaaattgtatctaatcctcaacaacaaaccaaaacagaacaattaaacagccaaataaaacctcagggacaacatttttggtgtatttgagccctcccagcaagtttcaccttgggtttgtattttaaatgttttacaagaattgtccatgtgcttccctaggctgagctggcattggtctgctgacctgtttttgtgtttttcttttttttatacacaacatttatttcaaactattgggagggatgagagtggcttaaaaacttccatccctacttttcaagagtgcagttgattctgaatctgaaagcccgcctctgtcctaaaatacaaacaagcacagacattaaacctggatactatatgataaagagggatgtaactattgaattggatacaaggatcagaatggaaagaaactcacgatgaaattgaacctggtttttgtatatttatcaaacttgtgctgagaatagtgtctgattatacgacttttaagcaaagttgggtgtaattaggtgaaaacagcccaggtcctcccgggagcacagaggggctaggggctggtccttctcgtttgctctagtcttgctttgctgtctggtgtagctcctctgctgctcccatctgcactaattgacccaaaacgtgggtatttcctgctacacaaaagccaaaaggtttcatgtagattttagttcactaaagggtgcccacaaaatagagattaattttaacttaaattttaagcttgaagattaggtactatctgtgaagttacacttttttttttttttttaaaggtagagatgtgtgtgtgtgtaggtattaaagatgtgttgttggtttccaaaaaggaacactggaaaataaattttgaatgtttatgttctcagaatcaggttgacagtcccttgctgacatggctttgctttgtgtaaatacagtggatctcaatcttcggggtgtgatgaatagcgaatcatctcaaatccttgagcactcagtctagtgaagatgttgtcattatgtacaatacataactagtttaattaactatgtgatgttaactattattaataaattttaacattttccaaaataatcaaatgtgattcatgagtgtttttaagagagtagtcatcttccggtcgtatcagtacttcctggccagcccgatgagtaatttatgggtgtcttgattttgagtgtgtgtgtttgagaggcatgtggcttttccagaaactcagtcccagtggaattagaaggcagcttttcctggactgccttggaccccttagatttcaagccactgaagagctatggctagtcctgcagtctactgtttaaatagcttggctgaaattagcaccaccctgagggcctctggctggtcttggttggcaaatgtgattcatattcaggatatatagctctcgtgaacatccaaaaagcacttgcctctgtcctctccctaccaagcttttccttctccccagtaagcagaacacaggtctggggagtaaattcatcaaaagtccctagtgatacccattaacattcacatggccctgtttgacaataaccgagggaagaagatgaccatggctaagaggataatggagatagccaatgggtgagggaaagtttaaaattagaccctattttttctgatatcaaactggtgagattatgggagcattctcctacactgttggtggaagtatgattgg

SEQ ID NO: 25153 - DNA, 10429 bp, Homo Sapiens
agctgaacctgccctcatccctccaggctcgggtgcgtcctcgctgtgggcgccttgtggccttcagctccggtgtcgagaatccccatggggtgtgggccgtgactcggggacggcgctgtgccctggcactgtggcacacgtgggcacctgagcacagggagcaggtaaggagcggggtaggaagggatgtggttctcctggtgcgtgaagggtgggcaaggagcccccgagaaggctcacagtcggtgagggtcaggggctgagctgacccagggaaggtgggtgcagggaatgggccacactctcctccccaaccccaggagtggatagaagccaaagaactgctgcaggagtcacaggaggaggaggaagaggaagaggaagaaatgcccagcaaagacccttccccagagccccctagccgcaggcaccagagggtccaagacaagactggaagggcacctcgggttcgggaggagctgtgagtggctgagccagctccttgaggatgtggccacttgacttgtggaaggccatcttgatgccaggacgcacaggaagcccctgtgtgacatcaggagcagaacagcaagctctctgtccctgcacccccaccatcttggggacctacaagggcctggactcagaggacagtgcacaggctagcctggagctcaccaggcctggggagctgggacggggccccgctgccggacctgcagccctggacagatggggaacactgtgcctccctgaacggaaatggcaggggaggaggctgatgctttaaatgaagaggatggtggggttgggaggtataaccctgctcctctctcccagtctgtgcaataaaggtcgtgaagatctctcagccaggggccagtcgagtgtatcacagattctgtgatggctggaggtgggggtggctctggctggcctgggaggagacaggtgtctttgggcctcccagaggcggggcgcctggagcctgtgatttgtcagggaaatctcagccacctgctcccctcatgcaaatgacccaagcccctggcagctgctccttaggcctccaagtgtaagccctgtcttccctctctgagctttgctgagacttagggccgcctgctttctctctgacccctgctttcacagcctcgagagggcaaggagggggccagaccccagcctgggagcagcgtgcgggccttccctccacttgaaatccgttgcccgcccacaataggggcagacctgtccatccttctctgtgggtcccctgtacctttctcccccaacaggatcagacccagaggcagctggttggggtttgtcgagaagaaggattatccagatcagtcctttctaatctcagctcctgcctgtaccctcccatactcaccaaaccctcttccccaccaccctgagctgaggagcacagtttgaggtactgacaatggggccatctatcacccttatatcccacctcctggcctggttgctaagtggccctgactgccaagatcatcaccatggatgggggccgggaccaggggggccactggagctgtagttgtctgctcctttgcacccctcccaaaccccaacccttaatcctcacagctttgctctaatcctgtggggcctgatgctcttatctctgcctgcagagactgaccagggaagcaccccttcaccccctcctctctcagggcttgtggtgggggctgcccctctctatggccccacactcctgcccccaaccctcctcccggctgggcccaagtctctctggaatccgtacacctccctccctccccccaccccttccccccacccctgccagctgatttcatttgcctgacgttgtggttggctctacccttccctgtcaggcccccccaacccccccgccggtcggggccaggccaggccaggccagctcctctggcagcagagcctgggcaggtgacgggcgggcgcgggcgtcgcagctgagggagtaaggaggctcccaggaaccggagctggaaacccggccgaggtccagccagagcccaagtaagagggagctggcctgggctctgctctcctgggctggggcgcaggcagggctctcaggcaggctggggctggacgcaaaggacctcaaacttggagggcctagctggggagagggtgcagccacccagtcgtttccctgtgtcttggagtctggtgtgggcacgaagggcagaagcacagcctggtggggggttcctcaacaccgaccccatgttcctggcaggagccagagtgacccctcgacctgtcagccatgggggagatggagcaactgcgtcaggaagcggagcagctcaagaagcagattgcagtaactccagagccctacccctggggccccagaaaacagctggggacatgaggagcgtggcccagggggagggggctgggtttgctcttgagtgactagaagtgaccagggactttctaaacttggttcgcatatttgagacccccaagccccagagccccaagaccaacctgccctgaaggcccatgcacctgccacccccacctcgcccttgctcccctgatgtctgctttccctgcaggatgccaggaaagcctgtgctgacgttactctggcagaggtaagaccccctgtcccccggaaggcagggcatggggggaggggaagggagctccccgacccgcaatagcgcgttgctccgagcattagtacagcacgtccttggagtgaggaaacccattaattaattcattcgaccaacattttagcgggacctgctctgagccaggcaccatattggatgcgaaagatgcggacacggttcctattctcatccgtagaacaagagtgaccacagccccctcccagggccttgaagatgaagaagcgatagtactttgtaaattataaagcccttgtagactctagctgctagttttctatgctgtattttgtcaattctaagatgcacatttcttcacattttgacatctctgaaatcaaggtgcattcagcaatggatcattgtttcaattagaattgacagcatcttttctttcttagtgatgcatcttagattggattaaatatgttaatagtgaacactttttatgagccagatactgggctaagctgcataaatacctgatttcattgaattttcatgatatctctgtaaggtaggtgctatgataagcctcattttacaccttgagtaaacagactcagggaggtgaagcaacttgcccaagataacaaagcaggccgggcgcagtggttcacgcctgtaatcccagccctttgggagactgacgtgaaaggatcacttgagctcaggagtttgagaccagcctgggcaacatagtgagatctcttcttaatataaaaaaaattgcttttaactttttaaaaaaagatagcaatgcaagtgatggcaaatcaagtctgttcactctggacccccagcctaagtctaaaatgtggttagagctcaaggggcatagtaccacagatttcaggaggtacagttcagggtcatggtgatgccccaggcacccagttaaaaagctagccgtgctgcagcggtgggtgcaagcaggctcctctcggcttgggagagccagctctgtgcatctcttcccaaatctgtttccaatgacctcacattggcagctggaaactggtcaaagtgcaagtattcgtatcgtggaaatcaccttcccaccttcctcaccaacactggagaggtgcttgttaaacacttacaagcaacacacctctggccatgcatgcatctctttcccacatcagtctaagacactccagggcagagacttatttctctaaggctgggggcctgacctagagcctggcacagagcgggaacttgtatagatcagtggcagtgacagacatctgggcacgtaacctgctcaccctgatattcagtgcccctctctctgcagctggtgtctggcctagaggtggtgggacgagtccagatgcggacgcggcggacgttaaggggacacctggccaagatttacgccatgcactgggccactgattctaagtgaggcttgggggggaaccgagaatgggagggtgagagcgggagtgaggaaggcgggaaggggaggcttgcatgatatgggatgccctctccccaggctgctggtaagtgcctcgcaagatgggaagctgatcgtgtgggacagctacaccaccaacaaggtaccagccctgcctccctgagcctccaccactgcatccttcctaagggcgccatgcctaccctcctgtgcccagctgggagcttggctccggtcccatctctgctcaaaccaccctccctgcaggtgcacgccatcccactgcgctcctcctgggtcatgacctgtgcctatgccccatcagggaactttgtggcatgtggggggctggacaacatgtgttccatctacaacctcaaatcccgtgagggcaatgtcaaggtcagccgggagctttctgctcacacaggtgagggagagaccctctcctcccctcctgaggggttcagggaaccctgggcttccagtgggctgtggctctgcagccagggcactgtccttctaaccgcctccaggttatctctcctgctgccgcttcctggatgacaacaatattgtgaccagctcgggggacaccacgtggtgaggctgaacattgctggtgctggggcttgggagtgggcccggcctttctctaacagtctccctccattttggcagtgccttgtgggacattgagactgggcagcagaagactgtatttgtgggacacacgggtgactgcatgagcctggctgtgtctcctgacttcaatctcttcatttcgggggcctgtgatgccagtgccaagctctgggatgtgcgagaggggacctgccgtcagactttcactggccacgagtcggacatcaacgccatctgtgtgagtgcaccccccaccccagcttcactccaactccttccccgacactccccacaacacatacaatacacatcctctgcccctcccatagcttccctagccctttcttactgtcttttttttttttttttttttttttttgagacagagtctcactttgtcgcccaggctggagtgcagtggtgcaatcttggctcactgcaacctctgcctcctgggttggagcaattctcctgcttcagcctcctgagtagctgggattacaggtgtgcgccaccatgcccggctaatttttgtatttttagtagagatggggttttgccatgttggccaggctggtcttgaactcttgacctgaggtgatcctcccacctcagcttcccagagtgcagtgctgggattacagatgtgagccactgtgcccagtcttccctagccctttctttctttcctttttttggagacagagtctcacactgttgcccagtctggatgcagtggtgctatcatagctcaccgcagtctcaacctccagggttcaaccaatcctcccaccacagcctcctgagtagctgggactacagatgcgtgtgaccacgcttggctaatgttttgatttttgtgtagagatgggttcccactatgttgcccaggctgagctggaacttctgagctcaagcgatcctcctgcctcagtctcccaaaatattgggattacaggcatgagccaccacgcctagcccattttatcacgtttgctttatcattttttctctgtagagaaatagccatagatacacacacacatacacacttagatgtagatatacattttctttctgtgtcttttgaaagtaggttgcagacatcatgtttctttaccccttaagtacttcccgaaacaaagcccttctgtagcataatcactgtatgattcttaagatcaggaaactcaacattgacacaatactacagtctacagtctatattcaaatttcaccaatagcctcaaaaatgtccataatagctcatgtttttttctgtccaggatccaatccagaaacgtgcattacctttcctcgccatatctttttcgtcaccacctttaaactggaactgttttcccacctttgtcttttatgtcattgacgtttttgaagagtacaaaccagttttctgtagactctccctccgtttgagcttatctgacatttgctcgccgtgagatccaggccttgcatttgtactggaccctgttcttacacaccctgatccagcccacttgtgtagtctgggagtctgggacaacctccgtccgcccttctagccgggtcactgcaggcaagccttggtgctcttgcctgcgacgtggaaatgatgcctgcctgcagcgctgtatagtgcagagcgggcgaggggcatagggaagtcactggcacgtggtatgtgttggcagggctgcttctcaccccaaaccaaggaagggacaggcagggaggctgagagcagcggcttgccctggagctgtcaggtgggaggcagagggcgggagaggctgtgggctgcccaggtctgatccctgacccacttgccacccgtgccctcagttcttccccaatggagaggccatctgcacgggctcggatgacgcttcctgccgcttgtttgacctgcgggcagaccaggagctgatctgcttctcccacgagagcatcatctgcggcatcacgtctgtggccttctccctcagtggccgcctactattcgctggctacgacgacttcaactgcaatgtctgggactccatgaagtctgagcgtgtgggtaagggccagccctggctgctgcttcctcagctggaaggaccctccccagccctccctccccattctgtaccccccatcagctcccatttcggactctcttactgctgtcccttgtcactgggtgactccacccctggaatccagtaccccttggttcccaactaggactgttttccctcagtgttgctctaagcagcctctctccactgcccaatgccatgactgctccctgccctaggagatctgtggaccatgactgtccagtcagttctgggttcctggcatttcaggggcacccactgagaggcaagacagcctcagggaaacatggaatcaaggcagaatcaaggagatctggagtggcccgagggccctgactgcagcctagggctcatctaagactagcctgaagttggtcagataggatggcttcttctctatcaagaggccaggtgctgatgaaaataacactggccaggggcagaatccaaatcctaattctgttgctcactttctgagtgtccttgcacaagtcactcctccatgggcctcagtttcttcatctggaagcaaagaaataggatgaacggttgccttctcttttccagcacctgtcaaggtgccctcgggttttttcatagtacacagatgcttccagcctttctctgtctgatcccagccctcccccaaccaaagctcttgacagagaaccccctgccctacagctaatcctctttcagtctcttagccttcttcaggggttgagcccagtctaccgagtctaggatccctgcatgcatgtgctcaagcacacatgcacacacacacgtacacacacccacacatgcatacacatgcacacatatccccccacacacccacatacacacacacacccacacacacacccacacatacacttacacgcatgcacacactgctttccaaatcagcttggagagacaggctgactcctttccctcttcctcaggcatcctctctggccacgataacagggtgagctgcctgggagtcacagctgacgggatggctgtggccacaggttcctgggacagcttcctcaaaatctggaactgaggaggctggagaaagggaagtggaaggcagtgaacacactcagcagccccctgcccgaccccatctcattcaggtgttctcttctatattccgggtgccattcccactaagctttctcctttgagggcagtggggagcatgggactgtgcctttgggaggcagcatcagggacacaggggcaaagaactgccccatctcctcccatggccttccctccccacagtcctcacagcctctcccttaatgagcaaggacaacctgcccctccccagccctttgcaggcccagcagacttgagtctgaggccccaggccctaggattcctcccccagagccactacctttgtccaggcctgggtggtatagggcgtttggccctgtgactatggctctggcaccactagggtcctggccctcttcttattcatgctttctcctttttctacctttttttctctcctaagacacctgcaataaagtgtagcaccctggtacatctgtgatgtttgccttctactctcttctgttccaaaaagacccaggtcccatttaagggcagtaatgtgttacaggtgctgtgataaaggctgggtactggatagcttgtgggcttatgggaggaggcctgagatgggtcagggggagaaggtattcagcaggtggctgggggactgtgtgcagcagttcgctatggcctgcctgtggtgcccatgtgtttgtacgggagggttagcttgagaaggaatcagattataaaaggtcttgaatgtcaagccagagagtccagactttttcctaagggcaatgagaagccattgaggagttctgagcagagtagtaacatgatcagttatgcttctcagaaagattgctccagatctttcagaaagaagcagtgtaggttgatgaaagggagggactggcactggggaaacaaggtaggaggcaggtggcaagaaatgcaagagcgacaggacagaggggttagggagagggattaggaagagattaaagatgtggaatcagctggaacagtggctcatgcctgtaatcgcagagccttggaaggctgaggcagaaggatctcttgaggtctggagtttgagacaagcctgagcaacatagtaagaccctgtatctacaaaaaaaattaaaaattacctgggcaggctgggcatggtggctcatgcctgtaatcccagcacttcaggaggctgaggcaggcagatcacttgagcctaggagtttgaaaccagcctgggcaatatggcaagacctcatctctataaaaaaaatacaaaaattagccaggcgtggtggctcatgcctataatcccagctactggagaggctgagacaggagaatcgcttgagctcaggaagttgaggctgcagtgagctgtgatcgtgccactgcactccagcctgggtgacaagagcaagaccctgcctctaaaaaacaagcaaacaaacaaaatgtggaatcaccaggatttagtgaccaaatgctaggatataggacattgggagggaaggattcgagataatggccaaggtttgggtttggtggctgggtagataatgctgtcattcacaaggatagggaagagggaatgaggaatagcttttgggggaagatcataaattcagttttagacaaactgactttgaagtacttataaagcagctggataaaggtcagggttagagagagagacctgaaagttaccagaatatagggaagtgatagctaaagccctagaagtaaacacccagggagagcagggccaaggacagagccatagggacaccatggttaaagggagatgtgcaaagaaggctcagagcatcagtgggctcaggccagggaacgcaagctctctaggccgccattctacacacagaaaactcggtgcaaggtttacatatacctttttaaagtaacatttaaaattacttcctttaatataaaagaaacacacaagacacaaagaaagcccaataaagctgtgagtcccagtttggtagctgaggaggagtcttaagaaaacaagccattcctcagtatccctgggaaagaaggggtgagaggacacagatatcaccaggccctgggtgactgcattgctggggccatgcagggcctagctctccaccaagggaaagtgctgattttccttgtcatggtcctggccttgctcccatgctcgtcctccagttttcagaagtcgtccagttccaagaatggctccttcctttagttcactaacattttcacttaggggtgaaggccgcttaccctgaaaacggcagtgtatgagttggggggagttgctgttcagaagagggaagatctgggtaaaagggtctcccaccctctacgttggatatcctagtaacagcttgcactttctcttcctttacctgtcgtagtgtcagggtgccaggggagttgtcatcctgcaggatggtgaggggggatctccctagtacctt

SEQ ID NO: 25154 - DNA, 2082 bp, Homo Sapiens
cacacaagcgcttccttgccgagaggctggagctgcggcaccgcaggcctgagccaccccttctctgctgtctccttctcttcctcagggctcccgtgtctgctcgccctccgacgctgctcaggaatttgacaagaaactgaagttttgattcagatatattttgaattgaaaccagagatgttctagagtttagattctttcatttgattaaggtatggtctgaatatgcgttgcttggcagctcgggtcaactataagactttgattattatctgcgcactcttcactttggtcacagtacttttgtggaataagtgttccagtgacaaagcaatccagtttccacggcgttcgagtagtggcttcagagtggatgggtttgaaaaaagagcagcagcatctgagagtaacaactatatgaaccacgtggccaaacaacagtctgaggaagcattccctcaggaacagcagaaagcaccccctgttgttgggggcttcaatagcaatgtgggaagtaaggtgttagggctcaaatatgaagaaattgactgtctcataaatgatgaacacacaattaaagggagacgagaggggaacgaagtctttcttccattcacttgggttgagaaatattttgatgtttatggaaaggtggttcagtatgatggctatgatcggtttgaattctctcatagctattccaaagtctatgcacagagagccccctatcaccccgatggtgtgtttatgtcttttgaaggctacaatgtggaagtccgagacagagtcaagtgcataagtggggttgaaggtgtgccattatctacacaatggggacctcaaggctatttctatccaatccagattgcacagtatggattaagtcattacagcaagaatctaactgagaaacctcctcacatagaggtatatgaaacagcagaagacagagacaaaaacaagcctaatgactggactgtgccaaagggctgctttatggcgaatgtggctgataagtctagattcaccaatgtcaaacagtttattgcaccagaaaccagtgaaggtgtatccttgcaactgggaaacacaaaagattttattatttcatttgacctcaagttcttgacaaatggaagtgtgtccgtggttctagagaccacagaaaagaatcagctcttcactatacattatgtctcaaatgctcagctaattgcttttaaagaaagagatatatactatggcattgggcccagaacttcatggagcacagttaccagggacctggtcactgacctcaggaaaggagtgggtctttcaaacacaaaagctgtcaagccaaccaaaataatgcccaagaaggtggttaggttgattgcaaaaggtaagggattcctcgacaacattaccatctctaccacagcccacatggctgcattttttgctgctagtgattggctagtaaggaaccaggatgagaaaggtggctggccaattatggtgacccgtaagttaggggaagggttcaagtctttagagccaggatggtattctgccatggcccaagggcaagccatttctacattagtcagggcctatctgttaacaaaagaccatatattcctcaattcagctttaagggcaacagccccttataagtttctatctgagcagcatggagttaaagctgtgtttatgaataaacatgactggtatgaagaatatccaaccacacctagctcttttgttttaaatggctttatgtattctttaattgggctgtatgacttaaaagaaactgcaggggaaaaactcggaaaagaagcaaggtccttgtatgagcgtggcatggaatctcttaaagccatgctgcccttgtatgacactggctcaggaaccatctatgacctccgtcacttcatgcttggcatcgctcctaacctggctcgctgggactatcataccacccacatcaatcagttgcagctactcagtaccattgatgagtccccagtcttcaaagaatttgtcaagaggtggaaaagctaccttaaaggcagcagggcaaagcacaactag

SEQ ID NO: 25155 - DNA, 11360 bp, Homo Sapiens
gagtcccaggattccggggactggagggcagcgccggcagccaaggattttgacacttcatgacatgtcattatttagagcaataatgaatattgacctgttttggattagttgatgaccttcggaaatgatccaataatatctactatagagaagctgaatatactccatttggagtgaacagcccggattgttacagaattttcaggatgacagatccaatgatggacttttttgatgatgccaatctttttggtgagaccttagaaggtttgtcagatgatgcatttgtacaaccaggacctgtttcactagttgatgaattgaatttgggtgcagaatttgaaccgttgcacatagattcactgaaccatgttcaaggtactccaacacatcagaagatgactgattttgaacagttaaatcaatttgattcaataaaatttcaccatgttaatcaatcttttggtagcccagctgaacatgtgttatctccacaccctcagcttaattgttctccaatccatccccaaaaccaacccaatggtttgtttccagatgtaccagatggcagtccaatgtggggccatcagacagctactaccatttcaaatcaaaatggatctccttttcaccaacaaggacattcacactctatgcatcaaaataaaagctttgtggcacaccatgactttgccttatttcaggccaatgaacaacaaacacagtgtacttcactacgctcacaacaaaacagaaataatctcaacccagggcagaattctcttagccagtctaaaaattttatgaatgtttctggtccacatagagccaatgttaaccacccaccacagatgactaatgcatctaattcacaacagtctatttcaatgcagcaattttctcaaacgtcaaatccttcagcacacttccacaagtgtagcagtcatcaagaaggaaattttaatggaccttccccaaatatgacttcttgttctgtcagtaattcacagcaattttcttcacattattccttttccagtaatcatatatcaccaaacagtctacttcagtcctctgcagttcttgcatctaatcatacaaatcagactttatctgattttactggaagtaattccttttcacctcatagaggaatcaagcaagaatctactcagcatatcctaaaccccaatacatcattgaattcaaataatttccaaatattgcattcatcacatcctcagggtaattatagcaattcaaaattatctcctgtgcacatgaacttcccagatcctgttgactcaggaactcaaatgggccatttcaatgatcatgtagaaactaatggcttttcatctttagaagagaatttacttcatcaagtggaatctcaaactgagccattcacaggacttgaccccgaggacctccttcaggagggtcttcttcctcactttgatgagtcaacattcggacaagataattcaagtcacattttagatcatgaccttgatcggcagtttacttcgcatctggtaacacggccttctgatatggctcagactcagttgcaaagtcaggctcggagttggcattcatcattttctaatcatcagcatatacacgacagaaatcacctatgtttacagcgacagcctccatcttccaagaagagcgatggttctgggacatatactaagttgcagaatacccaggtgagggtcatgtctgagaagaagcagagaaaaaaggtggaatcagaaagcaagcaagaaaaggctaatcgtataatatcagaggccatagcaaaagcaaaggagcgtggggaacgcaatattccacgagtaatgagccctgaaaactttcctactgcttcagttgaaggaaaagaggaaaagaaaggtagaaggatgaaatccaagccaaaggacaaagacagcaaaaaaacaaaaacatgttctaagttaaaagagaagacaaaaattggcaaactcattattacattgggtaagaaacaaaaaagaaagaatgagtcttcagatgaaatatctgatgcagaacagatgccacagcatacattaaaagatcaagactctcaaaaaagaagatcaaatcgacaaattaaaagaaaaaaatacgcagaagatatagaagggaagcaatctgaagaagaggttaaaggttctatgaaaataaaaaagaattcagctcctttacctggtgaacagcctttacaattgtttgtggagaatccgagtgaagaagacgctgcaattgtagacaaaattctatcttctagaaccgtaaaaaaggaaatatcacctggagtgatgattgatacagaagaattttttgtaaaatacaagaattactcctatcttcactgtgagtgggccacagaagagcagcttttgaaagataaaaggatccagcagaaaatcaaacgattcaaattgagacaagcacaaagagcacatttttttgcagacatggaagaagaaccatttaacccagactacgttgaagtagacagagtattagaagtctctttttgtgaagataaggatactggtgagcctgttatttactacttagtaaaatggtgctcattgccatatgaagatagtacttgggaactaaaagaagatgtagatcttgcaaaaatagaagagtttgaacaactgcaagcttcaaggcctgacacaagacgtttggaccgtcctccttctaatatttggaagaaaatagatcaatccagggactataaaaatggcaatcaactcagggaatatcaactggaaggactcaactggctcttgttcaattggtacaatagacgaaactgcatcttagcagatgaaatgggtcttggcaaaactattcaatcaattacattcctctatgaaatccttctgactggtataagaggacctttcctgattattgctccactttctactattgcaaactgggagagagaatttcgtacgtggactgatattaacgttgtggtttatcatgggagcctgattagcagacaaatgatacagcaatacgagatgtacttcagggattcacaggggcgtatcattcgaggagcttacagattccaagccatcatcaccacttttgaaatgattcttgggggctgtggagagcttaatgcaattgaatggcgatgtgtgattattgatgaagcacataggttaaaaaataaaaattgtaaactcttagagggcctgaaactcatgaatctggaacacaaggtgcttttgactggcacccctctccaaaatacagttgaagaactatttagtcttcttcactttcttgaacccttaaggtttccttctgaatcaacatttatgcaagaatttggggatctgaaaacagaggaacaggtacagaaacttcaggctatcctgaaaccaatgatgttgagacgattaaaagaagatgtggaaaagaagttggcacctaaagaagaaaccatcattgaagtagaacttactaatattcaaaagaaatactaccgggctatcttggaaaagaacttttcttttttattcaaaggagcaggacaaactaatgtacctaacttggtcaataccatgatggagctcaggaaatgttgtaatcatccatatcttataaaaggtgctgaggagaaaatacttggagaatttagagatacttacaatccagctgcttctgattttcatcttcaagcaatgatccagtctgctggtaaattggtccttattgataaattgcttcccaaaatgaaagccggaggtcataaagtgctcatcttctctcaaatggttcgttgccttgacattctggaggactatctcatacataaaagatacttatatgagcgaattgatggcagagtcagaggaaatcttcggcaagctgctatagatagatttagtaaacctgattcagatagatttgtttttctcctgtgtacccgagctggtgggttgggcatcaacttaactgcagctgatacatgtataatttttgattctgattggaatcctcagaatgatcttcaggcccaagctcgttgccacagaattggtcagaacaaagcagttaaagtctacagactggtaactcgtaactcatatgagagagagatgtttgaccgagccagtttgaaactgggcctagataaagctgtgttacagagcatgagtggaagagaaagtaatgttggtggtattcagcagctttccaaaaaggaaatagaagatctgcttcgaagaggtgcttatggtgctattatggaggaagaagatgaaggccctaaattctgcgaagaggatatcgatcagattttactacgtcgtacaaaaactattacaattgaatcagaaggacgtgggtcaacatttgccaaggcgagttttgtggcatctggaaaccggacagatatttctttagatgatcccaacttctggcaaaaatgggctaaaaaggcagaaatagatatagaggccatcagtggcagaaacagcttggttattgacactccaagaattaggaagcaaacaagaccttttagtgccacaaaagatgaattggctgaattatctgaagctgaaagtgaaggagatgaaaagcccaaactccggagaccctgtgaccgttccaatggctatggaagaactgaatgctttagagttgagaaaaacctgctagtttatgggtggggccgatggagagagattctatctcatggccgtttcaaaaggcagctaaatgaacacgatgtagagataatttgccgagctctcttagcatattgccttgttcactaccgaggagatgagaagattaaaggtttcatatgggatctcattactccaactgaagatggacagacacgagagctacagaatcatctaggcctatcagctcctgtacccaggggtcgaaaagggaagaaagtaaaaactcaaacaagctcatttgatatacaaaaagcagaatggcttcgaaaatataatcccgagcagctccttcaagatgaaggctacaaaaaacatataaaacaccactgtaataaggttttgcttcgtgtgagaatgctgtattatctaaagcaagaagttattggaaatgagtgtcagaaagtatttgatggagttgatgcaagtgacattgacgtttgggtaccagaaccagaccactcagaagttcctgctgagtggtgggattttgatgctgataagtcactccttattggagtttttaaacatggatatgaaaaatataacactattcgagcagacccagcattatgcttcttggaaagagtgggaaaacctgatgagaaagcagttgctgctgaacagagaacgaatgattatatggatggggatgtggaagatccagaatacaaacctgccccagccatctttaaagatgatatagaggatgatgtttccttaccaggagatcttgttatagcagatggagatggtcaactgatggagggtgataaagtatattggcctactcaatcagctttaaccacacgtttgaggcgtctcatcactgcataccagcgtactaataaaaacagacaaattcagcagatacaaccgactttctcggtgcctaccagtgtaatgcagcctatttatgaggaagccactcttaatcctaaaatggcggccaagatagaaagacagcaaagatggacaagaagagaagaagctgacttttatagggttgtatctacatttggagtggtttttgaccctgacagaggccaatttgattgggcaaaatttagagctatggctaggctacataagaaaactgatgatagtttggaaaaatatttgtacgcattcatgtccatgtgtcggagggtttgtcgtcttccttccaaagaagaattggtggatccaaatatttttatccagcccatcacagaagaacgtgcttctaggactttgtatcgcattgaacttctaaggaaagtacgggaacaggcccttcgacatccacagttgtttgaacgcttgaagctttgccatccaaatccagatttaccagtctggtgggaatgtggccctcatgatagggatttgcttattggtgccgccaaacacggggtgagccgaacagactatcacattcttcgtgatcctgaactctcatttatggcagctcagaggaactacagtcaaagtaagatggctcattcaaggacttctaccccacttctacagcaatatcaagtagcactttctgtttctcctcttacctctctacctaggctcctagatgctaaaggtattattctagaggagatgaaagttaaaagtgaaaaccttaaagaggagcctcagtcttctgaagaagaatctatgtcttctgtggaagccaggacactaataaaatctgagcctggaagtccaaagaatggtgttttaccacaggctactggagaccagaaatctggtggaaaatgtgaaacagacagacgcatggttgcagccagaacagaacccctaactccaaacccagcttctaagaaaccaagagtccacaaaaggggatcagaatctagttctgattctgactcagattctgagagatcatcttgttcttccagatcatcttcttcctcatcatcctcttcttgctcccactctcgatcaggctctagttcttcttcatcttcatcttgttcttcagcatcttcttcatcctcttcttccacctcttcctcctcctcctccttttcatcttcatcagaagaaagtgacagtgatgaagaagaagcccaaaaacgagaaagtactactcacatgaaagcctatgatgaagaaagcgtcgcgtcactgagcactacccaggatgagactcaggatagttttcagatgaacaatgggacaccagagtctgcttatatcttacaaggtggatatatgctggcagcctcgtattggccaaaggatcgtgtgatgatcaataggttggacagtatttgtcaaacagttctgaaaggaaagtggccttcagctagaagaagttatgatgctaacacagtggcttctttctataccacaaaactgctggacagccctggagcagctacagaatacagcgatcccagtgtacccactcccccaggtgccggtgttaaagaagaacatgatcagtcaacacagatgtctaaggaaggtggtttgaagttgacatttcagaagcaagggcttgctcagaaaagaccatttgatggtgaagacggtgctctggggcagcagcagtacctcactcggcttcgagagcttcaaagtgcatcagagaccagcctcgtcaatttcccaaaatccataccagtatcaggtacttccattcaaccaacccttggtgccaatggcgtgatattagacaaccagcctatagtcaaaaaaaggcgaggaaggaggaagaatgtagaaggtgttgacatcttcttttttaacagaaataaaccacctaatcatgtttctttaggcttaacctcctcacagatttccacagggataaatccagcactatcctatactcaacctcaaggaattcctgatacagaaagtccagttccagttattaatcttaaagatggaacgagacttgcaggagatgatgcaccaaagagaaaggatttggaaaaatggcttaaggagcacccgggttatgtggaagatttgggagcttttattcctagaatgcagcttcatgagggaagacccaaacaaaaaagacaccgttgcagaaaccccaataaactagatgtgaatagtctcactggagaagaacgtgttcaactgattaacagaagaaatgctagaaaggttggaggtgcatttgctccccctttgaaagatttatgtagattcctaaaagaaaattcagaatatggagtagctcctgaatggggagatgttgttaagcaatctggatttcttccagaaagcatgtatgaacgtattctcactggtcccgttgtgagagaggaagtaagcaggcgggggagacggcctaaaagtggaattgcaaaggccacagcagcagcagctgctgcatctgccaccagtgtttcaggcaatcctttgttagccaatggactacttccaggtgtggatctcacaactcttcaggccttacaacaaaacctacaaaacctgcagtcactgcaagtaactgctgggttgatgggaatgcctaccggccttccttctggaggagaagctaaaaacatggctgctatgttccccatgctgctgtcaggaatggctggattaccaaatctgttgggcatgggaggactcctgacaaagcctacggaatctgggacagaagacaaaaagggaagtgactctaaggagtcagaaggaaaaacagaaaggacagagaaccaaagttcagagaatggtggagaaaactctgtgtcaagttctccttccacatcctctactgctgcattaaatacagctgcagctgccaacccattagctcttaacccactattactatctaatatactttatccagggatgcttctcactccaggccttaatcttcatattccaactttgtcccagtccaatacttttgatgtacaaaacaaaaacagtgacttaggctcgtctaagtctgtagaagtaaaagaagaagattccagaattaaagatcaggaagacaaaggaggaactgaaccaagtcctctcaatgaaaacagcacagatgagggttcagagaaagctgatgcttcatctggatctgatagtacatcgtcgtcatctgaggattcagattctagtaatgaagactgattcccagactctgcacttaaaatatgaactgattttggattttttctttaataattaattgtaaataccccagtgttgagtgcatcaataacttactgaccgaacatttcagttatttgtttagaagtgcaaactgctttcagagactttttgcatgtaatatttcttaagattcataagtttctgaactcgtatgtactatcaaatacataaaggtgtaaaattacaacaaaaggcattataattttgttgggggttaattttatgaaaattatgctcaataagagttgtatatttaatatatttgcagtgaacacagaatactttatgcatattactgatttaatttgaatatagttttacagcctccttgacacctataatttacagatcaaaactcagcaataatttgggcagctaatgaatgtcatgaaagctgtagaatctacatcaccatccattgctttaattacatgaaaatgctctagtgttgtgatgcactgctgatgtttccaattcaggtacaagtatgttctaaagaagaaataagtttcccaatcagccaatttaactggctacctgttacctcagctgagttagtttaggaagtttacattcgtttctaattctatacttgttttcaggggttttttaaacacatcctatatatcatgtcaatctggcaagaaatatgacttgctttttgctgagcttaattcagatatcagtagaattaagtcataaaataatcatgtgtcatgtgactttggcaccctatggacatacttagttttaacttttcaaagtttggcctcctattagaaataatcatgtctcagatgagtaatgtctgtttccagggttcagaaaaggcaaactcatgaaatgccactgaaaagaactttcaacacagcatacttcatgtaaaagaaattgtttgtttgctttctttgtgtagatttctatttgtgttttatgtcatggaaatattccagaattaacagataatagtggtaaagtaatatgcagatagtctaaattcattttgagtttctaggtgtaagcagactaaatgttgcccagaatcagtgttgggttatcagtttatattaaatatactgagttgcccgttttgaaaatgcactttgaataatctcaaaaagatgtacaagttatacctgtaaaccacaaaagtgaagcctgaggcttctgttcaatttcatagactcctttaccatgtaaaatttgtctgatatttgatttgtgatacaatttctcctgctaaagctgctattattctgacaaggtagaggtccaggttcacctttatatatatttaaaacaattagtactgaattggacataaaaatattgacattctaaggagagatatatgttagcatttttctggtactcaaataagttagtagtaaagtctgcaagggcataaatttagggggaaaaagtgtcccagttctctcctacagaaaaaatactttcagtatgttttgataaaactgttgctttgtcatgagttagtcaattgtatcaggttttccaagacctttaccagtaaattatgtttctgtatgtaaaataaccccttattagagagacagtgttatatgtatttacaaaattatataagttccattgggattgtattgattttgtattttcccaaaatagtactttgaattgatagtcctttatgcaatgtcttagcaatagtctctataatgcccatccaggagaagtgggtagtaattcttcatcatgaaaatgatatattacatatttagtatcttccctttgcagtattgcacttttgtttaactagaatacacctatgagatagccaaagtttcaaacacagttatcttagtttaccggtggagtatttcaacaccaaccacatttcccttcctccctctaattctacccacatgatctttattccttcctttcgccaattaaaaaaaaaaaaaaggaaaaaaaatctgtagatcttgtcactaaaatctaatttatatcaaatttatgagagaaagtattttcctaattatggtcaaataaatttggttaacatcctagtgattctctttctatataataaggcaattacagttttcaaagcattaagtctaacataactttaaacattctcttaggtttcaagacacttctatttaatattcattggggaaaagttgtccagctatcagctaagaaaacacatgcaaatatggttgtgtaaagttaagggttataaggaaaaaaaaatcagtagaattacataatactaaagttgcagttgaaagaatatccaagtatgtgttggtagttactaaaagaattatagctgttattgccttgtatttatagcccttgtttcaggttttatgattcaagtcttagtccaatctttcttttggacatttgcaatatttaccagttgtgttttgtgtagtctgaatttgctttctgtagttgagcaaacgtctt

SEQ ID NO: 25156 - DNA, 19092 bp, Homo Sapiens
tctaggcccccgtcttttttctcctgtgtccccagtgactattttctgcccttggggctgattttccctagatgattaatagagggagtctcccacctcctgggactaccccatctttgactcctttctagtctaggcgttagagcacaatagtccaacatcagtaaaagcaaagcatgagtggctattgtccccttacacttcctgttaccatctatgaatgataaaagagcccaggaggaaagcacaacttagcttaaaaaataggcttgccggctgggcatggtggcttatgcctgtaatcccagtgctttgggaggcaaaggcaggaggatcactagaggctaggagttcaagataagcctgggcagtatatcaggaccctttctctacaaataaataaataactaaataaaaaataaaaataaaaatataatataaaaaaagaaagccagatgtagtggctcttgcctgtagtcccagctattcaggaggttgaggtgggaggattgcttgagcccaggcatttgaggttacactgagctatgatcacaccactgcattctagccttggcaacacagtgagagcctgtctcttaaaaaaagaaaaaaattctttccagtgcagaactgtaggaatccatggcatggtaaatttggcatttgtggtagggcaggatttatacttgcacagactggcattagctccaaacattagaggaaggttggaaagaagcaatgccaggcagaccaactgggctgtgtggaagtgaagctatcaggcataccagtgactttagtgtgtagccaaaagcaatagacactgaatcgtggtggtgacttatggtccatgaatcacaggagaaatgtctcccttcatttattccacaaccattgattgagcacctactatattccctgaaagagaacataaacatgaattgaagaaggttcttgctgtctcatggctcccaagctagaagagggctgacttgtaaatgcctcacagcagggttcatgttatatggagaagtgacgaaggtgccagaagactcaagctaggggacagccattagctgctggaggcagctaaggtgggttcccagagaagccgttctccgttactgagatgggggctgcagtgaccttgaccacagctcttccattcatggactgccccagctctgtggtctctctgctaaccagccagactctgggagtggcctatgccgtcagcctcagggccatttaaaccaactggtcattggcagtgattgtgcgaaagagtggctggcggcaaaggagggtttgtgttccattcaaataccctcaaaaagcctgaaaaataagtagagattgaggccaggccttggagttgtggaaggtggagaacactgggaagccaacctccaaagaagaccaggttggaggcaaaggaggaaggggagctctcgttggcaaaccaacagggaagccaaggatatcccagtaactgctctcacatccttgatgagaatgccttgaatccgagctaggccacctcaaagaagcctgcaaaataagtagagattgagtgcctgctgttcaaacacaactcaagcgcagtcctcctcctctttcccactggattgcccccaagtccctcctatgggggactccttctgaagtctctgctgtaagtcaaatccttcgccctttatacttggtcaggaagttgcaagcttccacaggtgatatactagggaatttaggaataaacaaatggaaataaattcaagaaaaggaaaataataaaaatgatcatccatagagtggagaattcagataatggaccctcaaccccagcttcacacctgggacccccacttggtcatatggaccctggcagtctctaatcacaagtctgtgatcccttgacttaaactgttcttccccaaatgtagacatgggtggggctcagaagggaggtgtcatctgatgtggtttccttatttccgtttattcatcaagtgccctctagctgttaagtcactctgatctctgactgcagctcctactgttggacacacctggccggtgcttcaggtaggaagccacctctgtttgctaggactttctgtggggtagggctgcttggcttgactttattttggaaaatgtattcatttctgtgggagctgaggatttctgctgcccgcttcctctcttgtgaccaccactcatacatggagttagcaggtgaagaggacaacagcctcctcatcccctctttttataccttgcccttttgtgggaagaggctgaccattccccaatttgatgtttattgcttcaccttaagactttgtcttcagtgaaaatgcaaatactggtagggagggaacacactaaaatgtgtggatctgagtggactcatcatacaccctcaggcctggcagcaaatgagaggtggatgattctgtcttcctcgatttgcagatgagaagactgaaatctataggggtacgagaccccactcaaggtcatgagacttatttatttatttatttatttattttgagatggagtctcactctgtcgcctaggctgtagtactgtggcacgatctcggctcactgcaacctccatttcccgggttcaagtgattctcctgcctcagcctcctgagtagttgggattacaggtgcacgccaccacacccagctaatttttttgtatttttagtagagacggggtttcatcattttggtcaggctggtctcgaactcctgacttcatgatctgcctgccttggcctcccaaagggctgggattacacacgaaacttattaatggtagaatcaggatggaatgaagactggatgctaggtgtctttacaaccaacctcggtgactttccaaaggctttcagacttctctggagagtcctggagctttgaggggctctttaggggccatctgggttcggagattagcacactctgccccacagtggctcagcttttatctgcttcacatactgggcttctgggaagatcttatttcagtaaactatttcacaataggaaatatatttgaaaactcttgaatgattctgtggattttttcaggggtggagggtttcagggaccaagatggagactttatcttctcaaatacttaaaactcctttagacagaggaacaaaatatgtgctcctcatttaaagaaggcttaaaatatacagtttaatgcaatgtgttgttatcacttccttcccccagtagattttaaggagggtaaacaagaatcagggagaacataggaatagaaatagtagaaggggacacctgggaacaggtttgccttcttgcattttgcttaatgctggcccttccctgaatgtctaagaccaacctggtccccacatccaaatgcacagacacagctgaggatggagaaggctaaagagggacagaggtagagacataggctgagaggaggcagttgtaggttgagctagggctaaggtgttttccccatattccatcttaccccacactcaggccaggccttagagttgtggaaggtggagaacactgggaagccaacctccgaagaagaccaggttggagtcaaaggaggaaggagagctctcattgccaaaccaacagggaagccaaggatatcccagtaactgctctcacatcattgatgagaatgccttgaatccgagctactaaatcacatttccttccttctaaccttccagttagatcaaaccattgctgaaactgaagaggacatgtcaaatattacagatccacagatgtgggattttgatgatctaaatttcactggcatgccacctgcagatgaagattacagcccctgtatgctagaaactgagacactcaacaagtatgttgtgatcatcgcctatgccctagtgttcctgctgagcctgctgggaaactccctggtgatgctggtcatcttatacagcagggtcggccgctccgtcactgatgtctacctgctgaacctggccttggccgacctactctttgccctgaccttgcccatctgggccgcctccaaggtgaatggctggatttttggcacattcctgtgcaaggtggtctcactcctgaaggaagtcaacttctacagtggcatcctgctgttggcctgcatcagtgtggaccgttacctggccattgtccatgccacacgcacactgacccagaagcgtcacttggtcaagtttgtttgtcttggctgctggggactgtctatgaatctgtccctgcccttcttccttttccgccaggcttaccatccaaacaattccagtccagtttgctatgaggtcctgggaaatgacacagcaaaatggcggatggtgttgcggatcctgcctcacacctttggcttcatcgtgccgctgtttgtcatgctgttctgctatggattcaccctgcgtacactgtttaaggcccacatggggcagaagcaccgagccatgagggtcatctttgctgtcgtcctcatcttcctgctttgctggctgccctacaacctggtcctgctggcagacaccctcatgaggacccaggtgatccaggagagctgtgagcgccgcaacaacatcggccgggccctggatgccactgagattctgggatttctccatagctgcctcaaccccatcatctacgccttcatcggccaaaattttcgccatggattcctcaagatcctggctatgcatggcctggtcagcaaggagttcttggcacgtcatcgtgttacctcctacacttcttcgtctgtcaatgtctcttccaacctctgaaaaccatcgatgaaggaatatctcttctcagaaggaaagaataaccaacaccctgaggttgtgtgtggaaggtgatctggctctggacaggcactatctgggttttggggggacgctataggatgtggggaagttaggaactggtgtcttcaggggccacaccaaccttctgaggagctgttgaggtacctccaaggaccggcctttgcacctccatggaaacgaagcaccatcattcccgttgaacgtcacatctttaacccactaactggctaattagcatggccacatctgagccccgaatctgacattagatgagagaacagggctgaagctgtgtcctcatgagggctggatgctctcgttgaccctcacaggagcatctcctcaactctgagtgttaagcgttgagccaccaagctggtggctctgtgtgctctgatccgagctcaggggggtggttttcccatctcaggtgtgttgcagtgtctgctggagacattgaggcaggcactgccaaaacatcaacctgccagctggccttgtgaggagctggaaacacatgttccccttgggggtggtggatgaacaaagagaaagagggtttggaagccagatctatgccacaagaaccccctttacccccatgaccaacatcgcagacacatgtgctggccacctgctgagccccaagtggaacgagacaagcagcccttagcccttcccctctgcagcttccaggctggcgtgcagcatcagcatccctagaaagccatgtgcagccaccagtccattgggcaggcagatgttcctaataaagcttctgttccgtgcttgtccctgtggaagtatcttggttgtgacagagtcaagggtgtgtgcagcattgttggctgttcctgcagtagaatgggggcagcacctcctaagaaggcacctctctgggttgaagggcagtgttccctggggctttaactcctgctagaacagtctcttgaggcacagaaactcctgttcatgcccatacccctggccaaggaagatccctttgtccacaagtaaaaggaaatgctcctccagggagtctcagcttcaccctgaggtgagcatcatcttctgggttaggccttgcctaggcatagccctgcctcaagctatgtgagctcaccagtccctccccaaatgctttccatgagttgcagttttttcctagtctgttttccctccttggagacagggccctgtcggtttattcactgtatgtccttggtgcctggagcctactaaatgctcaataaataatgatcacaggaatgaatgcatgctgaaaagaccactcttttgcacaccatctgctcaaagctcctcttgtctgtcctgtccgctttcagcctccgtctgtccacttattaagtttgcctttgtggtttagcttcattagatgtttatctgtgtaaaaatgtcccaagtgaggacttaagatgtcagggctcttctgatggcaaatgatagaaagagaagtcaaactagcttaagcaaaactgagagtgtgggtttagcctgtgtggggaaggatcagggaaggcttgaggttgggaatagggtgaggctcagagacaggacctagatcaagcttcagatggggatcagtgattgatgttgaaatcaaagctgggatgggggcagggatggggtggcagcttgggatgaggtcagagaaggatgaatgccaggaatcggtagagatctacaaggagggagagtgagagtcagggtcacagtgaggtgttgggaacagggagattcaacatggagctgggaccagatatggagagtgagactttggaatgggataagtgtgggggagtggtgaggctcagggagggggtgtcaggcctggaatgaatatcagggaaggcttagtagctataaggctggagcagaagacgtgcctggtagggtcaccatcctatctggagcatcatctaagatcctcttccggggccaaaagacagaggctcctcagtctgtcctgcttaagactctccaggcaggtgagtgaggagggagttaggcactcgagccctaagagatagacctgattcagcagagaagacaagaaggatgcaaaggatgcacagagaatctagggcagaaggctgagaactggggcctccttttcctctcctccctccgctgatctccctccacctctcctactgtttcctcaaagtccaacttcctccttcttcaccttatgcttctgcaaggacaactccatcagaggcttcagtaagtaaatagggatccacactgggtccaggggaaatgcaaatgactcataacctcatgaaaaatgctcagtctcactaggaactaaatgaggctcaaacagcaacaaaataactcagaagtgttttaaacaggggagggatatagtggactcttcaaacaagtgcaacatttttcgattggattttttttttttttttaatgagacagggtcttgctctgtcacccaggctggagtgcagtggtgcatacacagctcactgcagcctcaaccttctgagttcaggtgatcctccaacctcagtttccagagtagctgggaccagagctgtgcgccattatgcccagataatttttaaaattttttgtagatatggagtcttgccacgttgcccaggctggtcttggacccctgagctcaagtgatctgcctgcttcggcctcctaaagtgctgggattacaggtgtgagccactgcacccaggctgattggaaattttaatgcagcctgtaattttctgggtatagctcaagacacaaatgatttggatttcagatttttaaaaaatgtcaggattttggtacttagttaacagcatattgaagtaccaaaaactgatatttcaattactagatagggtgaggattagatccagtcagagccagggagagtgtttgccttaaggagggactcccttgtccaggatggggctggcactagggatggggtgaatcttaggacaggagtgggggtcagaaatgggaggggtcagtgatgagattgggattacagaggggatgtacatcagggtaaggtgagggacggggattaggatgtaacggcatgttctgcacaatgcttcctgatgttaaaatcctaaagtttgttttgtagccttggtgacaacgtttgagactctaaatcaaaatgtgaaaatctactgttttcccctaaaccagttccacttctgaccaaccacagcctctcaccaccccttgccctccatcccctggcccattcttgttaattccagcaaaaatactaattgacaatcaacattttatgccatagaggtaaaatttgcccctttctcagcaaagtagtattttaataagagtctttcagagactgaaaaatctcatagatgcaaatgagtaacatgacaatctcctctttggtctaaggatcgtcccaaagaggtgccttcctagagaagaccactcaccaagagacagtggtggagccctgtcttttgccgtttccatgcagaggtcagagaggccactctaggttccacccagaaagccacaaggagctaacggcggagctctcagcaccaatgttttcttgcagcctggtattcagtttttaaatccaaagtcttccttccaaccttcagggtagaaatgaatcaaagacataataaataaaaaataatcgaaatatgttaactcgactttttaagattaaattttctttctattgtctaagtattttatacacattgttgaaaaaacgaaatggctttatgaagcttataacaaaaaaccagcagccttccagctccaatccctgcagacaagggcagcagctgtcagctctcatagctgtttcatcggatagtgatctatatatttctaaatatcatacttgttctgctagtttttttcttttttttggtctcactcagtctcccaggctggagtgcagtggcatgatctcagctcactgcaacctccgcctccctggtttaagtcattctcccacctcagcctcctgagtagctgggactataggtgcccgccattacgcctggctaattattgcattttttggtagagacagggtttcaccatgttggccaggctagttcatcacttgaactcctgacctcaagtgatccccccacctcagcctcccaaagtgctgggattacaagtgtgagccactgtgaccagccctctgctagttcttgtttttctccccctccaggtttagctatcatcactgactctctcttttggctttgagaatgtaatattctcccagtccctctcctgctttcaccccaatccaagcaaacacaaatactgccttctccattctccagaaacagatgccacattttttggttaagtcgacattcaatttttttgttattatgactatgtaaaaaattattcacagtaggatccaatttttttttgtacaagttttgttttccctggaattgatgagaggatgttccatgtacttatcatgacatcagttccaatgtctccctcaatacattcacactcagcggataatctattaatttttctttctcaaagacctctctccgggagtccttcattgtcttcttccaacctggacaggtgactcttaggaaaggggccagttcctctttactaaattgctttgactatgtttccagagaaattttagaatctgcttatcaatttctatataatgtccagctgggattttgatttggattatgtagaattcatagatcaatttagagaaaattgacattgtcatattgagtcttccagtccatgggcacgatatctttctctatttatgtcttctttaatttttttgcaaaggatgttttatagttcttggtacacaaatcttgtacatactttgcaaaatttgtccctaagtattttatgggttttttggatgcgattacaaatgatatcttaaaaagttttcattttccagttctttttttggttaccatagtatatagaaatacagttgcagtatgtatattgaccttgtaacttgggacctaagtaaattcatttattggttctagtagatttttttaaagattgctttggattttaactgtatgccatcatttcagaatttaaatcttctttttagttttagaatgcatgatgtgtaccttggtggtgtttttcttcattcattgtgctgggcgcctggtaaattttcttaatctggaaatttaggttatgtaaatttatctggtattagttctttgacagtgttccacccttcgttttccttattctttaatttttttaaaagaattattctattttattttatttttgagacaggatctcactgtatcacctatgctggaatgcagtggcccaatctcagctcactgcagccttgacctcccaggctcaaggaatcctcctacctcagcctattaagtagctgggactacaggtgtgtgccaccatgcctgcctggctagttttaaatttttaaatagagtcggggtctccctatgtcacccaggctggtctccaactcctgggcccaagtgatcccctctccttgtcttccaaagtgctaggattacaggttgagtcactgcaccctgcctatttaaaaaaaaaaaattaaaaaatcctcctgcctcagcctcctgagtagctggggctacaggcatgcaacaccacctttggctaattaaaaaaaaatttgtagagacagaatcttactatgttgcccaggctcgtcttgaactcctaggctcaagcagtccttcttccttggcctcccaaatttccggaatttcaggcatgagccaccaagcttgacctatttaaaaaaaaaaatttaggggctgggtgcggtggctcacgcctataattcctgccctttgggaatccagggcgggaggatcatttgagtcaaggagttcaaggccagcccgggcaacatggtgaaaccccatctccacaaaaaaatacacacatgcacaaaattagctgggcatggtggaatgcacctactctgggggctaaggtgggaggattgtttgatcctgggaggcagaggttgcagtgagccaagattgcaccactgccttccagcctgggcaacagagtgagaccttgtctcaaaaaaaaaatcctccttccttagcccccaggtagctcggactacaggcacgcaacaccatctctggctaatgtttaaaatattttttggagagatggagtctcactatgttgcccaggctggtcttgatcccctggcctcaagtgattctcccacctctgcctctcgaagtgttgggattataggtgtgagtcactgtgcgtggcaaaaaatatacttattttaaagtcagatccaaattgctttattatctttagctcctcaggtgtgaattctcccatttgctgttgactgactgttgattgtgatgattgtcagctctttgtaacattttattgttaattcatcttttgaaggcatttttttgtttcatgggagtcttgcatgtgccctggattatgaagaagtctattcaggggtggctttatggctgtacctgctagggccttactgggttacatagctcagagcattttttgttattgatatttcttggccctgagtttccacaccattgcaaatgacagatttgggtcctcatcacttgatactagggcttgggattctggaatgttcctcaattggccccttttctctcatgacctaggaaggcagctcacttgggggttgtgtctcaggctgcaaagtgcttttctatccccattcaagggcatggcagctctttcttggtcctgacaattttataggcaatcaagttgtagtttctgctatacatggggcctttagggtcactggtattatcattcccatccttaaggtacatgatcaattctagtatctttctgggttcctctggctttaatcctactccctgataagtccatacatttttaagctccctcttcatttctggcccttggagattttttctctctctcttgcctgctattgacctcagatatttatttttaaaaattaattaattcattcatttatttttgagacagagtctcactctatttctcaggctggagtgcagtggcgtgatctcagcttactgcaacctctccctcccgggttcaagcaattctcctgcctcagcctcctaagtagctgggattacaggcacccaccaccatgccagctaattttggtatttttagtagagacggggttttgtcatgttggccaggctggtctcaaactcctgacctcaggtgatccgcccgcctcggcctcccaaagtgttgggattacaggcataagccaccacgcccagcctttttaaaaattaaaaaaaaagttatttaggatgcctatggagggcatgtttgtgttgctgatttgctgctatgcctcttcagccagcccattatcatgaccagaaattcagatagcacatcaaacgaaaaacaaagttccttttcttgttttttatttccctttcttatgttaaaaccttcttccagaaaatgttatgtaccccaggaggatacattgacgggatttctaggtaacccacagtgtgtacgtgcatgttgcttatgcatgggtgcatatgtatgtctgttttggggatgaatgacccaacgttattccagaactatcacccccttttttttagccaggcttgcatcagggggatggaagaagtaagatctagaaggtaaatggggagggaccgctgaagaaatctagtcacttccgacatgggaaggaattgtgttgcccaactgaaacctaagaggccacatccgtacctctcccttggttcccatactgtaaacaacatggctgtcttcctgaaagaggtggctttgctccagctttaaaggtattgggggtgtggggagactaggcaggtacaggtctcagggctgtgcagtgcagggttccccacttggccagcatacttgagcactcctctgagtgggaccctggcaagactcagcatgtactgtctttgtgcacattcccacatgttcctaagtgagaatccgctagttgtctgattatgtaacaaatgcttgtttgcatccaactccgtgctaggtcttaaaacaaagtaatgggccaggctcagtggctcatgcctggaatctcagcactttgggagctgaggtgggcggatcatctgagatcaggagttcgagaccagcctggccaacatggtgaaacctggtctctactaaaaatacaaaaaaattacctgggtgtggcggtgggcacctgtaatcccagctactcgggaggctgagacaggagaattgcttgaacccaggaggcagaggttgcagtgaaccaagattgtgacactgcacttcagcctgggtgacagagcaagactctatttcaaacaaacaaacaaacaaacaaacaaacaaacaaacaaagtaatgtactaaagaaataaaatctaaggggacaaaggaaatgtgtgaatggagggtatgtgaggagtttatgaaatttcctgtagggtcactggaacaaagagatctatctgggggtcctagtgtaccacaagctgaacctgaagatttggaaaaatgtttctaattaaataaaacagagcaaaaagacagacttagttgctgtgttacttgaatcttcacttaaattttcagaaccttggtttccgctcccataaaatgaagtttgaataggcaagcttccttccagttctaagaatgggagatgctcgaaatctaagagtgtactgcgatggacaaacaggactatagctctagtgaacttgacatgaaacatccatctttgcccagatcgtgattatccacaattaggtgccctgtgaaggccagttcttagtatgtgttttccaggcagctgctgaccaagtctgacctgaggagttcctagaaggcctctctctgtccccttctctttctcctctcttccacctccccatccaatatttccctccctggtctgtcagccattcttttatttggcctaggcaggcctcttagaaaaagagcaaatgcccctgggttgggggaattctttcagtcattaagccagggatgagaatggagttttgaaattgttctccagcataggatcctcttttctaagccttcaacttcatgagcaaatgggcacactccagtccaacgtgtaagctcagcctctcactaacaggtaggtctgtgctcactggtaggaccgcactttggacttagatgctaacattaatctgttggaagattttgcaaggagacagagagaggagcaatctgggattcctgagggctttgttgcaagggaagagcaacgagttgttgaaaggcacccaggccgggtgcagtggcttacacctgtaatcccagcactttgggaggctgaggcgggtggatcacttgaggtcaggagtttgagaccagcctggccaacatggcaaaaccctttctctactaaaaatacaaaaattagccaggcatggtggcgcacacctgtagtattcccagctactggggaggctgaggcaggagaatcgctttgagcccaagaggtggtggttgcagtgagctgagatcgcaccactgcactccagcctgggtgacagagtgagactctgtccccccccccccaaaaaaaaaagacccaaagatcagctgcttccgccctatttccatgaaattgtcactttgatccctgaattctattttagattctacaacacaaggagaacccttatctaaatccttatatgtatagtgtgtttcccgtgatatcataattgaagacttactctgtgccaggcactgaaaaaaacactttttacataaattattttatttaatggtcatcaagacctgatggtaggaattattattatccttattttacagaagaggaaaataagggccaaagagattaagtccctcactcaagataacagcagcgggtaagtggcaaaactggagtttaagtcaaggaccagctgccttcggagtctgagctctcaactgctgtgtgacacacagagaggtgctgtggtggagagagagccacagggtgaatttgcggtagcctagggcttagtctatcccgacttgtgtgatcgtgagcaagtaatttaacttctctggacccctccctccttgaagggatggcagcattggaagcttgttgtcaaggttcagggtaatgtatgccaggctttcagggtagactaaggtctccataaatggcaaacattatttatcacagcagagaagtcttggaaaggcaagtccactgggaaatcgggatgtaactccaaatcctctaactgtgatggcagtgtttcctacatgatgtcatagctccagggagttgggaggagagttgagatatacctctttccaagagatgttttgagatgaaaagataaagcttggaaagtgatcaaggtatatccttgttcctgtgacatccatttttttctcttctggattgcccatcagctcacaagcctgttgtaggagttcccatcttataacaaccctcccttgatcccacatctcatcagctacggtcctatttttctgctccactttgcagctaaggtctgaggcccactgctcaaagggtgcttcaagtctgtgaggggagattagcaacattgagcagagtctcagtttgaacctaaactgggctcactctggaattcacgtaagtcagtgcaagcaatgtccctgaaagaaatgaagggttgagagctcttagggaggagctcatttctgggggtcaggaggaaagcacacaggcctgctaaaggcaatgcctcagggttggggcttagggagaccttgagggctacaggagttgagtgctgaggccaagaccaacccaggtccagggcttctcacctaagtagtagggagatggggctgggagtgaaagtgaaaaaaactggggagattttggcagtgccagcaacacactcagggaaacctggccctgttcccctgcaggtggccgggttggaactggtagagggtggaggcaaacttggcaaatgggtacaggcagcctcagggatgcatgtgggaggagggaccttggaaggctacctgaggtgctgagtcacaggctgactcatggggtacacaggtacagagtgtgaacacagaaagagccaaaaaaagggtaaaaaaagaaaaaaagcactcatatttccaccactcaaagtcaacccagtgcacattttggtttattgccttctagcattaaaaaacaataaagagttgatttttcagagcggttttaggttcacagcaaaattgaacagaaaaccttctagtaatttttctttactttacttttttttttcttttgagttagaattttgctcttctcgcccaggctggagtgcaatggtgtgatctcggcacactgcaacctctgcctcctgggttcaagcgattctcctgcctcagcctcccgagtagctgggatttcaggcacctgccatcatgcccggctaatttttgcatttttagtagcgatgggatttcaccatgttggccaggatagtcttgaactcctgacctcaggtgatacacccgcctcggcttcccaaagtactgagattaaaggtgtgagccactgcgcccagccacattttttcattgcggtatttcttcttgaatgtttcaatgtcatgtgtcatagcatcacaatgtcttgtcagtacagcttaggttcatactattttcgttgaataatttaatgcagttttcatgttattatgtttcaatcttttttcatttttaaaaatcagcctacatcatgctttgatttcatgttattatcatatttaacatttccttgcctgttatattcctcccacttagtgattttctccggctttctcctggcctcttgttattttggtcactttcctctctagcttgccatcccaaggttgtgcatggtcttgctttctctctcagctagttgcctcccattgacctaagaaactaaggctgctgggccggaggctcctcagcaatttgacgcctcaccagcatccacacttactctcctctcctccctgtctctcatctgatgtccagggaggaggtggcctctgctccttctatttggttgaatccccctgcagtgcctgatccacccacctcctcagcaatgttgaacctgctctggcttcctgccccctcttaccccactgttgtgtcaacctctcccagtcttcagctccttccctaggtctctgcatatgggatttccggacaacacttcctctctgtagcatttgaccctatttgtatcctttcttcatttatgaaaaaaaaatggagcaatgtctgtgtgtcaggcctcccgcagtacctgaggaacagcaggagcaaagtgttcacaaatccctgccctacaaaagcctaaatccacacctcttgcctgatttttttttttttttgagatggagtctcgctctgtcttccaggctggagtgcagtggcgtgatctcggcttactgcaagctctgcctcccgggttcacgccattctcctgcctcagcctcctgagtagctgggactacaggcgcctaccaccacgcccagctaattttttgtatttttagtagagacggggtttcaccgtgtttgccaggatggtctcgatcttctgaccttgtgatccacccgcctctgcctcccaaagtgctgggattacaggtgtgagccaccatgcccggcctcctcttgcctgattttttaaaaaaccacaaatccccagattcatagtatgaaaaggagaaaattttataaatttataaaaaatttataaaagattatcttgggggttaggggttgtggctcacacttataatcccagtgttttgagatgccaaagagggaggatcatttatagccaggagtttgagaccagcctgggcaacatagtgagacccctgtctctataaaaaattaacacaattaaaaaacattaaaaaatgagaagattcagaaaaactaaagaagaccataatagtctatttccccacttatagataaccactgtctactcgtggtatatcctgccgtaccttggtctatgcatgtaacactttaaaaaacaaaataaaaatgtggtattttgtagccttatttgtttttctctcagtagtctgttttgccaaaacaccatatagtattcctaagaaatttcgttataccaaaagtatcttaaaggggagaagaagggttgcaatccagagagctcaaattcacaataacagttattgctgtttaggaacgtacataatgataatttttgaagataattaagtctatgactataagccctaaatatcaccaagcaaattcagagttgatgaagtctacctttactcaaaagacgagttttgtcttattatccctgatgtgtagaggctcctgttattttacaaactcctgtcaccttcaagttctccctaagatgcaaccctaagtcattacttttccaagtttcctgagattccaagagggaccagcaccaggagcaggaaggtggtgcctttctcaggctcgctcttcctggggccactgattcctcacctctactccatttggcaggtctgtgtcactcctctttctaggcacaccacctttccctgcttttttctgcctgcagatgctccccgagtttacatcaccccagatcaactgaaaagtccaaatagcattgcagtcgcccatttccaggaaagcaactgtggttgactcagctatggccagggaggcgcctctgggagaatgcaggaaagggtggaggaaggaagaccagttaggaggttatttcagtcattctaagagagaggtgatggtggcttgggtgaaggtgatgggggaagagatggtgaaaggtggtcagatttccactcccactgggagtgcagcagagcattattttctcatatgttacacttcctctttcttcaagctctatttctcaggcctcctcttcttatccagagtctttggcttcttttcagtcccctttgaaagcccctcttcctcttttagtccctcaaatgctggcgttctccaagattctgctctctcccatt

SEQ ID NO: 25157 - DNA, 35410 bp, Homo Sapiens
tggcatatatacatggcatatatatatatggcatatatatatatggcatatatatatggcatatatatatatggcatatatatatggcatatatatatatggcatatatatatggcatatatatatatggcatatatatatggcatatatatatatggcatatatatatggcatatatatatatggcatatatatatggcatatatatatggcatatatatatggcatatatatatggcatatatatatggctatagagatggcatatatatatggcatatagagatggcatatagagatggcatatagagatggcatatagagatggcatatagagatggcatatagagatggcatatagagatggcatatagagatggaatatagagatggaatatatatggcatatagagatggaatatatatggcatatagagatggaatatatatggcatatagagatggcatatagagatggaatatagagatggaatatagagatggaatagatatggaatatagagatggaatagatatggaatatagagatggaatagagatggaatatagagatggaatatagagatgggatatagagatgggatatagagatgggatatagagatgggatatagagatgggatatagagatgggatatagtgatggaatatagagatgggatatagagatggaatagatatggaatatagagatggaatagatatggaatatagagatggaatagatatggaatatagagatggaatatagagatgggatatagagatgggatatagagatggaatatagagatgggatatagagatggaatatagagatgggatatagagatggaatatagtgatgggatatagagatggaatatatagatggaatatagagatggaatatatagatggaatacatatatattccattgcattgttctttacaaacattcatttaattatgtaattgctaattaattgcttggttgttataacaacgaagtatttgattccttattttatctcatcatttaaattttatttcgcatattttcacaatgcactggatctattactgaggaatttaattaaataatcattcgaaccatgggctcgaattgtttactgataaagcccgacgaccaaaacagcctagcgactgctgtttggagcccctcggcccagggcccgtggctgttctctccaagggaccatctcgcccctcagccaagtcgcccggaaaacgagcgctcgaccgcctctgccccgctctcgctctgcacacagcaacggtctggtcgctcagccacttcctccttccagcctcatctggttcccaggccgctggggactcccaacgccactgtccaagactctagggtcagcaagcgccccgggcggagaagggcgaggacgaagagcgccgggccgcgaccaggagcccacccgcgccctccgactgcagacatggggaagagacgcgggaactccaaagtcgctgggtctgcgcaggtgtgtgccgcgatcctgtgaaggtcaaggcctcctgtgagggggagtcgtcctggaatgcgatggtgaagtgctccagaccggccataggccggaaagagtgaggaagaagagaatgcaggaggcctgcgatttctaaggcgcgcgcgcacaggggtgctgcaattaggatggggcaatgggagcttggagaaggggtgctagctaggaggaaaggcgcgtgcgtggaggaacggcgcgtgcgcggaggggcggtgtgtgtgtcagaagaggcggcgcgtgcgtagaggggcggtgagagctaagaggggcagcgcgtgcgcagaggggcggtgtgacttaggacggggcgatggcggctgagaggagctgcgcgtgcgcgaacatgtaactggtgggatctgcggcggctcccagatgatggtcgtcctcctgggcgcgacgaccctagtgctcgtcgccgtggcgccatgggtgttgtccgcagccgcaggtgagaggcggggaggagagtcttggcgcagggcgggaggtagggcacgcagctgggctacgggggcggcgatgctgttgggggcgacagacgcccagtctgggaaaccttcggtccactttgccgcgccaaagattaaacccgacctgggctcgcaaatcaaccaggagaaagtggtgttctgggtcctctcttgccgcttgcctgtggccgtgtacgggtcctcgggagcgcccgggtcccacccccgtgaaatggcggtgccagagctttgtgtcgagtttgattctttccgggaaagtaccgcggctccgctggtctgtttgataataaacaaaacatttcccgaaatgcatttcctcaatctggtgaataggcgcccagtcccacgggggagtgagctaagtgtggccaggatttctctgccctcaggattcatacaggccaataaaaaatgacagtcggagtgactgaagcataattgtcagttctcgaggtttactaagcctgcttcagggcgcatccgggaaaaacgtgagccacaaacacgtctgtgactggttttccagaggttttcaggaggtggggcaggaaggcagtaaggcaaatagttctgtgagaatttagttagtgcccaagaaatctgtattttaagataccatgagtgtcttgaagagaaaaagagagtaaagggagtcagttatgcagatgcctctgggtagatggagtcttgactttgttttgcacctgagaagataagcttgtaattgacatggtcagtgtggaaggcctgaactagtttttcagattaactttggaatgccatttgttgagaggagaggtccattcacattgttggggggcttagaattttatttttggtttacttaactacctacttttttcccaaagaaataatcatgttcaaaactcaatgaaatgttatctcaatgagattgtaatgttgctcagtctttcagaagtcataaaaatagtcatactttttaaactagtaaatgcaattctaggacccaagactaagaaaactgtccaaaatatgggaagacatttttatttatacttttttttttttttttttgagacagcctgttgcccaggctggtgtgcagaggcgtgatctcagctcactgcaacctctgcctcccaggttcaggcgattctcctgcctcagcctcttgagtagctggaattacaggtgcacgccaccacatccggctattttttgtatttctagtagagatggggttttgccatgttggccaggctggtctcgaactcctgacctcaaacaatccacttcagcctcccaaagtgctgggattacaggtgtgagccaccacgcccgatctatttatgttttagactttagttttaggaactagacttaggttgtagacctgaagttacagttggcatccccttgtttatgggagaccagcaaagaattgacttatgaatgatctgtcggggtagcccttcgcagatggctgagtctttttatccttccttggggatttggctgaagcataatgctagtaacagccattcatttggaagagggtgttgcagtcacttggcctctgggcttaactaacttcccttttgcgtaagaaagttgggagaggtcctgagatttttttttttcttttacaaaaataataaaagaaaaatacaaaggcagggcgtcaccaggctaatttgctgaaattcttcatacttacttgggatgcatgggggaatggcaactattacaaggttgatagagagtgagaggtaattttgtagtgaggaggggtacccaaagagaatcagggctagcatcccagtgcaggagtccaggtggtctgtgagcctgcaagtgagttcaaaatactttacctgttggcttaggaaaccatatacctgtgtggtacatgatatcctatttctcaaacttttccacaaatatgtagtatacttttcctaggatgtgggtactagggtcctggtgcatcccatagtaatttctttgaagtcttttgtttatgaaaaacttgcattaaactcatgtttggtttgatgtgaaaaaagctttcccagaattttcatataaaattgacattccaggagggtgtgcattaagaaattaatttaaaattaggttagcggacaggtggcaagatataatttataggcatttatcatttcttaagctcttagctgtgtgccaggcagtaatctaagtgttttaaaggtataaactcattaagctttcagagcagtgtagatactgttatgcttagttaacagacaaggaaactgagcaacggagagatcaagtaacttgcctgaggctgtataggccagtccgtggaggagtgggaagtcaaatcctgagtctggactaatagccttggggcttaaccagactagactgttttcccaaaggccaaacaatttaaattcctgattgtccacttgtatgttaagggcctaattatcagtatctttcagttaactgtgagcccaaaaatatctgagaccggtctgaaatcaacttagaaagtttattttgccaaggttaaggatgcattcatgacacagcctcaagaggtcctggccacatgtgcccaaggtggtcaaggtccagcttgcttttatacattttagggagacatatcaatcagtacatctaagatgtacatttgattggttcgatctggaaaggcaggacaactcaaagcaaggcttccaggtcataggtagatttaaagattttctgattggtaattggttgaaatcaatggaaaggaatgtctgggatgtcctaaggggttgtggagaccaaaattttatcatgcagatcaagcttgtccaacccacagcccactggccgcgtgcagcccatgatggctttgaatgcagtccaacacaaattcgtaaactttcttaaaacatgaggggtttttgttttgtttgttttctttctgtttttttgtttgtttgtttttagctcatcagatattgttagtgtattttgtgtgtggcccaagacagttgttcttccaatgtggcccacggaagccaaaaagagtggacacccttgatgcagatgaggcctgcagatagcaggcttcagagagaatagattgtaactgtttcttgtgaaacttaacgtctgtgttgttgttaatggtggttagctttttctgaattccagaagagaggagggtataatgaggcatatccaaacctcacttcgcatcatggcctgaagtagtttttcaggttagctttggaatgcccttggtcaggagaaggggtccattctgatggttgggggacttagaattttatttttggtttacgtaactatctactttttccccaaaaaaaatcatgttgaaaactcaagaccttaagtttacagctcaagctgatcctgaaagttatctcagtgagattgtaatgttgctcagtctttcagaagttgtataaatgtaccttttagcctagtaaatgcaattctaggactctagattaagaaaactatccaaaatatgggaagacatttacttacatatttgtacagatatctatatttggatttatgtcagacttaaagatatagtaaaccattttggtcgtgaaaatgaatgtgaaaggttgaaagcaaccaaaattataaatgcattatatatatattagattaaatgtccatttatacatttacatgtggggtaattaattgttaatatactaatataaaacattttaatatactagtaaattaatatattgtatgttaatgttacataacaatttatgaaaaaattattaaaaggagattgccaataataatagagcaaaatctgtgaaaactaaaatcctgtttaataactttatttccaagcccctgtccatttatcagtcagttatttgttggtcttccaaatgccaacatgcctgtaacttcagggtctccttcttttagcagtaaaggattttttttctccctgaggaaatcactagctgtaccctataacattttctattcttgtctcaaggcccaaaattactagaattataatattctgcacaagatattgtaaatactacaaatgccatcagatcttttgttaaactctgtaaacccagttgctaccctttggctgcatagaatctataaattctaacaaatggatgagaaccaagttaagaattctagagtgggataaggggatgtgatgtattctattcagggatgaagttttagagactccaagtatgaaacagaaaattgaggatggggagacctgatgggtaccacattaagtttaaaaaaaaaaaaagtgttttctcagctgtctccccttttgaccccatactataagatctaactggaaagagcaagaagctgtctcagttaagaaagttctatacaagaacccctgtggtagaacaagtctacaacaagataacatgattgccccaaggcagaagtaaaagaaatattgtaggaaccataaatgaatttaaaagctgatcttttaaaaaatatataacttatcaaagtgagagatcagtcctttatgatatttaaggagttcctgtgaatgcaccattatgctggatactctgaaaaaatgcaaatcaagtatgaagcgatataaattctgcccttaaggaacttgcaatctagttggagatttatgtttaacacaaagaagcagtttttacaaatacttcttttgaggattctggaaagatggcagagtagaaagcaccaggaatctgtctcctcacctagacaagaattgtactggcagaatctgatgtaactattttggaactctggagtctattgcaggcttgcaacttccaggggacagacttagatggtaaattgcagttaattttggtctatttgagctcttagtacagtagcagctacccatcttccacctctcaacccttagcagacagctgtgcacgttattagagcaatctgcacacaacttacaggaatcaggtgggcaaaaagaaacacaccatccagatatctgggatctgtgctcttgattggtcattgctccttctcgtcacaaaagcgcaaagagatgggcggttgttgttgttacaccttactcattgttacaaccccctccccactcactcccctgccccatggatttaaagggctagaaatctccctctgcttcatttttctctttcacttttgggagccggatattaaagactaggacatttaaaaacaactgcatttatggggaaaattagaaagtcactgtacatacctagggaaaggctcaggagagaccttaagtttatagctcaagctgatccttggcacaggattaacaacaattacacagcaattaaacaaagcaaacacacacacacacaatgtagtctgggagagtgatgttagcaagatggccaactagaagccccttctgctcatcccctcataagacagccagaacaacaaataaacaactacattttagcaaacttaactaagagtgctagagtgcatcaaagaagtaacagaaatcctagtgagcagagaaaagtgggatggccacatggagaatgggaggaaatgccaggattcctaggatcatctgggaacgaggaggaacttcttcctatggcaaggagataaacaagaagatcccagctacaccatgggcaccaacagatctcaccactggggttccttagagtccagacagcaactaagccaagctgaggaagctgcctagagtctgcacagctgtgttccctccagagaaggagccaacactgtgctccacctgctgtggcccacacagctactgtgccactccaccttggaactggaactacttctggagtgtgtcttgcttcggggacttgtagccatggcttcctttcatctgaaccacgccaggctggtggctcaacatccctaagctaaactttaagcagctgttacacccttccctgtggagtcaagcagaggtggaactactccacctactcctaccccactgcccttgggctagagctgaagcagtatcctatttcctgggaacacactaccttggccacccagagcagtcatgcacccctgtgcctaagctgaagtggtatacggcattccagggaaacagggcctgaaccacccagagcagtcacactccccgggcctcagctgaaggagcacatcactccctgcagaatcagtgccctggccaaaccgagcagctatgcatcccagggctgagctgatgtagtatcctatgtctcagggaaacagagcagtggctgagctgagacaccctgttctacaggccaaataactgtagtaccccgcttccctggagctggactagtcctctagagcctgagctgctgagacactctgaggagtggagtcatcactgtgctgttccctaccccccattcccagcccagacaacagctatgcttcaccattttgtagtacttgctgctgctgctacacttggcctcacagtctggggtactgcttatccctagctattccaagatttagagtcatgacttcatggtgcctcatcccttgggacctgtgttgccactgagccctattagctcatattcccaaattaaaaccataccctgctccccaggcccaaacctccagagaaccccttctttatagtcaggccagtgctatgccctgacccccataggggtagaatcaaagctacaacccattctctgggcctaagctgccaggaagcacctccaggtcacaaatcctggctctgtgagcaactacgtccaagccctgccacagagagcaaacccacctcagcaaccaagtgtctcagtaggtttgtgagatcctgagcctaggacctttgcccagtagccactctgaataccttcatctggaatcaagagctgctgcagctgcatatatatagcccctgtcagacctgacaccaagaggtgttgccttggctgagtctccccattgtggggaagacaagaataggaggatcctaaaagccttcaacactgagaacattaacaacctacactaccactgccacaaacttctgcagcctaggcccctgaggcacccatttactactgacattgaacacaggtaaagcagctgctttaccataccactgcatctgtcaggaaacagtcaccacacccttcgaaaccagcatactgaaacccaactgctaataaaagactttatctttgaaagccactgtctgtaaagtttggaagaggtaattatcctatcaacacaaagacacaaaaacatgaaaaagcaaggaaatatgacaccaccaaaggaaagtaagaactctctaatggtggcccaatgaaaagaagatcaacaaattgctggaaaaggaattcaaactaatgatcttaaggaaactcaacaagatacaagaaaatacagatagttcaatgaatcaggaaaacaattcacaatacaaaaaattcaacaaaaaaattaaaacatgatgaaaaacaaccaaacaaatcctacagttgaagaattcaatgaattacatttaaaaaatacaataaagagcttcaataacagacttggtaaagcagaagaaagaatctctgaacttgaagatataccatttgatattacttaattgtagaaaaaacaagtgaaaccctacaagacttatgggacatcattaaaggaacaaacgttcatactatgtaagttacagaaagaggagaaaaggtaagaggcatatacaaactatttaatgaaataatagctgaaaacttcccaagtctggagagagatacagacatccagatccagaaagctcaatgattcccaaatagatttaacccaaaaaggttctctccaaagcacattattatctgttgtcaaaagtcaaagacagagaaagaattctaaaaatagcaagagaaaggcatcaagtcacatttaagaaaatccccattcagctaacagcagatttcttcacagaaaccttacagtgcagaagaggatgggatgatatactcaaacagccaagaatgctatgcccagcaaaactatccttcaggaatgagggagaaatacagtttttcccagacaagcaaaaactgagggaattcatcactgctagaccagccttatgagaaatgctccagggagtcctacatctggaagtgaaaagagagcagtcagtatcttgaaaacatggaaaagtataaaactctctgatagagcagatacacaaaggagaaagagaaaagaattaaaccttatcaaaccatcaaaccacaatgataaataataagagaggaagaaaggggcaaaggatattattagaaaactttaacaaaatgacaaatgtaagggctcaaatatcaataataatcttaaatgtaaatggattaaattccatacttaaagagactggcggaatatttttttttttctttttttttttttttgagacggagtctcgctctgttgcccaggctggagtgcagtggcgcgatctcggctcactgcaagctccgcctcccgggttcacgccattctcctgcctcagcctcctgagtagctgggactacaggcgcccgctaccacgcccggctaattttttgtatttttagtagagacggggtttcaccgtgttagccaggatggtctcgatctcctgacctcgtgatccacccgcctcggcctcccaaagtgcggaatattttttaaatgactcaattatatgctttctataagaaacccacttcacctataaagacacatataaactgaaattgaagggatggaaaaagttattccaagcaaatggaaaccaaaagctgtcaggaattgctatacttatgtcagattaaacagacattaagtcaaaaactgtaaaaacagacaaagaaggttattatataatgataaagggaccaattcagcaagaggatataacaattctaaacatacatgtacccaacaccagagcacccagatatataaagtaaatattactatacgtaaagggaaagatagactccaatatgatagtagttggggacttcagcaccccactctcagcttcggacagatcagcaaactccaagtacagtgaactcaaagagaccacaccaagaaacagtcaaacttttgaaagccaaagacagagaagtgacttgtcatacacaagggatctttgataacatgatcagcagatttctcacctgatactttggagaccagtgtattcaaagtgctaaaaaaaacaaaaccaaaaaactcaaaaccctgtatatggcaaaattgcccttcaaaagcataaggaaattaagatgttcttagatagacaaaagctaagggagttcattaccgctagaactgccctgcaagaaatgcttaaggaagtcctgaaaggtgaaatgaaagggcactagacagaggggacagtgcagattcaggcaggtgcaatggcttctggggaagacccagccagtggggctattgccagcatccagtcagctgccaccttccctgaccccagtgtcaagtgatgcgcagggtgatccaggtgtgtgaggggcagctggatgtccagactgagggcactggtgccatcagtggctatcctaccactcaattcatgacccaggtggtgatccagggtgatatcaccagttatgatgcagttaacacagaggggaaagctgctgagatacactatactttcccacccctgcagtgggagatggggcagggggtaccacatcagggagtacagctgctgttgttactacccagggctcagaggcactgcttgggcaggtgactcttcctggcactggtcaattatttgtgatgatgtcaccacaaggagtactgcagggaggaagccagcacttgattgcccctaggactcaaccttatttatttggacgtaacaccattgtaagtcaagaagcatctctatctatctatgaacatacaatgtgaaatcaaattgaggccataaaacagttgaacctcatcataagagtgactcatcggtgtcacttctaagaccaagaaaaattctatttttatgcagagaccatttgttttttaattaaaagacaactctatttcaaagaggaaaaaaaatcaactcttttttcagctctctcagatgcagaaatgtaattatcagcatccctgtgctgggagcaatcattagtttttttagatttttaaaatatacttcattatgtttcactgtattcattctttaatcagggatgtgagggatagaataacatttagaatatctgtacagtttgtatataatgttcttatttcttgttgcttttataggtggaaaaaatctaaaatctcctcaaaaagtagaggtcgacatcatagatgacaactttatcctgaggtggaacaggagcgatgagtctgtcgggaatgtgactttttcattcgattatcaaaagtatgtgactctacttactgatttgtcagaatgacctgaataatttttacaagtttaacaacaccataatttttagatttggaaagtgtttggtttttctattttttagaaatgttacgcctattttacataatatttttaactttgtttctgtagagacttagtcaaatacatctttgggtgttgaagcaaaaaattggggatgagggtggtagacagcgtctctaacccatagccattccttctttcttctgggtgttccagcttcttttttttttttttttaattattatactttaagttttagggtacatgtgcacaatgtgcaggttagttacgtatgtatacatgtgccatgctggtgcgctgcacccactaactcgtcatctagcattaggtatatctcccaatgctatccctcccccctccccccatcccacaacaggccccagagtgtgatgttccccttcctgtgtccatgtgttctcattgttcagttcccacctatgagtgagaatatgcggtgtttggttttttgttcttgcgatagtttactgagaatgatgatttccaatttcatccatgtccctacaaaggacatgaactcatcattttttatggctgcatagtattccatggtgtatatgtgccacattttcttaatccagtctatcattgttggacatttgggttggttccaagtctttgctattgtgaataatgccgcaataaacatacgtgtgcatgtgtctttatagcagcatgatttatagtcctttgggtatatacccagtaatgggatggctgggtcaaatggtatttctagttctagatccctgaggaatcgccacactgacttccacaatggttgaactagtttacagtcccaccaacagtgtaaaagtgttcctatttctccacatcctctccagctccagcttctttcaatataagttggggtctgagctagggtatatcttgaagatatggcattgtactccaaaaggtccatcgaagaccttggaataggccaccaggtttcctgtgatcaggctttcctattatctccatgatatactatattttaattttaggtacactttttttttttttttttttttgaggtggagtcttgctgtgttaaccaggctggagtgcagtggcacaatcttggctcactgcaacctccacttcccggtttcaagcgattctcctgccttagcctctcgagtagctgggattgcaagcacatgccaccatgtttgactaatttttttatttttagtagagatggggtttcgccatgttggccaggctgatctcaaacttcttacctcaggtggtctgctcacctcagcctcccaaagtgctaggattacaggcgtgagccactgccctggcctagatacactttgtaaatatattgttaactgggcatggtggcatgtgtctgtaatcccacctacttgggaagctgaggcagaagaatcgcttgaacccaggagacagaggttgctgtgagccaagtttgcaccactgtactccagcctgggagacagcaagactccatctcaaaaataaataaataaataaaataaaataaaaatcgatatattggaccttgcatttctaaagactcagtttttctggagtgttgatgtctcttccttagtactttctacttaattattcaagaggagaggcaggcagaaggaggaatatagaagggaacacagatcaggaagtacagtactttgccttccgattatgtgttggggccccacctgccaaccatgttcccctgtccaagaaaaagcaggcaatgaagaaataaggcattaggccctccggaaccaggagcccaccacttcagccacagctgtgacactattctcgagttgtaactaaaactggcatatgaatctcacagcttcagtaattgtgtatgcatatataaacaaatacacactgtatatatgcatatatacactatatatatacatactgtatatatacattacactatatataatacatactgtatacatacatatacacacattgtgtatacatacatatacacacattgtgtatacatacatatacacactatatatacatatacacactgtatatgtatatgtatatacacacacaaattcatatatgacttttctcagaattgatcatttaaaattttttatctctagagattttcattaaattgaactttgagtttggttaccagttttgttttttcccttagtttggaatttccttatgaacaactattttaggtagagaaggaattatttcagatacccttatttaatgttacttgtataaagaaactatttgcaaaatatgcatccaacaagagcttaatatccaaggaactcaaacaatcaacaacaaaacccaaatccatcaaaaggtaggcaaaagataggaatagatatttttcaaaagaaaacatacagtggccaacaagtatgtgaaaaaatggtcaacatcactctaatcatcagagaaatgcaaacgaaacctgccatgagatattgtctccccgcagtcagaatggctgttattaaaaagttaaaaaaggctgggcatggtggctcacacctgtaatcccagcactttgggaggccaaggcaggtggatcacctgaagtcaggagttcgagaccagcctgaccaacatggtgaaaccccatctctactaaaaatacaaaaacttcagccggatgtggtggtgcgtgctgtaatcccacctacttgggaggctgaggcaggagaatcgcttgaacccaggaggcacaggttgcagtgagctgaaatcgtgcccctgcactccagcctgggtgacagcaagacttcatctcaaaaaaaaaaaaaaacccaacaaatattgaatatatttcatgccaaacactcttctgactgcttagactgcctcagtgaacaggagaggcaaagatggcatgaagttatattatgaaacggatttcatgaagtaaatattacattagttacatattcatatttcatattctgttctgagctaattattgcatatgataatagtttttttgttgttggttttttttttttgaggtggagtcttgctgtgttaaccaggctggagtgcagtggcacaatcttggctcactgcaacctccacttcccggtttcaagcgattctcctgccttagcctctcgagtagctgggattgcaagcacatgccaccatgtttgactaatttttttatttttagtagagatggggtttcgccatgttggccaggctgatctcaaacttcttacctcaggtggtctgctcacctcagcctcccaaagtgctgggattacaggtgtgagccaccgagcccggccaataatgatttttttaagaaaatataaaagtagcttctgctgcaatatcttgattagatgtaaaacagttttaatggagcatgcttcagcatctcctgaaataggaaagacagatgtaaacagtgaggttgggttgaaattatattaagttttaaatttttgataaggttttctgtttataatgagagtttctggatttttagaaatagattctgatgtggaaccttttcaagaatgtttaaggtatttttaatgccagctctaatctcaggcctcagatatgtaaaagtggaagtgaaaactggccaagaatgaagtatttcatatgctagtgtatatttttggtaatttcttaaaaatgtttccattttgaaaaacaaggtagacttgtatttggttcagcaacaaaattattttggtattatctctggtttctaatatctaaatcgtctttaaaatggcatctgtgatattattaaaaataaataaatcagctaatgaattaggcttgacaaaaatgccttcccagaagatagtttctctgctacttatggtcaatgggcttaacataggtaaaagttctcaaatctgctaaattggccgggcatggtggctcacgcctgtaatcccagcactttgggaggctgaggtgggcagatcacctgaggtgaggagtttaagatcagtctagccaacatggcaaaaccccatctctactaaaaaaaaaaatacaaaaattagccagacgtggtggcacacgcctgtaatcacagctagttgagaggctgaggcaggagaattgcttgaacctaggaagtggaggttgcagtgggccgagattgcaccactgcactccagcctgggcaacagagtaagactctgtctcaaaaaaaaaaaaaaaaaaaaaaagaaatctgctaagttcgtttctatccctcactttccctgcaagctcttcttcccctttctgggcaacatgtccttttctgctttaggcactccatgcccactttatttttcatgtttgccccttttttgaaaggaagaatctaatatcacttcagctttctgattggccagttccacttccaaaaatttatttgtttatgtaaacattttcagttttgtggtttctgatgatgtaatagaagaaattacggagacaggcaagcagaagggatggtttgcttttggagagggcagaggaaaccttgaaaccatactgattctgaggtctttcttagggaaggtaagtctattcataggaggaggtcagaagggaatcatcaaatccaattccccagtttctatttaattttattttattagagacagggtcttgctcggttgctgaggctggagtgcagtgatatgatcatagcctactgcagcctgcagccttgaacccctatgctcaaatgaccctctcacctcagcctacccagtagctaggactgtgggcatgtgccaccatgccctgctttgcctttttttttttttatttctcatagagacagggtttgctatgttgaccaggctccaaactttcaataaggaagataagatccagaaacacaaaatagtttaccaaaagtcacacagctatttttaacagagccaacatactaaatccacttttaccttatgggtcatttatttctctgcttcctgaagcaaccacccacaaaattatataaagaactgtattttaaaattcagtttcataagtaataacttggcttatatgcattgaaaaagagtggaagggtgtatgctaaaatgttaataggacattagctcaagtagaagaaataactcttaaaccaaaaatagaaataactcttaaacaagagttattaagagttaagaaataactcttataccagtaaatagaaagtatttgacacttacatttatacatttgctcactcattcatttgttttttttactttaaagaactgggatggataattggataaaattgtctgggtgtcagaatattactagtaccaaatgcaacttttcttcactcaagctgaatgtttatgaagaaattaaattgcgtataagagcagaaaaagaaaacacttcttcatggtatgaggttgactcatttacaccatttcgcaaaggtaagaaaaagttgctagctgaattatattctttagtaaatattaccagagcagttcactttccaagccattcatttgcatgatgcaaaatctaacatcttttaaaaagaacaaaaattcccttaaacctatatcttcttcctgctatggctccatttgtcctactttccctgtagtagtggttctcaaagagtgatcctcaaggccctttcagggggctgtaaagacaaagctatatttatgacaaatctaagacttagttgcctttttaatttttgttctttcttgtattcacagtggagttttccagaggaggctgtttgatgtgtgatgtggtgatatggtcactgatttaacatagaattcaatgtgaaattcatctgccttctttattaatccaaacattcaaaagatttggaaaaaaaatgtaaaacagcaccactctgaagtttctatgttccttttggcaaatgtttgttaccataaaataggtttatcattgttatttctttctttttttttttgagacagagttttgttcttgttgcccaggctggagtgcaatggcacaatcacggctcactacagcctctgcctcctgggttcaagtgactctcccgcctcagcctcccgagtacctgggattaccagcatgcatcaccatgcctggccaattttgtatttttagtagagacagggtttctccatgttggtcaggctgacctcaaactcccaacctcaggtgatctgcccacctcaacctcccaaagtgctgggattacaggcgtgagccaccatgcccagtccattgttatttcttaatggattaattagttaaaatggattgaaaactttaccagttttaatgtttaatatgctaatataaaaatatacagcccacataaataatggctgtttgggattctcgataattcctttaagaatgtaaaggagctgagtgtagtggcccacacctgtaattccaacactttgggaggctgaggtgggaggatcacttgaggccagaagttcaagaccaacctaggcaacatagtgagaccccatctctacaaaaaatatataaaaattagccaggcatggtggtgcacacctgtagtcccagctattcaggaagctgaagagggaggatcacttgagcctgggagatcaaggttgcagtgagctgtgtttgtgccactgcactccagcctgagcaacagagctagaccatatctcaaaaaaaagtggggatcctgagaccaaaaggtttgagaaccactgccctgtaccaagaatgatctgtactccctttctatactaatcttccaattccctgtcagccctctccattcaaattctgttcctcctcacttaaaaccactctttttggccaggcgcggtggctcacgcctgtaatcccagcactttgggaggccaaggcgggcagatcacgaggtcaggagatcgagaccatcctggctaacacggtgaaaccctgtctctactaaaaatacaaaaaaaaaaaaaaaaaaactagccgggcatggtggcgggagcctgtagtcccagctactcgggaggctgaggcaggagaatgacatgaacccgggaggcggagcttgcagtgagccgagatcgtgccactgcactccagcctgggcgacagagcgagactccgtctcaaaaaaaaaaaataaataaaccactcttctcaaggtcacagcagcctccacaatgccaagcaaattcccagtcctcttctggcttcatccctctgtagcatagatgtggtcatcactcagtttttcctttactggatctctgggacactgctctttcctggttctcctcctgctcattgatcgcttcatcttcccaacttttcagtgttagactgctgctgggctcagtcattgaacctcttctctttctgtatcactccactggtgatcttacagctttctatcctatctgtatgctcttaactcccagaagtggcaggcacatattaagtgctcagaattatttgttgaatgaaggttttggcattgtattaataaagttccatagtaattgttttgatttttttgcagctcagattggtcctccagaagtacatttagaagctgaagataaggcaatagtgatacacatctctcctggaacaaaagatagtgttatgtgggctttggatggtttaagctttacatatagcttagttatctggaaaaactcttcaggtgtagaagtaagcattatttttacctctgtttaatcgatgtgagagaaaaattaggcgaattaatcctaaaatttgactttatacttttttaaagaaccaacttatatttgtgttataggaaaggattgaaaatatttattccagacataaaatttataaactctcaccagagactacttattgtctaaaagttaaagcagcactacttacgtcatggaaaattggtgtctatagtccagtacattgtataaagaccacaggtaaggaagatgttttgttttagattcaataaatatataaacagattgtcaattttggcatcttccccatattgctgaagtttacatgataggtcaatatatgttaaaaacattgtaacatttacataagcaaaataaatgttacttgggatttttgtctcaaatagtaatgaaaattaattctacttaaaagttcaggctgggcgtagtggcccacgcctgtaatcccagcactttgagaggctgaggtagctggatcacttgaagccagaagttcgagaacagcctcgccaacatgggaaaaccccgtgtctactaaaaataattagctgggcgtggtggctcacgcctgtagtggtagctacttgggaggctgaggcacaagaatcccttgaacctgggaggtggaagttgcagtgagccaagatcgcgccactgcactccagtcgggagcaagggggacaaagagtaaggctccgtcttagaaaaaaaaaaaagttcaaatattttgtaatgacaaaacttttcatttgttcagaatccacatgaagcaggaggtagctgaactatgagttctgcaagtgggaagaaaaggtggggaagtagttgctagtagacaagttattgttcaagaaagcatacctttgtaagtggaatgttaaaatatgaaagtatcctgatacatttagtaacatctttccaataattaaggtcaagggcaggagctgggatttgtttattttaattgtaaatttcatatgcttttttttttaatcaaacattacggaagggtttaaagtgaagtcttcttctcccttcttatccccaattccattcactagagataagcattgcttagcagtttgtgtatatcctttcacaacttttttcaggatttatgtaagcatatacacagacccacagtttcttgggttttgttttttaaaattacaaaataaaatcttactagaagtattttacagcttgcttacttaacccagtgtgttggggatattctatatcactcaatacagatctattacgttcttcatttgatcttagccatctattgcattctttcttttttacttatttatttatttatttatttatttatttatttatttttgagacagagtctcactctcttgcccagaatggagtgcagtggctcaatctcggctcaccgcaacctctgcctcccagcttcaagcgattctcctgcctcagcctcccgagtagctgggattacaggcgtgtgccatcatgcctggctaatttttgtatttttagtagaaatggggtttcaccatgttggccaggcgcgtctcgaactcctgacctcaggtgatccatccacctcagcctcccaaagttctgggattacaggtgtgagccactgcgcccggcctgtagtctttcaaatggctgcatagtattacatagtgtgaatacaaaccatatttaactattaccttataatgataaaatgcgagcctttatcttcttgccagttatctcacttgagtaaaaatgtgtgcttttttttatctgttctttggcttctagttgaaaatgaactacctccaccagaaaatatagaagtcagtgtccaaaatcagaactatgttcttaaatgggattatacatatgcaaacatgacctttcaagttcagtggctccagtaagttccattccataaatttccttttgcccagtttgttttgattatgcttcttttcgctctgcatcagtcaccaggtccttgcacacagaatgaccgactgggaggtgggtacgatatattggaaacgtgagaaatctcatttctaaccccagttctgccagtaactaactggatgacattgagctaatcgcttaacctccatgggcctcaatttcttcacttgtaaaatagatggattctaatatctggggttcttactggcttaagaaaaaaaagaaagtgtaactagttgcatgtgttatttccccaatctggaagactcgacagttgaccctgatctttttctaagaactcacttcttccatgagtccttaaaatgatctcagtccactcacttgttcaattcaaaaaattagccttcctattttctttattactttagtggttttgacaaaattttgtagtagatacttcggtgggaaagaaagttggaaagaactatgttctatgtggttgagcagaggctagctaaacatggatgaagtccaggcgctgcataaatgaaagagaactggcctggtgcagtggcgcatgcctatcgtcccagctactcagtgggctgaggcaggaggattacttgaggccaggaattgaggctgcagtgttgtatgatcacacctgctagtagccgctgcactgcagcctgggcaacatagtgagacccccatctctaagcattaaaatttttaaaaagctgataaaagagaactgcatgtagtttatattgattggaaaattgtaggagatgaatagagaaaagagaagaggaaaattaagtagaaggaaaaatgggttatggggagaaaagagatggaaagaaagatatacattggtggcagaggagtagagagagcaaaggcaagtatagctaagacaggaaaggaaaagtcagaagaaactggaaagaaacagaaaaaatgagggagaagggaagtgtaagtaccgctatgatcaatttctatcttttagtgttaattttgaaccaagggtgactggtagaatgcaaatgcatttatgtgcatatgtgccccacaatgcatatataacctcacaaaccaatcaggaaactgttcagtagtcttttgtgtatacctcactttcagaagtgaataaataatagggtcaccaaatagataatgagaggtatttctgatagctgatctctaagcttcttttgggtacttaccatattgtacaaagcactgaagaaatggaaagagtcagcagaatcaaacgtggttcaaaaattgaaagcagttagccaacattgcaaagtgttgtgtggtttaggactaaagagtggtatacaaattataagggttgcagaaattgaaaatgtaaaggtgaataggggctaaagagaccaaagaagccataaggaaagagataaggtatgaacaaggccttgattgttaattcagattttttttaagtagacaactattagatgttagttttctgtgtctgtaactaattaccacagacttagcaacttaaacagctgtttattgtctcaaagtttctgtgagtcaggagtccaagcgtggcttagctggctcttctgctaagcagtcaaggagtcagtcattcatacaagacttgggggccgctcccaagctcacatgttgttggcagaatttatttctagagctcatggtggctcacttcttagaggccatcaggaagggagagtctgacctctagatccttttttttttttttttgagacggagtctcactctgtcacccagactggagtgcagtgacatgatctcagctcactgcaacctccgcgtcctgggttcaagtgattcttctgcctcagcctcccaagtagctgggactacaggtgtgcaccaccacacccagctaatttttgtagttttagtagaaacggggtttcaccgtattggccaggctggtctcgaactcctgacttcaggtgatccacccgcctcagcctcccaaagttctgggattataggcgtgaggcaccgcgctcagccattttttttgtatttttagtagagacggagtttctccatgtttgccaggctgttcgcaaactcctggccccaagtgatctgcccacctcagcctcccaaagtgctgggattagaggcatgagccaccatgcctggcctagatcctcttttaaggggttcatctgattaggtcaggcccacccagaatagtctctcatttgattcaactgatttgggaccttaattacatctgtgaaataccttctcttctgccacttaatgtaacctaattatgagaggagggcctccatcgtatttacaggtcctgcccatgctcaagaggaggggattatacaggatgtgtacaccagggggcaggaatcttgggggccatctcagaattttgccttctccagtggggaggatgtccttctagagtagcagaacatttggacaccaggtggcaatgggaagaaagctgaataagtagaatgggacaagattagggtcaacctcaggctgtcctgtaggcttttggggattttgtgttggggtgatagttaacctgagctctggatttgaggaaggtgcatgcggcgacatggtatgtgggagagtggactaaggagacactaaagagagataaggaaaccagtcaggaggctattagagttctgggcttgaactgagatgcttttagctgttggtttctgggcaagttacttaacctctttagtctcgtacttatacttgctcttataaccccgcagtgtgtctctattttagcacttaatcagtgtccattggtatgctggcgcatgtttagcagctggctttccagaaagaaaaagtcctattttgtagtgtttgctgatttttatgatataaatattcccaccatggccactttcaagccaccagcctgatgtccctgaatatggagttgggaacatatgcacagtagcacaccactatcatatagctacaatagataaagatagccccaagagcttagaaaataaaatgtagtaaaataattaggacaagatgaatttatttattacctctgtctttaaaacaattttttatttgcaaatttatataacttaatttttagtaatggtttttctttaaaaaccagtttgtattttaggaggccgaggtaggtggatcacctgaggtcaggagttcaagaccagcctggccaacatgacgaaaccccatctctactaaaaatacaaaaattaggcaggcctggtggcgtgcacctgtaatcccagctactcagggggacagaggcaggagaattgcttgaacccaggaggcagaggttgcagtgagccaagatcctaccactccactccagcctgggtgacagagcgagactcggtctcaaaaaaaaagccaaaaaaaataaaccagcttgcagcattcctggaaattctaactaacagatgttcttgcatattgatatgagccacctccagcagagcacaacatgaccacagtctggaacagtctttggttttcttttatgttagatgcatatctcttccattgtttgtgagtttcctgagtgtggatactatttatttctgtaaccttagcccctaacatagtgtctggcaattgtaaatacttaataaatatctaatgaatttaaaaaatatttgtcttaaaagcgcctttttaaaaaggaatcctggaaaccatttgtataaatggaaacaaatacctgactgtgaaaatgtcaaaactacccagtgtgtctttcctcaaaacgttttccaaaaaggaatttaccttctccgcgtacaagcatctgatggaaataacacatctttttggtctgaagagataaagtttgatactgaaatacaaggtaaggcagtagtttttactggagattgtaattctctggtgcaagtttttaaaattgtttttctaattgaacattatttctttacaaattttttctagctttcctacttcctccagtctttaacattagatcccttagtgattcattccatatctatatcggtgctccaaaacagtctggaaacacgcctgtgatccaggattatccactgatttatgaaattattttttgggaaaacacttcaaatgctgaggtaaaaagactgtatagtataattttgtaacttagagttataattatgatttgggtaaataaagcttgaatgtaaaatttgggggaaatttttaaactttatgtgggctggatgcagtggcctgtaatcccagcacttcaggaggccaaggcgagaggatcacttgagcctaagggtttgagaccagcctgggcaacatagggagaccctgtctcaataaaaattttaaaaaattagcctggtgtggtggcgtgcacctatattcccagctacttggggtgggagggtcacttgaacctgggaggtcaaggctgcagtgagccatgatcgtgccactgcactccagcctgggtgacagagtgactgacagcttgtctttaaaaaaaaaaaatgtgattaactcagatattaacaaaatgaagattatgagcatttttcatgttttgcactgtagagttatgggtgagctgcatctgggccccagtttgcttttaaaatacagattcctgagcctattgttactgaatcattatctctggggatggaactcaggaatttgcatttttaacatgattcccatgtattcatctaaacctgggattctcagcactattgacgtttgggctggatagttccttgggagggggctgtccagtgcagtgcaggatgcttggcaacattctggtttctgcctactagatgccagtagtgttccttcctagttgtgacaaccaaaaacatcttcagatattgtcaaatgtcccctggtggctcctccaaggggacaaaaattggttcttatgggacaaaagaatttatgtagtacagttgtttgttttcctccaaaaccattggaaagcattcttccaaagttcagctttgcccaacaaaatcttattccttagtatttaattttatgatgggggaaggattaggaaaaaattgcccaaaaagttgtttagttggggaggtaatgaaaaaagggttgacaaacactggtctaaaccctaaaattcagataccactgacaaagataatatataccgtcagataatatacgtgtttcccagatcacttccccctcgtggacttgtagtcaagaatcgacctttaaaactcctgtccagtcaggctggtaaattctttaacttcacctcattttctattggaaatctaagcaaattccattgatttggctgcttccctttttaattgtctgacaaccctgtaaccatagcttaatgtagcccattgagaattatggtcggttttcagatgtctgtagatcagacaaacctaaatttctatctcactgctaaactgtgtaaccttacgtacgcagggtgctttacctcttggagactttgcttcctcttctctgaagtggtggtaatcataacaactaaatttttcaaaaggatgtttataaggtttaaaaggaagtaacaaatatgaaaatacctagcacattgctggacaagtagtagagattcaataaattgtagttgccatcttaacctatactggataatatatcaataattgttactatagaaactcttattgaatacttatatgtaaggtactatgctaagtattgtacatgaattgtctcagtcattcttcaaaacaaccctgccggattatgtgattggttacattgctgtttggcaaatacttgggacggtgacttcttccctgcaccaccagaccgtagatgctggagcccaagtagatgtgctgagaacagaggccttaagtgtgcttgcagggtttggcttggctcttgcactgctcctatttgccaggaagaaaatgtattccacatagtctctggtccaaggaggattagaggctgctggagctgacctaaaccccatgcacagcctccgtgggagctgcccagccagtctgtagacttgtgagtgagaaactacataatcgttttgtgagccactgaacgttaaggcagttttgttatctatatttttttattttattttattttattttttttttttttgagacaggttctcattctttttcccaggctggagtgcactcatgtgatgtcagctcactgcagcctcgacttcctgggcttaagtgatcctcccacctcagcttcccaagtagctgggactacaggcacatgccaccatgcctagctaattttttgtatttttgctaaagatggagtttcaccacgttgcccaggcttttttggtggtggtggtggtggttgttttggaaatagggatttcctcagcctcccaagtaacagagactacaggctcacaccaccatgcctggccaatttttttgaaatttcttgtacagacagagtctagctatgttgcccaggctcgtcttgaactcctgggctccagtgatcctcctgcttggcctcccaaagtgctgggattacaggtgtgacccaccggcttgttagacattattctggcgatagctgactgatacagatagcagcaataactgtcccgattttatagatcagggaatcaggtagagagaaattaaataatgcttgcaagaccacacagctgtaagtgatactcttaataaggcagtttgaggccaaaacccctactcttaaccattctgtcactaatcagaggtaatacaatggcaattaccccagacttggcatgtacttgtaaatcaattagaattctcttaggaatagatcatatgcttttttggcagcagcatttttaactttctgatttggttatagtggtgtatctaaaacaaatttatatttctcacacatatactctgtaatcccagcactttgggaggccaaggtgggtggatcacttgaggccaggagttcaagaccagcctgaacaacatggtgaaaccccatctctaccaaaaagaaaaaaaaattaggcgtggtggcatctgcatctgtaatcccaactactcaggagggtgaggcaggagaatcgcttgaacccaggaggcagagattgcagtgagcccagattgcaccactgcactctagcctgggtgacagagcgagactgtctcacaaaaaaaacaaaacaaaacaaaacaaaacaaaaaatacataccaactacgtgggagaggccaatgttagactgaacataaaaaattgagaaagcacatattccctgatttcttgaggtgactaaattttatcagtgatttaattatattttctagagaaaaattatcgagaaaaaaactgatgttacagttcctaatttgaaaccactgactgtatattgtgtgaaagccagagcacacaccatggatgaaaagctgaataaaagcagtgtttttagtgacgctgtatgtgagaaaacaaaaccaggtcagaatcttttattgtcttttttaaaaatgtagctagacataataaaagtaattctatactgtacattgaaaattgtaaaacattttctctttactgcaaaaaatatatagaaagaatgttttcttcatgaactacatgaatcaaaagtagactttttagaaaatatttgtaacgcttaactctcaagtcggtgttgttggatgctttatatttcatccagtatccctataattaatttccttaatgtattgctctttaacatttaataaaactattttaaatttttagaatataatccttaacataattatcatgtagaaatcacttagttcaattgtgagttttttaatgtgggaattggtttagtctcattttctattttacagtttctagtgttgaccggtagaggcttagtcacagaatatctattaaattttgctagttgtatggtgtaaaagtgctgaaggatacttgcatgtttggcctgtatgtcaatattgtatttctccctgaggatctcttacttcagttcccacgccaatctttaaatgtaaatgtcattgcctatggttgctgtggactcagtgctaccagaaatatttttaagagtattatttaatagattttatatttcctttcatatggctagtctttcacacagctgtcagcactgttaaggcatttgtatgtcaaaatatatgctaaatatcacgtatatctttttaggaaatacctctaaaatttggcttatagttggaatttgtattgcattatttgctctcccgtttgtcatttatgctgcgaaagtcttcttgagatgcatcaattatgtcttctttccatcacttaaaccttcttccagtatagatgaggtatgttactttttttatttttttgtcaacagctaggaaatgaacagaaaatgtgtttgatttcaacaggatatatgtaggttttcttgatatccagaaaataatagagactgatttgggtatcttcttcaaagctttagtcaattaactttaaaaacagtaatttcatgtaataacatagcatgagatagtaatgattgtccttaatttcatatttttctggcaattcctagattcactgtggcatttgttttaccgtttaaagcctgtgattcttggccaagcgtggtggctcacgcctgtaatcccagcactttgggaggctgaggcgggtgggtcacttgaggtcaggagttcgagaccagcctggtcaacatggagaaaccctgtctctactaaaaatataaaattagccgggcgtggtggcacatgcctgtaatcccagctactcgggaggctgaggcagggggatcgcttgaacctgggaggtggaggttgcagtgagccgaggtcatgccactgcactccagcctgggtgacagagcaagactctgtctctaaataagtaaataaagtctgtaatgtgattcttctcagtacagacagtcccaaacttacgctgtttcaatttgtgatgcgtttgtcagaacgtaattccattgtaagttaggagcatctgtatatatccagaagactaaaatattctatcagcgtagaaagtatattctatggatgaaatcatacaaaatgaaataactaaaaacatgagactttttttatgacacacatcacagttttttgtttggcacttctatgaagctagcatattaaatgaaagcactgaatggtgaaggcctaaacatagaatctgttcctgggaaaccatgtgctcatctagggtgggttttgtgaatttgagcaagtcactaagggcaggtaagcaagtacccttggctgtaaaccaccccatagaggtgttaggagcaaaggagttaaaccataagaaccttaccactctaaaaatgctccgtaaatattaacaattttactattatacccctgagtttttaaatgtcattcctgtgtactgtaatattcatagctattatttaaaatagacttaaaaactagttacaatagctaataatttctcaattgtgctgcttctggatatatatgtgttggatacaaacatttttattatttcaaaaaaaaaaagtcatgatcccagagtccgcccgctcctgtcctttcccgtgttcttccccgcctaccccgatggcacagtgtacctttcttaggtactcttcaaagactcaccacagaaggtactaagatatgagtgacctcactaatgatgcttttaaacattataaggcaattagtatgttcttaggcgactttttaatatgcatgccagaagataggttttctcagtaatggatgtaagaaactaaagctattacaactagaaaaggaatttttattattttaaataattgatttctactctttccctttttttaaattagtatttctctgaacagccattgaagaatcttctgctttcaacttctgaggaacaaatcgaaaaatgtttcataattgaaaatataagcacaattgctacagtagaagaaactaatcaaactgatgaagatcataaaaaatacagttcccaaactagccaagattcaggaaattattctaatgaagatgaaagcgaaagtaaaacaagtgaagaactacagcaggactttgtatgaccagaaatgaactgtgtcaagtataaggtttttcagcaggagttacactgggagcctgaggtcctcaccttcctctcagtaactacagagaggacgtttccctgtttagggaaagaaaaaacatcttcagatcataggtcctaaaaatacgggcaagctcttaactatttaaaaatgaaattacaggcccgggcacggtggctcacacctgtaatcccagcactttgggaggctgaggcaggcagatcatgaggtcaagagatcgagaccagcctggccaacgtggtgaaaccccatctctactaaaaatacaaaaattagccgggtgtggtggcgcgcgcctgttgtcttagctactcaggaggctgaggcaggagaatcgcttgaaaacaggaggtggaggttgcagtgagccgagatcacgccactgcactccagcctggtgacagcgtgagactctttaaaaaaagaaattaaaagagttgagacaaacgtttcctacattcttttccatgtgtaaaatcatgaaaaagcctgtcaccggacttgcattggatgagatgagtcagaccaaaacagtggccacccgtcttcctcctgtgagcctaagtgcagccgtgctagctgcgcaccgtggctaaggatgacgtctgtgttcctgtccatcactgatgctgctggctactgcatgtgccacacctgtctgttcgccattcctaacattctgtttcattcttcctcgggagatatttcaaacatttggtcttttcttttaacactgagggtaggcccttaggaaatttatttaggaaagtctgaacacgttatcacttggttttctggaaagtagcttaccctagaaaacagctgcaaatgccagaaagatgatccctaaaaatgttgagggacttctgttcattcatcccgagaacattggcttccacatcacagtatctacccttacatggtttaggattaaagccaggcaatcttttactatgcattaagacctctgattcaaaacttattagaacagtagcttctgctggaatttgcaatcactgaagtcatagaaaataggtaactatctaattagagaaataattgttgtattttaagatctgagagtgtgtacaagttttagtatacatgccatgccagaagatagtgtatgcaagaagtcttgggaccagaaaatggcaatgataggagactgacatagaagaagaatgcttccctaggaaaaaggtcgctggctttggtgcaagaggaagaagaatgttccactggaagcctgagcacctaatcagctctcagtgatcaacccactcttgttatgggtggtctctgtcactttgaatgccaggctggcttctcgtctagcagtattcagataccccttctgctcagcctgcttggcgttaaaatacaaatcattgaactgagggggaaaaatgtaactaggaagaaaaacccaatttaagaaattacataatgctttccaaaggcacctacaacttagttttaaattacttgctactggggattacccatggatatccttaataggcaggaagtctgggaattctggtggcctctagggcagtgttctcacagcaccgttccgacagggaccagtgaaagaaaagagacaaagttagaacgtgctggggagcggccatttctaaggccagtctggtttaagtagtcatttctgctgaaaaaacagatgatcctggtggaagaaaaggttgaaggcagctgccctcgggagggctgtgatgctcggcacatcctgcctggcacatacacgtgtctgcaggccacaccgtgcatgtccccagacctgccgcctggcttctggagtgcttcaagcagagcatggtgggtcattgaggagacccaggaatctcatctgagaacccactctctgccggagaaccccatggtgacacattttcatctttctgaccagaggctgtttttttttttttttgagacagtctcattctgttgcccaggctggagtgcagtggcttgatctcggctcactgcaacctcgcctcccgggttcaagcaattctctgccgcagcctccagagtagctgggataacaggtgcccaccaccacaccccactaatttttgtatttgtatttttagtagagatggggtttcaccatgttggtcaggctggtcttggactcctgacctcatgctccacccgcttcggcctcccaaagttctgggattacaggtgtgagccaccgtgcacggccggcctgacctttggaaaagccttgtcactttggacgtttgcgtctttgaagaggcgatgggagcatatcatgactgcctgccaccattgcttttcagactaccacaactcaatcatgctgtccaggacttctggccctgtgttcaccactgggaaaacgtacttcagactggatagcctaaaaaggagcaatgcccttgtaggatgtggagaagggaaaatacggacattaacattaaaagacaccagtgaaattgttaggtctctaggaagttggagcacaaggcttcacgctttaagaccatctgtggttttcagtgaacaagcgctgagcaccagcagcagaaaacaacaacaaaaaaacacctcgtttttaccttgtcttctagacatgaaaaggcagttgcattccactctgcattatgttctacatgttgctttatcagtatatgcttagctgtaagtgacaagtattttttctgaacagaagtttacttagaaataccatgcacttgggggtaccaattaaccgcctgaaaattagcatattgatagttcttagagagaccagatataatctaagaatttatatgaaagatttgtatcattagagccagaaataattttatattaatatataatacagattaacattatatataatatgtacctgtgtcacttctgacatgagcctgtaaa

SEQ ID NO: 25158 - DNA, 1138 bp, Homo Sapiens
ggcacgaggtctggttagacgctctctttgcttttccccacgagtgaccacggctagataggccgccggccagatgtggcgggggagagccggggctttgctccgggtgtgggggttttggccgacaggggttcccagaaggagaccgctaagctgcgatgctgcgtcgcaggcgggaagcaattatccccgctgttggaactgcggcggcccatggggccccgggcgggaggacaggttcttctgcccacagtgccgagcgctgcaggcacctgaccccactcgagactacttcagccttatggactgcaaccgttccttcagagttgatacagcgaagctccagcacaggtaccagcaactgcagcgtcttgtccacccagatttcttcagccagaggtctcagactgaaaaggacttctcagagaagcattcgaccctggtgaatgatgcctataagaccctcctggcccccctgagcagaggactgtaccttctaaagctccatggaatagagattcctgaaaggacagattatgaaatggacaggcaattcctcatagaaataatggaaatcaatgaaaaactcgcagaagctgaaagtgaagctgccatgaaagagattgaatccattgtcaaagctaaacagaaagaatttactgacaatgtgagcagtgcttttgaacaagatgactttgaagaagccaaggaaattttgacaaagatgagatacttttcaaatatagaagaaaagatcaagttaaagaagattcccctttaattgtggatagtttaaagtttaaaaaataaagttcttgctgggcacagtggctcacacctgtaatcccagcactttgggaggctgaggtgggtggatgacaaggtcaggagttcaagaccagcttggccaacatagtgaaaccccgtctctgctgaaaatacaaaaattagccgggcatggtggcgcgtgcctgtaatcccagctacttggtaggccgaggcaggagaatcgcttaaacccgtgaggtggaggttgcagtgagcagagatcacgcaactgcactccagcttgggcaacagagtgagacttaatcttgaaaaataaataaatgaaaaataaaaaaaaaaaaaaaaaaaa

SEQ ID NO: 25159 - DNA, 1016 bp, Homo Sapiens
ggcacgaggcagacttgggctggaagctcccggcccgaggggagggggcgagggtgcccggtggtggccgccgttgcctcttggccccctccccggagtggctggtgcgtggaagctcgaaaggggctgtctcttcctctccccggggacccccctacgagctgcgtcctctccccgacgggccccctggggcgagggccagagggttcagtgccacccggtgcccgggtccaatcttgctgaagccgctgcttccccggaggaccgggggagggggtggcagccgagaaaggaccttctcccctccgcagcgtcggccgttctgctggcggcgactgggtttgcaccccggagggagccgccgcggccactgcttccaggacgcacgagagcagaggagaggagtgcacgcacgcaggctcccgccgcccccaggcctggccggcgcccgggccgccgcggctggcggcgctcacgttggctgcagggcgctcgcgcggcgcctcggcccgggtcgcatcccttcccgctcgtgctcacgctcgcccggaatgtggggttgtgattgttactctacgttccggaggcgcgtctcggcgctcctgctccggctgcggctcgcgctgtccccggcttggccgcgcgggatgccgcccgggcggagcgctgacgtcaccgccatgctctgcaccagttcttccccctcccctttacacttcctctgtggagcccacttgttgctcaggcaaggcgcatgcgcggcaggacgcccagattcctcccagccggcccctcctccgcgcctccgccctcccctcccccctcgccgtgtgtgtacaacagctgaggcccggcgagctaatgctggaagtccagagctgggggtggaaattaaacagacgatgacctttcctttccctgcccggcattcccaagtaaaaacgcatttaagaaccactagcgtcgtttccgatccctgctccccaccccacccccaaaaaaaaaaaaaaaaaaaa

SEQ ID NO: 25160 - DNA, 3053 bp, Homo Sapiens
gcggagcccacggagcccacggagcccacggaggagcccacggaggagccccagcgtccgaacgggcagaccccctcgagccgcgaaggagcccgagaagcagccacgatgtgcggaatctttgcctacatgaactacagagtcccccggacgaggaaggagatcttcgaaaccctcatcaagggcctgcagcggctggagtacagaggctacgactcggcaggtgtggcgatcgatgggaataatcacgaagtcaaagaaagacacattcagctggtcaagaaaagggggaaagtcaaggctctcgatgaagaactttacaaacaagacagcatggacttaaaagtggagtttgagacacacttcggcattgcccacacgcgctgggccacccacggggtccccagtgctgtcaacagccaccctcagcgctcagacaaaggcaacgaatttgttgtcatccacaatgggatcatcacaaattacaaagatctgaggaaatttctggaaagcaaaggctacgagtttgagtcagaaacagatacagagaccatcgccaagctgattaaatatgtgttcgacaacagagaaactgaggacattacgttttcaacgttggtcgagagagtcattcagcagttggaaggtgcattcgcgctggttttcaagagtgtccactacccaggagaagccgttgccacacggagaggcagccccctgctcatcggagtccggagcaaatacaagctctccacagaacagatccctatcttatacaggacgtgcactctggagaatgtgaagaatatctgtaagacacggatgaagaggctggacagctccgcctgcctgcatgctgtgggcgacaaggccgtggaattcttctttgcttctgatgcaagcgctatcatagagcacaccaaccgggtcatcttcctggaggacgatgacatcgccgcagtggctgatgggaaactctccattcaccgggtcaagcgctcggccagtgatgacccatctcgagccatccagaccttgcagatggaactgcagcaaatcatgaaaggtaacttcagtgcgtttatgcagaaggagatcttcgaacagccagaatcagttttcaatactatgagaggtcgggtgaattttgaaaccaacacagtgctcctgggtggcttgaaggaccacttgaaggagattcgacgatgccgacggctcatcgtgattggctgtggaaccagctaccacgctgccgtggctacgcggcaagttttggaggaactgactgagcttcctgtgatggttgaacttgctagtgattttctggacaggaacacacctgtgttcagggatgacgtttgctttttcatcagccagtcaggcgagaccgcggacaccctcctggcgctgcgctactgtaaggaccgcggcgctctcaccgtgggcgtcaccaacaccgtgggcagctccatctctcgcgagaccgactgcggcgtccacatcaacgcagggccggaggtcggcgtggccagcaccaaggcttataccagtcagttcatctctctggtgatgtttggtttgatgatgtctgaagaccgaatttcactacaaaacaggaggcaagagatcatccgtggcttgagatctttacctgagctgatcaaggaagtgctgtctctggaggagaagatccacgacttggccctggagctctacacgcagagatcgctgctggtgatggggcggggctacaactatgccacctgcctggaaggagccctgaaaattaaagagataacctacatgcactcagaaggcatcctggctggggagctgaagcacgggcccctggcactgattgacaagcagatgcccgtcatcatggtcattatgaaggatccttgcttcgccaaatgccagaacgccctgcagcaagtcacggcccgccagggtcgccccattatactgtgctccaaggacgatactgaaagttccaagtttgcgtataagacaatcgagctgccccacactgtggactgcctccagggcatcctgagcgtgattccgctgcagctgctgtccttccacctggctgttctccgaggatatgacgttgacttccccagaaatctggccaagtctgtaactgtggaatgaggctgagaccgtgacaagaccatcaccacctttcatctgattccagacctgtcccaacagcagggatgctacatgggaagagaagtggacatcccacatgttctgcgtgctcctgtagagcttgacagcttccacgtgccttctacccaagtgcttttgcttacagcagatactgtttctctgtgtcctgaagtcgccagaggagaagggaatcattgtttacacatggggatcagagcagacttctccactactgtgcaatagagatacagctctcttcagagtaactgtgaaccttttataaccaacactagagttagttttaaaagacaagatatttataatgacgactgtatagcttttaagttatttttctagtatgtggctttctgtagccgtggtaacggccaaactgttcatcctagctacccatgctctgtgtccaggcttgctcctggcaggtggcattcatctcagatgtgagcacaaggcattggccctctggactcctttctccttttctttcctctctaggctgctcctgaatcctgttctctgacatccgtggagcccctcctgcatccacctatgcctcctataagtccaattgaaatctcagcctccttcaacattttcttctcgtgtgtggcccacatccctccacttctccaacttctgtttaatctgatcacggctctttttaagccctggcagcattttggtccctgctccttgcccatagtaaaacagcttgaaatatcccatgcaagagagtagtttcaagtgggcaactctgctctctatttaaaagcgtgcacaatcaaaagtactatgcaattttaggacaataaagaacatacagtttttttgtgtgaaaaaaaaaaaaaaaaaaaaaa

SEQ ID NO: 25161 - DNA, 2164 bp, Homo Sapiens
ctgagtctcgctggagctcttctcgcccgcccacctcatctcaacccactttccgcggggagcggcgccaagctgggccttcctcggatcaggcgtcccctgaagtcggcacgcccctctgcgtcccccttcggtcccgctaggaccccgtccgggctgccgtcgcctcgtcgctatggcgcccaccatccagacccaggcccagcgggaggatggccacaggcccaattcccaccggactctgcctgagaggtctggagtggtctgccgagtcaagtactgcaatagcctccctgatatccccttcgaccccaagttcatcacctaccccttcgaccagaacaggttcgtccagtacaaagccacttccttggagaaacagcacaaacatgacctcctgactgagccagacctgggggtcaccatcgatctcatcaatcctgacacctaccgcatcgaccccaatgttcttctagatccagctgatgagaaacttttggaagaggagattcaggcccccaccagctccaagagatcccagcagcacgcgaaggtggtgccatggatgcgaaagacagagtacatctccactgagttcaaccgttatggcatctccaatgagaagcctgaggtcaagattggggtttctgtgaagcagcagtttaccgaggaagaaatatacaaagacagggatagccagatcacagccattgagaagacttttgaggatgcccagaaatcaatctcacagcattacagcaaaccccgagtcacaccggtggaggtcatgcctgtcttcccagactttaagatgtggatcaatccatgtgctcaggtgatctttgactcagacccagcccccaaggacacgagtggtgcagctgcgttggagatgatgtctcaggccatgattaggggcatgatggatgaggaagggaaccagtttgtggcctatttcctgcctgtagaagagacgttgaagaaacgaaagcgggaccaggaggaggagatggactatgcaccagatgatgtgtatgactacaaaattgctcgggagtacaactggaacgtgaagaacaaagctagcaagggctatgaggaaaactacttcttcatcttccgagagggtgacggggtttactacaatgagttggaaaccagggtccgccttagtaagcgccgggccaaggctggggttcagtcaggcaccaacgccctgcttgtggtcaaacatcgggacatgaatgagaaggaactggaagctcaggaggcacggaaggcccagctagaaaaccacgaaccggaggaggaagaggaagaggagatggagacagaagagaaagaagctgggggctcagatgaggagcaggagaagggcagcagcagtgagaaggagggcagtgaagatgagcactcgggcagcgagagtgaacgggaggaaggtgacagggacgaggccagtgacaagagtggcagtggtgaggacgagagcagcgaggatgaggcccgggctgcccgtgacaaagaggagatctttggcagtgatgctgattctgaggacgatgccgactctgatgatgaggacagaggacaggcccaaggtggcagtgacaatgattcagacagcggcagcaatgggggtggccagcggagccggagccacagccgcagcgccagtcccttccccagtggcagcgagcactcggcccaggaggatggcagtgaagctgcagcttctgattccagtgaagctgatagtgacagtgactgagtcccagggcattcagggctggttcagacaccattattgtgagcagcaaagcacttttctagtggtctgtttgtgagcctttcacttgtttgttccccacccccaaacctttgctgttaataaagtcaacttctctttacttcccctcccagcccctatgatgtcattcagcccagcacatacctcccgcaacccccaggtgctcaaggatcttggcttgaggcttagaaacacaggccagaggcagggccaatggtttcccacaaaatgtagcacaacgaaggtcagaattcgttttttttgtttgttttttttttttccaaaataagcccagaccattaaacaagtgaaactccaacaaaaaaaaaaaaaaaaaaaaaaaaaaaaaaaaaa

SEQ ID NO: 25162 - DNA, 1522 bp, Homo Sapiens
ggagcgggagcgagctggcggcgccgtcgggcgccgggccgggccatggagctgtggccgtgtctggccgcggcgctgctgttgctgctgctgctggtgcagctgagccgcgcggccgagttctacgccaaggtcgccctgtactgcgcgctgtgcttcacggtgtccgccgtggcctcgctcgtctgcctgctgcgccacggcggccggacggtggagaacatgagcatcatcggctggttcgtgcgaagcttcaagtacttttacgggctccgcttcgaggtgcgggacccgcgcaggctgcaggaggcccgtccctgtgtcatcgtctccaaccaccagagcatcctggacatgatgggcctcatggaggtccttccggagcgctgcgtgcagatcgccaagcgggagctgctcttcctggggcccgtgggcctcatcatgtacctcgggggcgtcttcttcatcaaccggcagcgctctagcactgccatgacagtgatggccgacctgggcgagcgcatggtcagggagaacctcaaagtgtggatctatcccgagggtactcgcaacgacaatggggacctgctgccttttaagaagggcgccttctacctggcagtccaggcacaggtgcccatcttccccgtggtgtactcttccttctcctccttctacaacaccaagaagaagttcttcacttcaggaacagtcacagtgcaggtgctggaagccatccccaccagcggcctcactgcggcggacgtccctgcgctcgtggacacctgccaccgggccatgaggaccaccttcctccacatctccaagaccccccaggagaacggggccactgcggggtctggcgtgcagccggcccagtagcccagaccacggcagggcatgacctggggagggcaggtggaagccgatggctggaggatgggcagaggggactcctcccggcttccaaataccactctgtccggctcccccagctctcactcagcccgggaagcaggaagccccttctgtcactggtctcagacacaggcccctggtgtcccctgcagggggctcagctggaccctccccgggctcgagggcagggactcgcgcccacggcacctctgggagctgggatgataaagatgaggcttgcggctgtggcccgctggtgggctgagccacaaggcccccgatggcccaggagcagatgggaggaccccgaggccagacgcacactgtccgagccctctgctcagccgcctgggacccaccagggtgcagctgggctccagggtccagcccacaagctgcatcagggtctctgggagaggaggggcctggagggccaggagtcccagactcacgcaccctgggccacagggagccgggaatcggggcctgctgctcctgctggcctggaagactctgtggggtcagcactgtactccgttgctgtttttttataaacacactcttggaagtggcaaaaaaaaaaaaaaaaaaaaaaaaaaaaaaa

SEQ ID NO: 25163 - DNA, 1022 bp, Homo Sapiens
atccgtcaggccggaaccatggcagtgaccaaggagctcttacagatggacctgtacgcgctgctaggcattgaggagaaggcagcggacaaagaggtaaagaaggcgtataggcagaaggccctctcctgccacccagacaaaaatccagataatcccagagcagctgaactcttccaccagctttctcaggccttggaggtgctgaccgatgctgcagccagggctgcatatgacaaggtcaggaaagccaagaagcaagcagcagagaggacccagaaacttgatgagaaaaggaagaaagtgaagcttgacctggaggcccgggagcggcaggcccaggcccaggagagtgaggaggaagaggagagccggagcaccaggacactagagcaagagatcgaacgcctgagagaagagggttcccggcagctggaggaacagcagaggctcatccgggagcagatacgccaggagcgtgaccagaggttgagaggaaaggcagaaaatactgaaggccaaggaacccccaaactaaagctaaaatggaagtgcaagaaggaggatgagtcaaaaggtggctactccaaagacgtcctcctacggcttttgcagaagtatggtgaggttctcaacctggtgctttccagtaagaagccaggcactgctgtggtggagtttgcaaccgtcaaggcagcggagctggctgtccagaatgaagttggcctggtggataaccctctgaagatttcctggttggagggacagccccaggatgccgtgggccgcagccactcaggactgtcaaagggctcagtgctgtcagagagggactacgagagcctcgtcatgatgcgcatgcgccaggcggccgagcggcaacagctgatcgcacggatgcagcaggaagaccaggaggggccgcctacgtagccccagctccagccatccacccctcagcccttttcttcaacgtcaccaataaaattttttttttttttttaaaaaaaaaaaaaaaaaaa

SEQ ID NO: 25164 - DNA, 1897 bp, Homo Sapiens
gccacggcagcttcacggtgatgatatggcatctgccagctctagccgggcaggagtggccctgccttttgagaagtctcagctcactttgaaagtggtgtccgcaaagcccaaggtgcataatcgtcaacctcgaattaactcctacgtggaggtggcggtggatggactccccagtgagaccaagaagactgggaagcgcattgggagctctgagcttctctggaatgagatcatcattttgaatgtcacggcacagagtcatttagatttaaaggtctggagctgccataccttgagaaatgaactgctaggcaccgcatctgtcaacctctccaacgtcttgaagaacaatgggggcaaaatggagaacatgcagctgaccctgaacctgcagacggagaacaaaggcagcgttgtctcaggcggagagctgacaattttcctggacgggccaactgttgatctgggaaatgtgcctaatggcagtgccctgacagatggatcacagctgccttcgagagactccagtggaacagcagtagctccagagaaccggcaccagccccccagcacaaactgctttggtggaagatcccggacgcacagacattcgggtgcttcagccagaacaaccccagcaaccggcgagcaaagccccggtgctcggagccggcaccgccagcccgtcaagaactcaggccacagtggcttggccaatggcacagtgaatgatgaacccacaacagccactgatcccgaagaaccttccgttgttggtgtgacgtccccacctgctgcacccttgagtgtgaccccgaatcccaacacgacttctctccctgccccagccacaccggctgaaggagaggaacccagcacttcgggtacacagcagctcccagcggctgcccaggcccccgacgctctgcctgctggatgggaacagcgagagctgcccaacggacgtgtctattatgttgaccacaataccaagaccaccacctgggagcggccccttcctccagggtaggtcatcaactgagaagacctgagactctggaactgacaccatgagtcacccaatggcttcttgaaacggtccctttctgcggaggtagcatagcacagtgacgtttattccgggtcacttgattgcttttcctatccacttaccttaatattgctcccatgtcttaggacatattagaattattagaagatctctgggaaacaaaaggcgcatgggaggccaagatttagagtgttgatgcattccgccgtaccctatgcccagcctgtccctaaaggcagagtgcttcttattcggcagggcttcgtgagaatgccaccaagttatccaaaaccaaaggatgagagaggcttccaagagagggaagactgtccaagttcaaggagaaggggtttggttccctgtctgccagggacagaaagttctttccacatgtgtctcctggtcccgagagctttcaaaaggggatgtattctgctccaagaaagaatcacctcccagtaaagtagccatgaagggctcctgtataaaatatgcacacttcccctgccctgagtttgtggagggaaaggctgtcggaagtagggactcttaggagagcccgtgtgccctgtttggttcagctgtcaggcgtgtgccacacacatcccacctcatcttctggtcccataattctccatggatgggctgcttttagctccagttttccagtagaatgcttgagttttccttttttccgtacctcctggaggatgaaactcataacctgtcatcatcagtactcactgtgttttccactttgacttgaagtcaaatgaagttaccaaagttaaacatggacttctcaaaaaaaaaaaaaaaaaa

SEQ ID NO: 25165 - DNA, 2366 bp, Homo Sapiens
gaggagccgagcggaggaggcgtcccagggacacgcaggggaggccggccggcctgcacggggcgctcccgcctcgggggccctgtctggcgcctcagcgcgcgccccgatggtcacctgcgcccacctgggccggcgcgcgcggctcccggcagctcagccctctgcctgcccaggaacctgcttttcccaagaggagagaatggctgctgggtacctgccccgctggtcccaggaattagtaacctttgaggacgtgtccatggacttctcccaggaggagtgggagttgctggagcctgctcagaagaacctgtacagagaggtgatgctggagaactacaggaacgtggtctccctggaagccttgaagaaccaatgtactgatgtggggattaaagagggtccactttccccagcacaaacctcacaagtcactagtctttcctcatggacggggtatttactttttcaaccagtggcttcttcccacttggagcaaagagaagccctgtggatagaggaaaaaggaactcctcaagcctcctgttcagattggatgactgtactaagaaaccaagactcaacttacaagaaggtggctttgcaggaggaaccagccagtggtataaatatgataaagcttatcagagaagatgggggatggaagcagttagaggacagccatgaagacccccaggggcttttgagccaaaaggcatcccttcacgtagtggccgttcctcaggagaaggctactgcatggcatggatttggggaaaatggtaatctgagcccagcccttgttttatcacagggaagctctaaagggaaccacttgtgtggcagcgagttagatattacaagcttggcatccgattcagtcttaaaccaccatcagctgggatatgcagatcggagaccttgtgaaagtaatgaatgtggaaatgccatccgccagaacagtcactttattcaacacggggggaagatgtttgtgtatttggaaaatgggcagtcattgaaccacggtatggccctgactatccacaacaaaatcaacacggcagagaaaccctttgagtgccaccagtgtgggaaggtgttcaaccggaggcattctttgagcgaacatcaaagaattcacacgggggagaaaccctacgagtgtcaggagtgtgggcgagcctttacgcacagctccaccctcacgcgccatctgagaactcatactggagagaagccctacgggtgcggtgagtgcgggaaagccttcaacaggatctcatcgctgactcagcatcagaggattcacaccggggaaaagccctataaatgtgaagactgtgggaaatccttctgccagagctcttacctgatcttgcacaagaggacacacaccggagagaagccctacgaatgcagtgaatgtggaaaggccttcagtgaccgttcctctctcaaccagcacgagcgaactcacacgggcgagaacccctatgaatgtaagcagtgtgggagagccttcagccagaggtcttcccttgtgaggcacgagagaactcacactggagagaaaccctacaggtgtcaggaatgtgggaaagccttcagccagagctcatcccttgtcacacatcagaaaactcacagcagccagaaaacctataaaatcattgactgcgggaaagcgttctaccagaacagacatcttattggatattagcaattgcacgctgctttgtaagccactttttagtactctgacacatacatgtggttatcttttgccctgttgtgatggataatttgaaaagaagtgggtttatgtcaccttctcaccttcttataagaaagctctgagaatgggcatttttgtattttgttgttgttgttgagatggagtctgccacccaggctggagtccagtggcgtgatcatacctcactgcagcttcagcttcctgggctcaagtaatcctcccaccccagcctcccaggtagctagtactataggtgtgcaccaccacgcccagcaaatttttaaatttattatagagtgggaggcagggtgcggtggctcatgcctataatcctaacactttgggaggccgaggcgggtggatcatgaggtcaggagatcgagaccatcctggctaacacagtgaaaccctgtctctactaaaaatacaaaaaagtagccgggcgtggtggtgggcgcctgtagtcccaactactcaggaggctgaggcaggagaatggtgtgaacccgggaggtggagcttgcagtgagccaagatcgcaccactgcactccagcctgggagacagagcgagactccgtctcaaaaaaaaaaaaaaaaaaaaa

SEQ ID NO: 25166 - DNA, 1762 bp, Homo Sapiens
cagccagaggcgcctagggttggggtcctcgctcaggcacagagacccgacaccgagcggcggcttccccgggatcgagggacgcgcacgccagaggagacgaaaggaacccgggtcggaccagatcggaaccactgaccattgcccatggcggccctaggccctagcagccagaatgtcactgaatacgtcgttcgagttcctaagaatacaaccaaaaaatataacatcatggcttttaatgcagccgacaaagtcaactttgctacgtggaatcaggctcggctggagcgggacttgagcaacaagaaaatctaccaagaggaggagatgcccgaatcgggcgcgggcagtgagttcaaccgcaagcttcgggaggaggctcggaggaagaagtacggcatcgtcctcaaggagttccggcccgaggaccagccctggctgctccgggtcaacggcaaatcaggcaggaagttcaagggcatcaagaagggaggcgtaacagagaacacgtcctactacatcttcacccagtgccccgacggggccttcgaggccttccccgtgcacaactggtacaatttcacaccgctggcccggcatcgcacgctcactgccgaggaggccgaggaggagtgggagaggaggaacaaggtgctgaaccacttcagcatcatgcagcagcggcggctcaaggatcaggaccaggacgaggatgaggaggagaaggagaaacgtggccgcaggaaggcgagcgagctgcgcatccacgacctggaggacgacctggagatgtcgtccgatgccagtgatgccagtggtgaggaggggggcagagtccccaaggccaagaagaaggcgccgctggccaagggcggcaggaaaaagaagaagaagaagggttcagacgacgaggccttcgaggacagcgatgatggggacttcgagggccaagaggtggactacatgtcagacggctccagtagctcccaagaagagcctgagagcaaggccaaggcgccgcagcaggaggaggggcccaagggtgtcgatgagcagagcgacagtagtgaggagagtgaggaggagaagccgcctgaggaggacaaggaggaggaggaggagaagaaggcacccaccccgcaggagaagaagcgcaggaaagacagcagcgaggagtcggacagctcagaggagagcgacattgacagcgaggcctcctcagccctcttcatggcgaagaagaagacgccacccaagagagagcggaagccgtcgggagggagctcaaggggcaacagccgcccaggcacgcccagcgcagagggtggcagcacctcctccaccctgcgggcggctgccagcaaactcgagcaagggaagcgggtgagcgagatgcctgcagccaagcggttgcggctggacacgggaccccagagcctgtctgggaagtcgacaccccagccaccatcaggcaagacaacacccaacagcggcgacgtgcaggtgactgaggatgccgtgcgccgctacctgacacggaagcccatgaccactaaggacctgctgaaaaagttccagaccaagaagacagggctgagcagcgagcagacagtgaacgtgttggcccagatcctcaagcgactcaaccccgagcgcaagatgatcaacgacaaaatgcacttctccctcaaggagtgaggcttggtccaatacatggctctgccccccaaaaaaaaaaaaaaaaaaaaaaaaaaaaaaa

SEQ ID NO: 25167 - DNA, 2292 bp, Homo Sapiens
gcccggaagcactgtccctcggagtccgagacttccacctgggtcgtgtccaaggccccggcgactccccggactcggggtgccgggccaacctccccgccgaggcccacccgccgtcgctatggcgtgcagtttgcagaagctgtttgctgtggaagaggagtttgaagatgaggatttcttgtctgctgtggaggatgcagagaaccggtttactggctcactgcctgtgaatgctgggcgcctgagacctgtctcttctaggccacaggagactgtgcaggcacagtcctccaggctgctgctgttacaccccactgctccctcagaggctttgggcctgccagacttggacctctgcctccctgcctccagcacgcccagtgctgacagccgtccatcatgcataggagcagctcccctaaggcctgtctctacttccagcagctggattggcaatcagagaagagtgacagtgacagaagtgctcagagagccagcaagacctcagtcctcagccttacaccccctactcacctttgagagccaacagcagcaagttggtggctttgaggggcctgaacaagacgaatttgataaagtcctggcaagcatggagttggaggagcctggcatggagctggaatgtggagtcagcagtgaggccataccaatcctgcctgcccagcagcgggagggttcagtattggctaaaaaagcccgggtagttgatctgagtggatcttgccagaaggggcctgtgcctgccatccacaaagcgggtatcatgtccgcccaggatgagtctctagatcctgtcatccaatgtaggactccacgaccccccttgagacctggtgctgtgggtcaccttcctgttccaactgccttaacagttcccactcagcaactccactgggaagtctgtccgcaacgctcccctgttcaagcacttcagcctctccaagctgctagagggaccattcagagcagccctcaaaatcgtttcccttgtcagccattccagtctccaagttcctggttaagtggcaaagctcatttacccagacctcgaactcccaactcaagctgttctactccctcaaggactagctctggattatttcctcggatacccttacaaccgcaagctccagtgtcttccattgggtctcctgttggtaccccaaaaggtccccagggagctctgcagacacccatagtcaccaaccacctggtgcagctagtcactgctgccagccggacaccccagcagcccacccatccctccacccgagccaaaactcgccgtttccctggcccagctgggatcctgcctcaccaggcagccctgaagcagcttcctaggaacaaggtccccaacatggcggtgatgatcaagtccctgactcggagcacaatggacgccagtgtggttttcaaggaccccacgggagagatgcaggggacggtgcacaggttgctgctggagacgtgccagaatgagctgaagcctggctcagtgctgctgctgaagcagattggagtgttttctccttcacttcgaaatcactacctcaacgtgacacccaacaacctggtccatatttacagcccggattctggggatgggagcttcctcaagccatctcagcccttccccaagatgacctggatggactcctgagtgagcttcctgaagacttcttctgtgggaccagtagttgagactgccccaacgcaggacaacccaccatgagcaggcagctctgggcacgtgtctggtcacatccaagggggagaagaaggccagcatgattggagagtggacacagccggggggcttctgtggttgctcccaccctgggtgttttccctgagagccccctcatctctgcgctgccctcactttgggccttcctttgccgttggcaccagaatccggccggagactggctctccagccaacaagaaaggcctgtcacccttgccttgggtgtccctctcctgcctcagcttaattttagaggatattgggcctggttttcttgtcccttcataccctagtccctggacagctgaggagatgaaaggagccacaccacaacaatggcggcctgcccctccacacaggggagaagcacgctcaggcttcctctgctttgtctcttcagacctgtggttgctctgctcatccatgcccaaggttcccaggtgcaggacagaggtgtggcctattgtaccttgttctgaaataaagcatctcctgcttaaaaaaaaaaaaaaaaaaaa

SEQ ID NO: 25168 - DNA, 2735 bp, Homo Sapiens
ggagggcccggcggcgacagcggaggcagagaggaaggcggttctgagagcttcagagagcgatggaaagcaaaatgggtgaattgcctttagacatcaacatccaggaacctcgctgggaccaaagtactttcctgggcagagcccggcactttttcactgttactgatcctcgaaatctgctgctgtccggggcacagctggaagcttctcggaacatcgtgcagaactacagggccggcgtggtgaccccagggatcaccgaggaccagctgtggagggccaagtatgtgtatgactccgccttccatccggacacaggggagaaggtggtcctgattggccgcatgtcagcccaggtgcccatgaacatgaccatcactggctgcatgctcacattctacaggaagaccccaaccgtggtgttctggcagtgggtgaatcagtccttcaatgccattgttaactactccaaccgcagtggtgacactcccatcactgtgaggcagctggggacagcctatgtgagtgccaccactggagctgtggccacggccctgggactcaaatccctcaccaagcacctgccccccttggtcggcagatttgtgccctttgcagcagtggcagctgccaactgcatcaacatccccctgatgaggcagagagagctgcaggtgggcatcccggtggctgatgaggcaggtcagaggcttggctactcggtgactgcagccaagcagggaatcttccaggtggtgatttcaagaatctgcatggcgattcctgccatggccatcccaccactgatcatggacactctggagaagaaagacttcctgaagcgccgcccctggctgggggcacccctgcaggtgggactggtgggcttctgcctggtatttgcaacccccctgtgctgtgccctattcccccagaagagctccatacacataagcaacctggaaccagagctgagagctcagatccatgagcaaaaccccagcgttgaagtggtctactacaacaaggggctttgaggagggtcagcctctgtcccctccctcacttccttgggctgctgctttagtggagtcatgtcacccctaccacttggctatctgcctagcactgggcaggggccttggtgggcagatggcaattgagggtagcaacctattagggtgggggagggacctccataaggcttttcctcccttctctggtttcaaagatcagagcacataacccctcctgtgcttgagtgtccatgcatatacatacatgatacacatgtgtatgtgtacattgggtcctgaaagctagaagcaggcatgctagcctagtatgttctgacatctggcttcccttctcagcctcatgtccacctgcctgccagccaggctacaggtgtgacttccttctctaaactgttacaccagccaagttatttttgatggcacctcatcccttctagaaataggaggagccccaggatctcaggacagagacttatagacactagtaggacaaagcgggctgaatccttcaggtttctgatacctagctccccaagctgactgggctggcagaggagaacatgttgagacaagggaggcaggggacttatgcatccctcagtgccatcccttgtatcctggaatagctccatttcccctcctcctctctaccagacaaaggagtgcctgtgtcctgtactgccctcgctgtctcccccaccaccctacttgacagcgtgggcatcttcaggcacagccttgggagttcctggtgtgctctgacatcatgacctcaaatctaaatcctccaatcccaactccctttcccaaacaaaaagccacagaggcagagcaagcattcccctttaagagcttccactgcaccccctcccaagggacacagcggtaggaatggtgcttaaactccacaggtatcagagagggtgtaactaggacatcctcaagggcagctaggccccgaatgtacaatgttaagacagggaattttgtgttccattgacttttttttttttttttaatggagtttcactattttgcccaggctggagtgcgatggtgcgatcttggctcactgcaacctctgcctcctgggttcaagtgattctcttgcctcagtctcccgagtagtggaaattacaggtgtgtgctaccacatcttgctagttttgtatttttagcagagatgggggtttcaccatgttggccaggctagtctcgaactcctgacctcaggtgatccacctgccttggcctcccaaagcactgggattacaagcatgagccactgtgcccagcctgttccactgacatttcttagacattcagcaaaacccccaccttaacctcttttctttcttgagggttggtcctgtccccacctccaccctcccaccccctggaagaggaagggcccgggcatcagtggctagtccaaataaaatatgggcttggggatggaatgggtggtggtaagttcacagagtgtagttagatcccaactcccatgacctctggcttcagtggtgggtggggcagggcagatgaaagggcttcagtgggaacctctgagagcattttcctgttccccctatcaaccgcccccagtgataacatctgtgaagccagccattactcaataaactgcaaacttgtctaaaaaaaaaaaaaaaaaaaaaaaaaaaaaaaaaaaaaaaa

SEQ ID NO: 25169 - DNA, 3005 bp, Homo Sapiens
ggctggctgggcaggaggggttggcggggcagcagggccgcggccatggggagcttgaaggaggagctgctcaaagccatctggcacgccttcaccgcactcgaccaggaccacagcggcaaggtctccaagtcccagctcaaggtcctttcccataacctgtgcacggtgctgaaggttcctcatgacccagttgcccttgaagagcacttcagggatgatgatgagggtccagtgtccaaccagggctacatgccttatttaaacaggttcattttggaaaaggtccaagacaactttgacaagattgaattcaataggatgtgttggaccctctgtgtcaaaaaaaacctcacaaagaatcccctgctcattacagaagaagatgcatttaaaatatgggttattttcaactttttatctgaggacaagtatccattaattattgtgtcagaagagattgaatacctgcttaagaagcttacagaaactatgggaggaggttggcagcaagaacaatttgaacattataaaatcaactttgatgacagtaaaaatggcctttctgcatgggaacttattgagcttattggaaatggacagtttagcaaaggcatggaccggcagactgtgtctatggcaattaatgaagtctttaatgaacttatattagatgtgttaaagcagggttacatgatgaaaaagggccacagacggaaaaactggactgaaagatggtttgtactaaaacccaacataatttcttactatgtgagtgaggatctgaaggataagaaaggagacattctcttggatgaaaattgctgtgtagagtccttgcctgacaaagatggaaagaaatgcctttttctcgtaaaatgttttgataagacttttgaaatcagtgcttcagataagaagaagaaacaggagtggattcaagccattcattctactattcatctgttgaagctgggcagccctccaccacacaaagaagcccgccagcgtcggaaagaactccggaagaagcagctggctgaacaagaggaactggagcgacaaatgaaggaactccaggccgccaatgaaagcaagcagcaggagctggaggccgtgcggaagaaactggaggaagcagcatctcgtgcagcagaagaggaaaagaaacgccttcagactcaagtggaacttcaggccaggttcagcacagagctggaaagagagaagcttatcagacagcagatggaagaacaggttgctcaaaagtcctctgaactggaacagtatttacagcggtacgggagctggaagacatgtacctaaagctgcaggaggctcttgaagatgagagacaggcccggcaagatgaagagacagtgcggaagcttcaggccaggtgccagatttgtttgcagactttgcctttatgtactttgcctgggctaatacagtttcttggaatgactaacactctggtggagagggagaagtgtctctgctctggctgtgactgagctcgaggtgctgtccagattagaaagactgtggagactcgaccggctggagtgtttcttttcattctgaggcgctgggaaacccttgcttctggggctaaataagggcctattttagagcagtctggtaggtatgtttgatgaggtacccttagtcttattcgagaaaatccacaaacccagaattacctctgataagagcttggcatcttcaacacgctccagaccagagagggccattggtatgcaggcagaggcctgctcaggccaacgttgccgtcaggttttgaggaataaggaagaaatatgcagtttctatttggtcattcaggattggtaacattccttcagtaattactacttgaaatcctaattttaaaagtatttgaaacctagattttttttccccttagaactttatgatagtcatgttcgcagatgaaaattctcaattttgggccttcatggcagcagggaggacaaaataaaatgaagactcccaaagggaaaaattgagcctatcctctgccagtttctactttgctgccccatttacattatttaaggtgtctgggatgggagacaacactaaaaagtattcactacagtagcagcacagggtccagtctttgatctctgaccccctgttttggggagcagttatgagatgagctagggtagattttccatggctgccattttacatgtggagcagcaaaagatgtttctttaatctttagataggaagagaaagaagaagccatctttagttgtatattttgccaaaagtgacttcaaaaataaataaattgttttggacatttagattttaaatttaaatttttttaaggaaaaattattttctaaatagaaaattaagcatgtagcatattgccaggcatatataggccccacaggtgcacattcactgcactgtgaggttaatcaggttcttggaactcccctccagtgccactcggcagtgattttagcagaagagtcactctacgggaatgtttgagtgccatgtgacgtccagagtgacgttctacatgacactcaacattttttgagccacctcctaatttgagccgtgttgagagttaatagattgtttttgtgcaaagaattcgcaggtgaaatatgctatatgtattactgcagttttgtgggaagttgattatgacacagcagagactagatcacagagggaaccagataattctagaaatactagtcttagttatttagtgtttatagaatgagtgatattttgaataagggataattttggataattgaagccagtggttttttaaccaatgttatgtatcagaatcacctcacaaagcttctgaaaaatacaccacaaagtgtggctcacccaccacactttgggaggccgaggctggaggatcacttgaacccaggagtttatgaccagcctgagcaacatggtgaaacctcatctttaaaaaaaaaaaaaaa

SEQ ID NO: 25170 - DNA, 3695 bp, Homo Sapiens
gtctgcgccctggagggaggtgtagaaagaggtacatggagaacaagtttgtcaatccgtctgaacttcagttgccttacctgtaaggcagccgtgtctgtgtttttgtctcgcagaattagagcccattgggaacgatgccaccaccgtcagacattgtcaaagtggccattgagtggccaggtgctaacgcccagctccttgaaatcgaccagaaacggcccctggcatccattatcaaggaagtttgtgatgggtaggttgaaatggacctcgttttcaacagtggcagctccgactgaaagagcactcctacaccttgaggtggtcgttgccaaacccagagtattataccctccgttatgcagatggtcctcagctgtacatcaccgaacagactcgcagtgacattaagaatgggacaatcttacaactggctatctccccgtcccgggctgcacgccagctgatggagaggacccagtcatccaacatggagacccggctggatgccatgaaggagctggccaagctctctgccgacgtgactttcgctactgagttcatcaacatggatggcatcattgtgctgacaaggctcgtggaaagtggaaccaagctcttgtcccactacagtgagatgctggcattcaccctgactgccttcctagagctcatggaccatggcattgtctcctgggacatggtttcaatcacctttattaagcagattgcagggtatgtgagccagcccatggtggacgtgtcaatccttcagaggtccctggccatcctggagagcatggtcttgaacagccagagtctgtaccagaagatagccgaggaaatcaccgtgggacagctcatctcacacctccaggtctccaaccaggagattcagacctacgccattgcactgattaatgcactttttctgaaggctcctgaggacaaacgacaggatatggcaaatgcatttgcacagaagcatctccggtctataatcctgaatcatgtgatccgagggaaccgccccatcaaaactgagatggcccatcagctatatgtccttcaagtcctaacctttaaccttctggaagaaaggatgatgaccaagatggaccccaatgaccaggctcaaagggacatcatatttgaactgaggaggattgcatttgacgcagagtctgatcctagcaatgcccctgggagtgggaccgaaaaacgcaaagccatgtacacaaaggactacaaaatgctgggatttaccaaccacatcaatccagccatggactttacccagactcctcctggaatgctggccttggacaacatgctgtacttggctaaagtccaccaggacacctacatccggattgtcttggagaacagtagccgggaagacaaacatgaatgcccctttggccgcagtgccattgagctcaccaaaatgctctgtgaaatcctgcaggttggggaactaccaaatgaaggacgcaatgactaccacccgatgttctttacccatgaccgagcctttgaagagctctttggaatctgcatccagctgttgaacaagacctggaaggagatgagggcaacagcagaggacttcaacaaggttatgcaagtcgtccgagagcaaatcactcgagctttgccctccaaacccaactctttggatcagttcaagagcaaattgcgtagcctgagttactctgagattctacgactgcgccagtctgagaggatgagtcaggatgacttccagtccccgccaattgtggagctgagggagaagatccagcccgagatccttgagctgatcaagcagcagcgcctgaaccggctctgtgagggcagcagcttccgaaagattgggaaccgccgaaggcaagaacggttctggtactgccggttggcactgaaccacaaggtccttcactatggtgacttggatgacaacccacaaggggaggtgacatttgaatccctgcaggagaaaattcctgttgcagacattaaggccattgtcactgggaaagattgtccccacatgaaagagaaaagtgctctgaaacagaacaaggaggtgttggaattggccttctccatcctgtatgaccctgatgagaccttaaacttcatcgcacctaataaatatgagtactgcatctggattgacggcctcagtgcccttctggggaaggacatgtccagtgagctgaccaagagtgacctggacaccctgctgagcatggagatgaagctgcggctcctggacctggagaacatccagattcccgaagccccaccccccatccccaaggagcccagcagctatgactttgtctatcactatggctgagcctggagccagaaacgacggtacccaggagaagggattttgggcccaggagaaacacttacattctggtgccttgtcttttgcttgtacagaatctgtagtgattttggtggccagtaaatgccagccatttctcaaacccacctcggaccacccagagtttcctcttggtccctgtctactaagagtcatgaaggcagggtgctctgcccactccatcaccatgaagcctgggattgggccacgaggaacaaacagcagatgcccttgccttccagtccaagaaactgcttcttgaaatggatttaacaacagccactcaccttttcctcctgagcctgctctctgatcagctggatccccacgtgagcaacagctggcccaggaaaggctgcctgcagaggacaggtgtgttgggcgtgttgagagccttgaagtgactacctgtatcttagatctgagtacaagcctgaggcttttgcttttgtcttttttgatgagggctcactccagcttcatatggtgccaagacgttgctgcttctgaggttggctctaacatctctggtctttagagccaccagatctctctggcccatacagatatcagagcagacggaaatttctccctgcaagcgctcagtctcatcccagcaagtcaaagacctcctggccaagtcctgccctcttaagtctccaggaacgctgcagggaaaacccagctgaggcctgggcctagactgtggtgaggtcactagattctactgctcttcccccacattaataccttttccttcctcagagagaaatctcccctaacctgaattgcagccccctccagtttgctttcctttggccttccagaccccaggaagttggccttcccttcctagtgctatggtttctgccattggccatgatttcagggagctggctgaggccggctgaggccacacctgtgccagtggggcttccctggtgctgcagcacttgtaaaccacacacacagcctctctccctggacatacgttagcacattggcattcagtattggtggcctggcatggtaggtactacccaatgaagagtgtactatatattttcattactataggccatacttatacagacgtgtatatatatttatataagatctacctatcttaggatggaaccttggggaaaaataaaattgaggggaagtaaaaagtatgtaacacttccagttgtgagccaagattgtaaccagagagcagccaggagcttcctgtcagtaaccatgttttcaataaatactctttcacgtacaaaaaaaaaaaaaaaaaaaa

SEQ ID NO: 25171 - DNA, 2331 bp, Homo Sapiens
gcgggattttcaagcgtaggcccccgggaactcgagctgccatgagcctctgggtggacaagtatcggccctgctccttgggacggctggactatcacaaggagcaggcggcccagctgcggaacctggtgcagtgtggtgactttcctcatctgttagtgtacggaccatcaggtgctggaaaaaagacaagaattatgtgtattctacgtgaactttatggtgttggagtggaaaaattgagaattgaacatcagaccatcacaactccatctaaaaaaaaaattgaaattagcaccattgcaagtaactaccaccttgaagttaatcctagtgatgctggaaatagtgaccgagtagtcattcaggagatgttgaaaacagtggcacaatcacaacaacttgaaacaaactctcaaagggattttaaagtggtattattgacagaagttgacaaactcaccaaagatgctcagcatgccttgcgaagaaccatggaaaaatatatgtctacctgcagattgatcttgtgctgcaattctacatctaaagtgatcccacctattcgtagtaggtgcttggcggttcgtgtgcctgctcccagcattgaagatatttgccacgtgttatctactgtgtgtaagaaggaaggtctgaatcttccttcacaactggctcatagacttgcagagaagtcttgtagaaatctcagaaaagccctgcttatgtgtgaagcctgcagagtgcaacaatatccttttactgcagatcaagaaatccctgagacagattgggaggtgtatctgagggagactgcaaatgctattgtcagtcagcaaactccacaaaggctccttgaagttcgtggaaggctgtatgagcttctaactcattgtattcctcctgagataataatgaagggccttctctcagaactgttacataattgtgatggacaactgaaaggggaggtggcacaaatggcagcttactatgagcatcgtctacagctgggtagcaaagccatttatcacttggaagcgtttgtggccaaattcatggcactttataagaagttcatggaggatggattggaaggcatgatgttctgacttctgtcagttattcttgcaaagatttctcagtatcagtatttacatacagcttatattaaaagagctgtgggtaaattaactgaacttaatcatgtcgtatttgcgtttttttggtaataacttctctgtgaactattaatcatcctctgagttaaataattgctcctatactattgaagtatgtagttttgtacataacttagagactttagagtctaagaaaatgatcttaatttactttaagcattggttattcaagtattcattgttgatcctcctattctcttccgtctaatctctcacctgctaaaggagatttacacattagaaagcaaagattattttcatttatccagatgaccattttctgccacaggtaacatgattgtttgacacaccattatatttaattctagtttctctcaatgaataattgtatttttgtaggaaatgtaagatttcattctgaaacataattattggtatggacaaaattgcagataccatttctgttgaggctgcagatttccaacttttatttcagtggttcagattagtattaggtcggtactaagaaataagcatgttttcactaatttaagtacttgagactcttgaagaaaattcagaatgaagttctggagaaaggtatgttactgtagtaattactctttgaacaggttttgtgttttgtcattagctctgccctttttaattaaatattttggttcatggaccaaagggtttacttgacaaatttgtgtgacagactccgaacaattcctttactacgaagtataatttataaaataaaatatacccattttaagggtacagtttgatttttgaccagtgaaactatgatcccaatcaaggtatagatgccgtcaccccaaaaagttccctccatatccctttgcagtcagttcatccctaccctggcccagatgatcactgatcttgtcattatagatgagttttgccagttcaagaatttaatggaatcagatattgtaagcattcttgtgtaatacttcattctctctcattattgagattcatccatattgttgaatgtttcactagttaatgtttattgttcaatatttttgtatatacttttaaagcctattcacttgctgatggatctttggtttgtttccaggtttggttattatgaataaagttgctgtgaataaaaaaaaaaaaaaaaaaa

SEQ ID NO: 25172 - DNA, 1047 bp, Homo Sapiens
acgaggtggagattctggacgcaaagacaagggagaagctgtgtttcttggacaaggtggagccccacgccaccattgcggagatcaagaacctcttcactaagacccatccgcagtggtaccccgcccgccagtccctccgcctggaccccaagggcaagtccctgaaggatgaggatgttctgcagaagctgcccgtgggcaccacggccacactgtacttccgggacctgggggcccagatcagctgggtgacggtcttcctaacagagtacgcggggccccttttcatctacctgctcttctacttccgagtgcccttcatctatggccacaaatatgactttacgtccagtcggcatacagtggtgcacctcgcctgcatctgtcactcattccactacatcaagcgcctgctggagacgctcttcgtgcaccgcttctcccatggcactatgcctttgcgcaacatcttcaagaactgcacctactactggggcttcgccgcgtggatggcctattacatcaatcaccctctctacactccccctacctacggagctcagcaggtgaaactggcgctcgccatctttgtgatctgccagctcggcaacttctccatccacatggccctgcgggacctgcggcccgctgggtccaagacgcggaagatcccataccccaccaagaaccccttcacgtggctcttcctgctggtgtcctgccccaactacacctacgaggtggggtcctggatcggtttcgccatcatgacgcagtgtctcccagtggccctgttctccctggtgggcttcacccagatgaccatctgggccaagggcaagcaccgcagctacctgaaggagttccgggactacccgcccctgcgcatgcccatcatccccttcctgctctgagcgctcacccctgctgaggctcagcccctcaacccggtggcattctgggggaggagtggggcccacagctctccagcacccggaataaagcccgcctgccccagtcggaaaaaaaaaaaaaaaaaaaaaa

SEQ ID NO: 25173 - DNA, 2851 bp, Homo Sapiens
cttgaccgcgcgttctgctgtaacgagcgggctcggaggtcctcccgctgctgtcatggttggttcgctaaactgcatcgtcgctgtgtcccagaacatgggcatcggcaagaacggggacctgccctggccaccgctcaggaatgaattcagatatttccagagaatgaccacaacctcttcagtagaaggtaaacagaatctggtgattatgggtaagaagacctggttctccattcctgagaagaatcgacctttaaagggtagaattaatttagttctcagcagagaactcaaggaacctccacaaggagctcattttctttccagaagtctagatgatgccttaaaacttactgaacaaccagaattagcaaataaagtagacatggtctggatagttggtggcagttctgtttataaggaagccatgaatcacccaggccatcttaaactatttgtgacaaggatcatgcaagactttgaaagtgacacgttttttccagaaattgatttggagaaatataaacttctgccagaatacccaggtgttctctctgatgtccaggaggagaaaggcattaagtacaaatttgaagtatatgagaagaatgattaatatgaaggtgttttctagtttaagttgttccccctccctctgaaaaaagtatgtatttttacattagaaaaggttttttgttgactttagatctataattatttctaagcaactagtttttattccccactactcttgtctctatcagataccatttatgagacattcttgctataactaagtgcttctccaagaccccaactgagtccccagcacctgctacagtgagctgccattccacacccatcacatgtggcactcttgccagtccttgacattgtcgggcttttcacatgttggtaatatttattaaagatgaagatccacatacccttcaactgagcagtttcactagtggaaataccaaaagcttcctacgtgtatatccagaggtttgtagataaatgttgccaccttgtttgtaacagtgaaaaattgaaaacaacctggaagtccagtgatgggaaaatgagtatgtttctgtcttagattggggaacccaaagcagattgcaagactgaaatttcagtgaaagcagtgtatttgctaggtcataccagaaatcatcaattgaggtacggagaaactgaactgagaaggtaagaaaagcaatttaaagtcagcgagcaggttctcattgataacaagctccatactgctgagatacagggaaatggaggggggaaagctggagtattgatcccgcccccctccttggttgtcagctccctgtcctgtgtgtgggcggaacatagtccagctgctctatagcaagtctcaggtgtttgcagtaagaagctgctggcatgcacgggaacagtgaatgccaaacacttaaagcaattcgatgtttaagtatgtaagttcttttttttttagacagcgtttcgctcttgttgcccaggctggcatgcagtggtgtgacctcggcttactgcaacctccgccttcccagattcaagcgattctcctgcctcaggctcccaagtagctaggaccaggtgcgcgccaccacgcccggctaatttttgtattttgtatttttagtagagatggggtttcaccatgttggtcaggctggtctcgaactcgtgaccgcaagcgattcacccacctcagcctcccaaagtgctgggattaccggcttgagccaccacacccggcacatcttcattctttttatgtagtaaaaagtataaggccacacatggtttatttgaagtattttataatttaaaaaaatacagaagcaggaaaaccaattataagttcaagtgagggatgatggttgcttgaaccaaagggttgcatgtagtaagaaattgtgatttaagatatattttaaagttataagtagcaggatattctgatggagtttgactttggttttgggcccagggagtttcagatgcctttgagaaatgaatgaagtagagagaaaataaaagaaaaaccagccaggcacagtggctcacgcctgtaatcccagcgctttgggaggctaaggcaggcagatcacttgagaccagcttgggcaacatggcaaagccccatctctacaaaaaacacaaaaattagctgggcattgtggcgcacacctgtattcccatctagtcaggaagctgagatggaagaattaattgagcccacgagttcaaggctgcagtgagtcgtgattgtgccactgcactccagccggggtgacagaagagaccttgtctcgaaaaggaatctgaaaacaatggaaccatgccttcataattctagaaagttattttcaactgataaatctatattcacccaaataatcaagggtgaaggtaaaataatacatttttagacaagcaaagactcaggggttacctccatgtgccctttttagggaagctgttggagaaaatactccagcaaaatgaaggagtacacaaaccagagaatgacatgaatccagcaaataggatccaacacaggcaatattccagctatggagctagctttaaaaaggaacagtaaaaatattaatcggttagctgggtggaatggcccatgcctgtagtcccagctactcaggaggctcagcagcaggacgacttgagcccaagagttccagaccagcctggccaccttagtgagatcccttctcttaaaaataataacttattgccagatttggggcatttggaaagaagttcattgaagataaagcaaaagtaaaaaaaaaaaaaaaaaaaa

SEQ ID NO: 25174 - DNA, 1313 bp, Homo Sapiens
ctgaggcgccgggagcctgcgccggcgtcctgccggcttcgtctcctcagcggccatgaggcggacaggccccgaggaggaggcctgcggcgtgtggctggacgcggcggcgctgaagaggcggaaagtgcagacacatttaatcaaaccaggcaccaaaatgctaacactccttcctggagaaagaaaggctaatatttattttactcaaagaagagctccatctacaggcattcaccagagaagcattgcttccttcttcaccttgcagccaggaaagacaaatggcagtgaccagaagagtgtttcatctcatacagaaagtcagatcaacaaagagtccaagaaaaatgcgacccagctagaccatttgatcccaggcttagcacacgattgcatggcatcccctttagccacttcaaccactgcagacatccaggaagctggactctctcctcagtccctccagacttctggccaccacagaatgaaaaccccattttcaactgagctatctttgctccagcctgatactccagactgtgctggagatagtcataccccactggctttttccttcaccgaggacttggaaagttcttgtttgctagaccgaaaggaagaaaaaggggattctgccaggaaatgggaatggcttcatgagtctaagaagaactatcagagtatggagaaacacaccaaactacctggggacaaatgctgtcagcccttaggcaagactaaattggaaagaaaggtgtctgccaaagaaaacaggcaggcccctgtcctccttcaaacatacagggaatcctggaatggagaaaacatagaatcagtgaaacaaagccgtagtccagtttctgtgttttcctgggacaatgaaaagaatgacaaggactcctggagtcaacttttcactgaagattctcaaggccagcgggtcattgcccacaacactagagctccttttcaagatgtaaccaataactggaattgggacttagggccgtttcctaacagtccttgggctcagtgccaggaggatgggccaactcaaaatctgaagcctgatttgctctttacccaggactctgaaggtaatcaagttatcagacaccaattctaaatgtttgaagctttgtttctaaaagtaccttgaaatgatagagatgtaggaaaatatagttgtgggtggagagaggagtgagtttgtttaggtgggaaggtggcatgggatgaagttgtcattactgagcatcttctctgtgtaaataaagggcagtaccattgttaaaaaaaaaaaaaaaaaa

SEQ ID NO: 25175 - DNA, 1148 bp, Homo Sapiens
gccacctccgccgcgctctgtccggacggacgctcgccgcccgcagcctgccgcccgccgcagggcgctgacggtcccgcacgtctgccgctgccaccggcgcgcccgaaacttccagcactatgttgaataagagtggtgagagcagatatcctgccttgttcccggtcttagggggttcatccatgagctcggatttcccacattacaacttcaggatgcctaatattggattccagaatctgcctctcaacatatatattgtggtttttggtactgctatatttgtcttcatccttagtttactcttctgttgctacttgattaggctaagacatcaagcacacaaagaattttatgcctacaaacaggttatattaaaagagaaagtaaaagaattgaatttacatgagctctgtgcagtgtgcctagaagacttcaagcctcgagatgagttggggatttgcccatgtaagcacgccttccacagaaagtgccttattaagtggctggaggttcgtaaagtgtgtcccctgtgcaacatgccagttctacagctggcccagttgcacagtaagcaggaccgtggaccccctcaggggccccttcctggggcagagaacattgtatagcttaccgcaaggatcagactgttgctggacacgacgtctgtgtggagccaggaggaacacatgtggtgtctgtatggctgctctctacctaggacaccagctgccacttcttttgcctcatgaagaactcttgggccagccaaactgggaacctaggtgtctgggtcttgtgacaaccaaagcactttgacactaccccctgccgagagaagaggagtggatgagcctgcgggtttgcctcaagaaacttcatgagggtctcttactaactccattacactctctctcctggagcctcatctccatgtcaagcaggagggtaaagaagggaactaagagcaggtctttcaagccacacccccacctgcggatggatgggtttctctgtaggccatgcaggcctttgtttcagcaaaccttcccagcagcccttgagccaagtaaaaccagcacaaccagccaccagtggttggtgaggcagtgcccacaaggcttaaaaaaaaaaaaaaaaaaaaa

SEQ ID NO: 25176 - DNA, 1830 bp, Homo Sapiens
gctgctgcccctgctgtcgctcctggtcggcgcgtggctcaagctagggattttgtcagggagaaaaagtatcggacagaagctgagatgtttggatggagctttgtctttgaggactttgtctctgatgagctgagaaacaaagccacccagccaatgaagtctgtactctggtggcttccagtggaaaaggcattttggaggcagcctgcaggtcctggctctggcatccgagagagactggagcacccagtgttacacgtgagctggaatgacgcccgtgcctactgtgcttggcggggaaaacgactgcccacggaggaagagtgggagtttgccgcccgagggggcttgaagggtcaagtttacccatgggggaactggttccagccaaaccgcaccaacctgtggcagggaaagttccccaagggagacaaagctgaggatggcttccatggagtctccccagtgaatgctttccccgcccagaacaactacgggctctatgacctcctggggaacgtgtgggagtggacagcatcaccgtaccaggctgctgagcaggacatgcgcgtcctccggggggcatcctggatcgacacagctgatggctctgccaatcaccgggcccgggtcaccaccaggatgggcaacactccagattcagcctcagacaacctcggtttccgctgtgctgcagacgcaggccggccgccaggggagctgtaagcagccgggtggtgacaaggagaaaagccttctagggtcactgtcattccctggccatgttgcaaacagcgcaattccaagctcgagagcttcagcctcaggaaagaacttccccttccctgtctcccatccctctgtggcaggcgcctctcaccagggcaggagaggactcagcctcctgtgttttggagaaggggcccaatgtgtgttgacgatggctgggggccaggtgtttctgttagaggccaagtattattgacacaggattgcaaacacacaaacaattggaacagagcactctgaaaggccattttttaagcattttaaaatctattctctccccctttctccctggatgattcaggaagctgacattgtttcctcaaggcagaattttcctggttctgttttctcagccagttgctgtggaaggagaatgctttctttgtggcctcatctgtggtttcgtgtccctctgaaggaaactagtttctactgtgtaacaggcagacatgtaactatttaaagcacagttcagtcctaaaagggtctgggagaaccagatgatgtactaggtgaagcattgcattgtgggaatcacaaagcaaatagtactccagaaagacaaatatcagaagcttcctattctttttttttttttttttttttttgagacagggtctttctctgttgcccaggctagagtgcactggtgatcacggctcactctagccttgaattcctgggcccaagcaattctcccacctcagcctcctgagtagctgggactacaagtgtgcaccaccatgcctggctaattttttgaatttttgtagtgatgggatctcgctctgttgcccagggtggtctcgaactcctggcctcaagcgatcctcccacctcgacctcccaaagtgctgggattacaggtgtgagccacctcgcctgggcccccttctccatatgcctccaaaaacatgtccctggagagtagcctgctcccacactgtcactggatgtcatggggccaataaaatctcctgcaattgtgtatctcaaaaaaaaaaaaaaaaaaaaaaaaaaaaaaaaaaaaaaaaaaaa

SEQ ID NO: 25177 - DNA, 3109 bp, Homo Sapiens
tgcgtgcctggagcagcagcgtctccagggacaggcagccaccatgagcctcagtgaggagcaggcccggagctttctggaccagaaccccgattttgcccgccagtactttgggaagaaactgagccctgagaatgtggccgcggcctgcgaggacgggtgcccgccggactgcgacagcctccgggacctctgccaggtggaggagagcacggcgctgctggagctggtgcaggatatgcaggagagcatcaacatggagcgcgtggtcttcaaggtcctgcggcgcctctgcaccctcctgcaggccgaccgctgcagcctcttcatgtaccgccagcgcaacggcgtggccgagctggccaccaggcttttcagcgtgcagccggacagcgtcctggaggactgcctggtgccccccgactccgagatcgtcttcccactggacatcggggtcgtgggccacgtggctcagaccaaaaagatggtgaacgtcgaggacgtggccgagtgccctcacttcagctcatttgctgacgagctcactgactacaagacaaagaatatgctggccacacccatcatgaatggcaaagacgtcgtggcggtgatcatggcagtgaacaagctcaacggcccattcttcaccagcgaagacgaagatgtgttcttgaagtacctgaattttgccacgttgtacctgaagatctatcacctgagctacctccacaactgcgagacgcgccgcggccaggtgctgctgtggtcggccaacaaggtgtttgaggagctgacggacatcgagaggcagttccacaaggccttctacacggtgcgggcctacctcaactgcgagcggtactccgtgggcctcctggacatgaccaaggagaaggaattttttgacgtgtggtctgtgctgatgggagagtcccagccgtactcgggcccacgcacgcctgatggccgggaaattgtcttctacaaagtgatcgactacatcctccacggcaaggaggagatcaaggtcattcccacaccctcagccgatcactgggccctggccagcggccttccaagctacgtggcagaaagcggctttatttgtaacatcatgaatgcttccgctgacgaaatgttcaaatttcaggaaggggccctggacgactccgggtggctcatcaagaatgtgctgtccatgcccatcgtcaacaagaaggaggagattgtgggagtcgccacattttacaacaggaaagacgggaagccctttgacgaacaggacgaggttctcatggagtccctgacacagttcctgggctggtcagtgatgaacaccgacacctacgacaagatgaacaagctggagaaccgcaaggacatcgcacaggacatggtcctttaccacgtgaagtgcgacagggacgagatccagctcatcctgccaaccagagcgcgcctggggaaggagcctgctgactgcgatgaggacgagctgggcgaaatcctgaaggaggagctgccagggcccaccacatttgacatctacgaattccacttctctgacctggagtgcaccgaactggacctggtcaaatgtggcatccagatgtactacgagctgggcgtggtccgaaagttccagatcccccaggaggtcctggtgcggttcctgttctccatcagcaaagggtaccggagaatcacctaccacaactggcgccacggcttcaacgtggcccagacgatgttcacgctgctcatgaccggcaaactgaagagctactacacggacctggaggccttcgccatggtgacagccggcctgtgccatgacatcgaccaccgcggcaccaacaacctgtaccagatgaagtcccagaaccccttggctaagctccacggctcctcgattttggagcggcaccacctggagtttgggaagttcctgctctcggaggagaccctgaacatctaccagaacctgaaccggcggcagcacgatcacgtgatccacctgatggacatcgccatcatcgccacggacctggccctgtacttcaagaagagagcgatgtttcagaagatcgtggatgagtccaagaactaccaggacaagaagagctgggtggagtacctgtccctggagacgacccggaaggagatcgtcatggccatgatgatgacagcctgcgacctgtctgccatcaccaagccctgggaagtccagagcaaggtcgcacttctcgtggctgctgagttctgggagcaaggtgacttggaaaggacagtcttggatcagcagcccattcctatgatggaccggaacaaggcggccgagctccccaagctgcaagtgggcttcatcgacttcgtgtgcacattcgtgtacaaggagttctctcgtttccacgaagagatcctgcccatgttcgaccgactgcagaacaataggaaagagtggaaggcgctggctgatgagtatgaggccaaagtgaaggctctggaggagaaggaggaggaggagagggtggcagccaagaaaggcacagaaatttgcaatggcggcccagcacccaagtcttcaacctgctgtatcctgtgagcactggtcccatggggaccctatggctccctcaatcttcacccactaggatttgggttctgcctgtggctatttgctacaagaggttaggaagcccaagaaaatgactgaagatcattctggatattttaatttttttttttttttttttttgagatggagtcttgctctgtcacccaggctggagtgccgtggcacgatctcagctcactgcaacctccacctcccaggttcaagcgattctcgtgcctcagcctcctgagtagctgggactacaggcgcccaccaccacacatggctaatttttgtattttcagtacagatggggtttcaccatattgggcaggctggtctcgaactcctgacctcaggtgatcacccgcctcagcttcctgaagtgctgggattacaggcatgagccaccacgcccagcctgtttttataaactgaagccaactgtgaataaactgtagcctacaaaaaaaaaaaaaaaaaaaaaaaaaa

SEQ ID NO: 25178 - DNA, 2928 bp, Homo Sapiens
ccgatccgggcggtgctggcagccggagcggcggcgggcgggccgagcagccggggcagccgcgcgtgggcatccacgggcgccgagcctccgtccgtgtctctatccctcccgggcctttgtcagcgcgcccgctgggagcggggccgagagcgccggttccagtcagacagccccgcaggtcagcggccgggccgagggcgccagagggggccatgtcgtaccagggcaagaagagcatcccgcacatcacgagtgaccgactcctcatcaaaggtggacggatcatcaacgatgaccaatccctttatgctgacgtctacctggaggatggacttatcaaacaaataggagagaacttaatcgttcctggtggagtgaagaccattgaagccaacgggcggatggttattcccggaggtattgatgtcaacacgtacctgcagaagccctcccaggggatgactgcggctgatgacttcttccaagggaccagggcggcactggtgggcgggaccacgatgatcattgaccatgttgttcctgaacctgggtccagcctactgacctctttcgagaagtggcacgaagcagctgacaccaaatcctgctgtgattactccctccacgtggacatcacaagctggtacgatggcgttcgggaggagctggaggtgctggtgcaggacaaaggcgtcaattccttccaagtctacatggcctataaggatgtctaccaaatgtccgacagccagctctatgaagcctttaccttccttaagggcctgggagctgtgatcttggtccatgcagaaaatggagatttgatagctcaggaacaaaagcggatcctggagatgggcatcacgggtcccgagggccatgccctgagcagacctgaagagctggaggccgaggcggtgttccgggccatcaccattgcgggccggatcaactgccctgtgtacatcaccaaggtcatgagcaagagtgcagccgacatcatcgctctggccaggaagaaagggcccctagtttttggagagcccattgccgccagcctggggaccgatggcacccattactggagcaagaactgggccaaggctgcggcgttcgtgacttcccctcccctgagcccggaccctaccacgcccgactacttgacctccctactggcctgtggggacttgcaggtcacaggcagcggccactgtccctacagcactgcccagaaggcggtgggcaaggacaactttaccctgatccccgagggtgtcaacgggatagaggagcggatgacggtcgtctgggacaaggcggtggctactggcaaaatggatgagaaccagtttgtcgctgtcaccagcaccaatgcagccaagatctttaacctgtacccaaggaaagggcggattgccgtgggctcggatgccgacgtggtcatctgggaccccgacaagttgaagaccataacagccaaaagtcacaagtcggcggtggagtacaacatcttcgagggtatggagtgccacggctccccactagtggtcatcagccagggcaagatcgtctttgaagacggaaacatcaacgtcaacaagggcatgggccgcttcattccgcggaaggcgttcccggagcacctgtaccagcgcgtcaaaatcaggaataaggtttttggattgcaaggggtttccaggggcatgtatgacggtcctgtgtacgaggtaccagctacacccaaatatgcaactcccgctccttcagccaaatcttcgccttctaaacaccagcccccacccatcagaaacctccaccagtccaacttcagcttatcaggtgcccagatagatgacaacaatcccaggcgcaccggccaccgcatcgtggcgccccctggtggccgctccaacatcaccagcctcggttgaacgtggatgcgcggaggagctagcctgaaggattctgggaatcatgtccatcccttttcctgtcagtgtttttgaaacccacagttttagttggtgctgatggagggagggggaagtcgaaggatgctctttcccttttctgtttaggaagaagtggtactagtgtggtgtgtttgcttggaaattccttgccccacagttgtgttcatgctgaatccacctcggagcatggtgttttcattcccccttcctagtgaaccacaggttttagcattgtcttgttctgtcccttccacttctaactccactggctccatgattctctgagtggtggttcctttgcaccctgtagatgttctaggatagttgatgcatgttactaaattacgtatgcaagtctgtgagtgcgtctgaggggacatcgccaaggactgactgagacacgatgccgagacctcaagccctgaggggcagtcccaaaacccttacagtgaagatgtttactcattgcccccacctctggtccacactagaaagaagctcgccccacctccacctgtgagatccgtgaattctcggaatggcaggggaagccttgcactaggttgcagagaagcatcctccacatcctgtgtcagaaaccctggtctccgtggcacttgtaactcaccgtgctgtcttctggtctgtgtgtgttcttcaagccagctctaggcttcaggccgagccaggttcacactcagaaagaggtctccccatccccattcggggctgacgatggggggctgatggctgcccctgcgtggcctgagtcctggtccctctgaggcagttgacggggcagtcagatttttaaagttttgtacaaagttttcctttgtaatcactcccatttttacttaacaaccaacttgttgtggctcttatttctgaattcaaagcttgtgaaaaaataaagaaaatgaactgcccactgaaaaaaaaaaaaaaaaaa

SEQ ID NO: 25179 - DNA, 1770 bp, Homo Sapiens
tggacagtgagcatgcgtaccatatctgaagttcgtaaattgaaattgaacatgcgtaattaatctttctgaataggaaaaaatatatacacaacaaaactctccgtttatggaacatgcgcatttgttctcagtaagtttttcgttttgaaagtgagcatgcgcatggtgagtaggttggtccgaagtttgaaccggacagaagcgctggtcggcgtctggcggttgtttttagaggtaatacacctagtttgtggctcagcatgtcaattgtaacagtgcaacttggtcagtgtggcaatcagattggttttgaagtttttgatgctttgcttagtgactcacacagttcccagggactctgctctatgagagagaatgaggcatatcaagcatcttgcaaagaaagattcttcagtgaggaggagaatggagttccaattgcccgggctgttcttgttgacatggaacccaaagttatcaatcaaatgctgtcaaaggctgcccagtctggccaatggaaatatggtcaacatgcatgcttctgtcaaaaacaaggttctggaaacaactgggcatatggttactctgttcatggacccaggcatgaagaatctataatgaacataatccggaaggaagtggagaaatgtgactctttcagtggttttttcatcataatgagtatggctgggggcacaggatcaggattaggagctttcgttacacagaatttagaagatcagtactcaaactcattgaaaatgaatcagattatttggccttatggaactggtgaggttattgttcaaaactacaactccattttgacactttctcacttgtaccgatcttcagacgccctccttcttcatgagaatgatgccatccataagatctgtgcaaaactgatgaatatcaagcagatctcctttagtgatatcaatcaagtcctcgcacatcagctgggaagtgtgttccagcctacttattctgcagaaagctcatttcactacagacgaaatccactaggtattgataggcatgtatggcctcctttatcaggacttcctcctcttagtaaaatgtctctcaacaaggacctgcattttaacacttccattgctaacttggtcattcttcgtgggaaagatgtgcaaagtgcagatgtggagggatttaaagatccagctctgtatacttcctggttgaagcctgttaatgctttcaacgtgtggaaaacccagcgggcctttagcaaatatgagaagtctgcagtgttggtcagcaacagccagttcttagtaaaaccacttgatatgattgttgggaaggcatggaatatgtttgcttcaaaagcctacattcatcagtacacaaaatttggaatcgaagaagaggactttttagacagtttcacgtcattagagcaggttgttgccagttactgtaatctctgatcttgaacaatgggaaaagtataccttaaggcatttctggactaaaatattttcaatactattttctctgtaaagttttcaaagttctccatcctggctaacacggtgaaacaccgtctctaccagaaaatacaaaaaattagccaggcgcggtggcgggtgcctgtagtcccagctactcgggaggctgaggcaggagaatgacgtgaacccaggaggcggagcttgcagtgagccgagatcgcgccactgcactccagcctgggcgacagagcgagactccgtctcaaaaaaaaaaaaaaaaaaaaaa

SEQ ID NO: 25180 - DNA, 2575 bp, Homo Sapiens
gcatggccaaggccgggcggccgccttgcccccgcttcctttcacgctgtcgctgcccgtaggtggttgtggccactgtgcccggagggaggcggcggtggccagtaatgcctgggaaactcctctggggggacattatggagctggaagcacccttggaggagtccgagagccagaagaaggagaggcaaaagagtgacagaaggaagtcaaggcaccattatgactcggatgagaaatcagaaacaagagaaaatggtgttacagatgacctggatgctcccaaggccaaaaaatctaaaatgaaagagaagctaaatggagacactgaagaaggatttaatagactttcagatgaattctccaaatctcataagtcaagaagaaaagatctaccaaatggagatatagatgaatatgaaaaaaaatcaaagcgagtatcatctttagatacttctactcataaatcaagtgataataaactagaggagaccttaacacgtgaacagaaagaaggagccttctccaattttcctatttctgaagagactataaagcttctgaaaggtcgaggggtaacatatctctttcctattcaagttaagacctttggtcctgtatatgaaggaaaagatttaatagctcaagcacggacaggaacaggaaagacattctcttttgccatccccttaattgaaagactccaaagaaatcaagaaacaattaaaaaaagccgctcaccaaaggtacttgttttggctccaacaagggaactggcaaaccaagtagccaaagacttcaaagatataactaggaaactcagcgtggcgtgtttttatggtggaacatcatatcaaagccaaattaatcatattcgaaatggtattgacatcttggttggaacacctggtcgtatcaaagaccatctgcagagtggccgattggatctttctaaactgcgacatgttgtgcttgatgaagtggatcagatgttagatttaggtttcgctgaacaagttgaagatattattcatgaatcctacaaaactgattctgaagacaatcctcagactttacttttttctgcaacttgcccacagtgggtatacaaagttgcaaaaaaatacatgaaatccagatatgaacaggttgaccttgttggaaaaatgactcaaaaggctgcaactactgtggaacatttggccatccagtgtcattggtctcagaggccagcagttattggagatgtccttcaagtctacagtgggtctgaagggagggctattattttctgtgagaccaagaagaatgtaactgaaatggccatgaatccacacataaaacagaatgcccagtgtttacatggggacattgcacagtcacaaagagaaattacactaaaaggcttcagagaaggtagttttaaagttttggtggcaaccaatgtggctgcccgtggtttggacattcctgaagttgacctggtgattcaaagttctcctcctcaggatgttgagtcctatatccatcgctctggacgcacaggtagagctggacggacagggatttgtatatgtttttatcaaccaagagaaagaggtcaactaagatatgtggaacaaaaagcaggaattacttttaaacgtgtaggtgttccttctacaatggatttagttaaatctaaaagcatggatgccatcaggtctctggcttccgtttcttatgctgctgttgattttttccgaccatcagctcagagactgatagaagagaaaggtgcagtggatgcattggctgcagctttagcccacatttctggtgcatcaagctttgaaccacgatctttgatcacctctgataaggggtttgtgaccatgactctggaaagcctagaggaaatacaggatgtcagctgtgcttggaaagaacttaacagaaagctgagtagtaatgcagtgtctcagattaccagaatgtgcctcctgaaaggaaatatgggtgtttgctttgatgttcctacaactgagtcagaaaggttacaggcagagtggcatgattccgactggatactctcagtgccagccaaattacctgaaattgaagaatattatgatggaaacacatcttctaattccagacagaggagtggctggtcaagtggtcgatcaggccggtcaggccggtcaggtggtcgatctggcggccggtcaggtagacagagtcgacaaggaagtcgctcaggaagtcgacaagatggtagaagacgaagtgggaatagaaatcgatcaagaagtgggggccacaaacggagttttgactgagtatttgatagttaatctaccagtgtgagcttgcctatttctgcctaatcatgtacattatccaccaaaaattaggtcatcatagttgaggtatgtgtctgctatttgcaaagaagttggtcgtatttttttaaaaagtatttcacaagaatggaacaaatctacttatccagttatacctttgaataaaaaaacctccttttattgtctcttttcaaaaaaaaaaaaaaaaaaaaaaaaaaaaaaaaaaaaaa

SEQ ID NO: 25181 - DNA, 1259 bp, Homo Sapiens
cggcgccgcgcggcctgcagtcccgggcccgcgccccgcgccgcccgcccgcccgccatggagcccggccccgacggccccgccgcctccggccccgccgccatccgcgagggctggttccgcgagacctgcagcctgtggcccggccaggccctgtcgctgcaggtggagcagctgctccaccaccggcgctcgcgctaccaggacatcctcgtcttccgcagtaagacctatggcaacgtgctggtgttggacggtgtcatccagtgcacggagagagacgagttctcctaccaggagatgatcgccaacctgcctctctgcagccaccccaacccgcgaaaggtgctgatcatcgggggcggagatggaggtgtcctgcgggaggtggtgaagcacccctccgtggagtccgtggtccagtgtgagatcgacgaggatgtcatccaagtctccaagaagttcctgccaggcatggccattggctactctagctcgaagctgaccctacatgtgggtgacggttttgagttcatgaaacagaatcaggatgccttcgacgtgatcatcactgactcctcagaccccatgggccccgccgaaagtctcttcaaggagtcctattaccagctcatgaagacagccctcaaggaagatggtgtcctctgctgccagggcgagtgccagtggctgcacctggacctcatcaaggagatgcggcagttctgccagtccctgttccccgtggtggcctatgcctactgcaccatccccacctaccccagcggccagatcggcttcatgctgtgcagcaagaacccgagcacgaacttccaggagccggtgcagccgctgacacagcagcaggtggcgcagatgcagctgaagtactacaactccgacgtgcaccgcgccgcctttgtgctgcccgagtttgcccgcaaggccctgaatgatgtgagctgagcccaggcgccaccactgatgccacccaggacctcggaccttggagcctgcggggtgcctcggcccctccagccccgggccggacctcctgctggctctcgcccaccaaccaagtgttacaagccccagaatgctgcccggcctgccctgctgggcggactgtctgtgtgtctgtctctctggcgttccacctccaagcctataccagctgtgtacagcgccatctctctgccttctgttgcccctcactcaccaaacacgtgtatttatagcaaaaaaaaaaaaaaaaaaaa

SEQ ID NO: 25182 - DNA, 1080 bp, Homo Sapiens
gtgtaccaggaaattgccatcctcaagaagctggaccaccccaatgtggtgaagctggtggaggtcctggatgaccccaatgaggaccatctgtacatggtgttcgaactggtcaaccaagggcccgtgatggaagtgcccaccctcaaaccactctctgaagaccaggcccgtttctacttccaggatctgatcaaaggcatcgagtacttacactaccagaagatcatccaccgtgacatcaaaccttccaacctcctggtcggagaagatgggcacatcaagatcgctgactttggtgtgagcaatgaattcaagggcagtgacgcgctcctctccaacaccgtgggcacgcccgccttcatggcacccgagtcgctctctgagacctgcaagatcttctctgggaaggccttggatgtttgggccatgggtgtgacactatactgctttgtctttggccagtgcccattcatggacgagcggatcatgtgtttacacagtaagatcaagagtcaggccctggaatttccagaccagcccgacatagctgaggacttgaaggacctgatcacccgtatgctggacaagaaccccgagtcgaggatcgtggtgccggaaatcaagatcctggtgaagaccatgatacgtaaacgctcctttgggaacccattcgagggcagccggcgggaggaacgctcactgtcagcgcctggaaacttgctcacgaagcaaggcagcgaagacaacctccagggcaccgacccgccccccgtgggggaggaggaagtgctcttgtgagaggcagtccctgcgtggaaagttgctgggcccccgcccccggctcccccgcacgcatgcatccactgcggccggaggaggccatggagcccgagtagctgcctggatcgctcgacctcgcatgcgcgccgcgtcgcctctggggggctgctgcaccgcgtttccatagcagcatgtcctacggaaacccagcacgtgtgtagagcctcgatcgtcatctctggttatttgttttttcctttgttgttttaaaggggacaaaaaaaaaaaaaaaaaaaa

SEQ ID NO: 25183 - DNA, 2044 bp, Homo Sapiens
gccgtgcccgcggagagagcgcggcgcgggaggccggcggccggccggctgcatggcgcgctgcgagaggctgcgcggagcggccctgcgcgacgtgctgggccgggcgcagggggtcctgttcgactgtgacggggtgctgtggaacggcgagcgcgccgtgccgggcgccccggagctgctggagcggctggcgcgggccggcaaggcggctctgtttgtgagcaacaacagccggcgcgcgcggcccgagctggccctgcgcttcgcgcgcctcggcttcggggggctgcgcgccgagcagctcttcagctccgcgctgtgcgccgcgcgcctgctgcgccagcgcctgcccgggcctccggacgcgccgggcgccgtgttcgtgctgggcggcgaggggctgcgcgccgagctgcgcgccgcggggctgcgcctggccggggacccgagcgcgggggacggcgcggccccgcgcgtgcgcgccgtgcttgtgggctacgacgagcacttctccttcgccaagctgagggaggcgtgcgcgcacctgcgcgaccccgagtgcctactcgtggccaccgaccgtgacccatggcacccgctgagcgacggcagccggacccctggcaccgggagcctggccgctgcagtggagacagcctcgggacgccaggccctggtggtgggcaagcccagcccctacatgttcgagtgcatcacggagaacttcagcatcgaccccgcacgcacgcttatggtgggtgaccgcctggagaccgacatcctctttggccaccgctgcggcatgaccactgtgctcacgctcacaggagtctcccgcctagaagaggcccaggcctacctagcggccggccagcacgacctcgtgccccattactatgtggagagcatcgcagacttgacagaggggttggaggactgagcccactgcacctgcagccacaggcccacccctccccactccctgatcccgtaggtggaggcgatgggtcacgagccatgttaagcacaaccggctccttggtccagttctgcaccggggtggggctgggacccggggaaggtttgagggcccttgcaaccccctcccagcagtggctgggcactctttgctgccccagaagctggtcccctatggattcatcttggcctgacccagccaggtggccttatttcttccctgtcacctcccctccttgaaatctgggccctggtgcctgctgaagattccctctatccctgagtacttagtcttctcccccttccctggggcttctagagctctctctgcccctcaggtcctggcccttgggtccttgtcaaccagaggtctagggaaccacaacccttattgtcctgggtggaccaatccaaaggctaagtgatagtgactcatcaatgttgggtcctgtggggtaccagtttaggttcctaagtaatagtgaccctttcacgtcctggagcccgagtggaccaatcggaagcctaagtgacgatgaccctcgcatgtcctaggtccctgggtggacccatcaggaccccaagtgatagtgacccagtggtcttttagatcctcagtagaacagtccagaagcctgagagacagtggccccttgataatctgggtctcacgggaccagctaggggtccaggtttcagtcagtaaataagagtggtccacgtcctaaagacacctctcctttacaaagacttgtgatgctctggggcttctgtggccaagccccaccctttcctggtcatggtacccgtacagcgttgatggccacagctcgaaggggggctttcgtgtccccctgtgcggtcagtgttttcagtaccacctctctcccgtgcccacttggctatttacttatttatttattgtgtgccagtgatggtgggtgggggctgggccttccccgccacctccacccctgttgtgacctgtccttccgtacttaataaagtgcgcgtgggagtgttaaaaaaaaaaaaaaaaaaaaaaaaaaaaaaaaaaaaaaaa

SEQ ID NO: 25184 - DNA, 1465 bp, Homo Sapiens
gctcagcgacgccacggccagcagcgctcgcgtcctccccagcaacagttactcaaagctaatcagatagcgaaagaagcaggagagcaagtcaagaaatacggtgaagagtccttcccaaagttgtctaggtccttccgcgccggtgcctggtcttcgtcgtcaacaccatggacagctcccgggaaccgactctggggcgcttggacgccgctggcttctggcaggtctggcagcgctttgatgcggatgaaaaaggttacatagaagagaaggaactcgatgctttctttctccacatgttgatgaaactgggtactgatgacacggtcatgaaagcaaatttgcacaaggtgaaacagcagtttatgactacccaagatgcctctaaagatggtcgcattcggatgaaagagcttgctggtatgttcttatctgaggatgaaaactttcttctgctctttcgccgggaaaacccactggacagcagcgtggagtttatgcagatttggcgcaaatatgacgctgacagcagtggctttatatcagctgctgagctccgcaacttcctccgagacctctttcttcaccacaaaaaggccatttctgaggctaaactggaagaatacactggcaccatgatgaagatttttgacagaaataaagatggtcggttggatctaaatgacttagcaaggattctggctcttcaggaaaacttccttctccaatttaaaatggatgcttgttctactgaagaaaggaaaagggactttgagaaaatctttgcctactatgatgttagtaaaacaggagccctggaaggcccagaagtggatgggtttgtcaaagacatgatggagcttgtccagcccagcatcagcggggtggaccttgataagttccgcgagattctcctgcgtcactgcgacgtgaacaaggatggaaaaattcagaagtctgagctggctttgtgtcttgggctgaaaatcaacccataatcccagactgctttgccttttgctcttactatgtttctgtgatcttgctggtagaattgtatctgtgcattgatgttgggaacacagtgggcaaactcacaaatggtgtgctattcttgggcaagaagagggacgctagggccttccttccaccggcgtgatctatccctgtctcactgaaagcccctgtgtagtgtctgtgttgttttcccttgaccctgggctttcctatcctcccaaagactcagctcccctgttagatggctctgcctgtccttccccagtcaccagggtgggggggacaggggcagctgagtgcattcattttgtgcttttcttatgggctttctgcttagtctgaaaggtgtgtggcattcatggcaatcctgtaacttcaacatagattttttttgtgtgtgtggaaataaatctgcaattggaaacaaaaaaaaaaaaaaaaaaaa

SEQ ID NO: 25185 - DNA, 1901 bp, Homo Sapiens
cgcgtcgccgctcttcggttctgctctgtccgccgccatggcccaagctgacatcgcgctgatcggattggccgtcatgggccagaacttaattctgaacatgaatgaccacggctttgtggtctgtgcttttaataggactgtctccaaagttgatgatttcttggccaatgaggcaaagggaaccaaagtggtgggtgcccagtccctgaaagagatggtctccaagctgaagaagccccggcggatcatcctcctggtgaaggctgggcaagctgtggatgatttcatcgagaaattggtaccattgttggatactggtgacatcatcattgacggaggaaattctgaatatagggacaccacaagacggtgccgagacctcaaggccaagggaattttatttgtggggagcggagtcagtggtggagaggaaggggcccggtatggcccatcgctcatgccaggagggaacaaagaagcgtggccccacatcaagaccatcttccaaggcattgctgcaaaagtgggaactggagaaccctgctgtgactgggtgggagatgagggagcaggccacttcgtgaagatggtgcacaacgggatagagtatggggacatgcagctgatctgtgaggcataccacctgatgaaagacgtgctgggcatggcgcaggacgagatggcccaggcctttgaggattggaataagacagagctagactcattcctgattgaaatcacagccaatattctcaagttccaagacaccgatggcaaacacctgctgccaaagatcagggacagcgcggggcagaagggcacagggaagtggaccgccatctccgccctggaatacggcgtacccgtcaccctcattggagaagctgtctttgctcggtgcttatcatctctgaaggatgagagaattcaagctagcaaaaagctgaagggtccccagaagttccagtttgatggtgataagaaatcattcctggaggacattcggaaggcactctacgcttccaagatcatctcttacgctcaaggctttatgctgctaaggcaggcagccaccgagtttggctggactctcaattatggtggcatcgccctgatgtggagagggggctgcatcattagaagtgtattcctaggaaagataaaggatgcatttgatcgaaacccggaacttcagaacctcctactggacgacttctttaagtcagctgttgaaaactgccaggactcctggcggcgggcagtcagcactggggtccaggctggcattcccatgccctgttttaccactgccctctccttctatgacgggtacagacatgagatgcttccagccagcctcatccaggctcagcgggattacttcggggctcacacctatgaactcttggccaaaccagggcagtttatccacaccaactggacaggccatggtggcaccgtgtcatcctcgtcatacaatgcctgatcatgctgctcctgtcaccctccacgattccacagaccaggacattccatgtgcctcatggcactgccacctggccctttgccctattttctgttcagttttttaaaagtgttgtaagagactcctgaggaagacacacagtttatttgtaaagtagctctgtgagagccaccatgccctctgcccttgcctcttgggactgaccaggagctgctcatgtgcgtgagagtgggaaccatctccttgcggcagtggcttccgcgtgccccgtgtgctggtgcggttcccatcacgcagacaggaagggtgtttgcgcactctgatcaactggaacctctgtatcatgcggctgaattccctttttcctttactcaataaaagctacatcacactgaaaaaaaaaaaaaaaaaa

SEQ ID NO: 25186 - DNA, 2471 bp, Homo Sapiens
cacgctggttttccggggccgctccatcgcgccttcctcctgcgcctcgcttctccggtccagccgccatcttcctttccgcacaggggccgccgagcggggccatgcagccaacgctgcttctcagcctcctgggagccgtggggctggcggctgtcaattccatgccagtggataacaggaaccacaatgaaggaatggtgactcgctgcatcattgaggtcctctcaaatgccttgtcgaagtccagcgctccacccatcacccctgagtgccgccaagtcctgaagacgagtagaaaagacgtcaaagacaaagagacaactgaaaatgaaaacacaaagtttgaagtaagattgttaagagacccagctgatgcctcggaagcccacgagtcctccagcaggggagaggcaggagccccaggggaggaggacatccaaggcccaacaaaggcagacacagagaaatgggcagagggaggcgggcacagccgagagcgagcggatgagccccagtggagcctctatccctccgacagccaagtctctgaagaagtgaagacacgccattctgagaagagccagagagaggatgaggaggaggaggagggagagaactatcaaaaaggggagcgaggggaagatagcagtgaagagaaacaccttgaagagccaggagagacacaaaacgcttttctcaatgaaagaaagcaggcttcagctataaaaaaagaggagttagtggccagatcggaaacacatgctgccgggcattctcaggagaagacacatagccgagagaagagtagccaggagagtggagaggaggcagggagccaggagaatcacccccaggagtctaaaggccaaccccgaagccaggaagaatctgaggaaggtgaggaagatgccacctctgaggtggacaaacgacgcacgaggcccagacaccaccacgggaggagcaggcccgacaggtcctctcaaggagggagtcttccctctgaggaaaagggacacccccaggaggaatctgaggagtcaaacgtcagcatggccagtttaggggaaaagagggaccaccattcaacccactacagggcttcagaggaagaacctgaatatggagaagaaataaagggttatccaggcgtccaggcccctgaggacctggagtgggagcgctataggggcagaggaagtgaagaatacagggctccaagacctcagagtgaggagagttgggatgaggaggacaagagaaactaccccagcttagagcttgataagatggcacatggatatggtgaagaaagtgaggaagagaggggccttgagccgggaaagggacgccatcacagaggcaggggaggggagccacgtgcctatttcatgtctgacaccagagaagagaaaaggttcttgggtgaaggacaccaccgtgtccaagaaaaccagatggacaaggcaaggaggcatccacaaggtgcgtggaaagagctggacagaaattatctcaactacggtgaggaaggagccccagggaagtggcagcagcagggagacctgcaggacactaaagaaaacagggaggaagctaggtttcaagataaacaatatagctcccatcacacagctgaaaagaggaagagattaggggaactgttcaacccatactacgaccctctccagtggaagagcagccattttgaaagaagagacaacatgaatgacaattttctcgagggtgaggaggaaaatgagctgaccttgaacgagaagaatttcttcccagaatacaactatgactggtgggagaaaaagcccttctctgaggatgtgaactgggggtatgagaagagaaacctcgccagggtccccaagctggacctgaaaaggcaatatgacagggtggcccaactggaccagctccttcactacaggaagaagtcagctgagtttccagacttctatgattctgaggagccggtgagcacccaccaggaggcagaaaatgaaaaggacagggctgaccagacagtcctgacagaggacgagaaaaaagaactcgaaaacttggctgcaatggatttggaactacagaagatagctgagaaattcagccaaaggggctgactgtcattggagcggtgggcactgttaagaagcagccatcacatgatctgtttttcaccacttcactgaaagacaccatttatatacccaagggcagaaagtagaacttactattcattaaatgtttgacacaattggaattgtctttaatttctgtcagaatgctattgaaaatgtgaattgcatgacttgtagcatattcttttctgcaaaatagacatattaacatgcttatgacaatgactgtgctactgtctttggaaaaatgtttgtctcagttggaaataataaaagattcacctgagaccaaaaaaaaaaaaaaaaaaaaaaaaa

SEQ ID NO: 25187 - DNA, 2844 bp, Homo Sapiens
gccggtcgttcggacgtcttgcctgtcgctggaggagaggtccgggctctccaggaaggtggctgcggcgacaaaatgaagatattcgtgggcaacgtcgacggggcggatacgactccggaggagctggcagccctctttgcgccctacggcacggtcatgagctgcgccgtcatgaaacagttcgccttcgtgcacatgcgcgagaacgcgggcgcgctgcgcgccatcgaagccctgcacggccacgagctgcggccggggcgcgcgctcgtggtggagatgtcgcgcccaaggcctcttaatacttggaagattttcgtgggcaatgtgtcggctgcatgcacgagccaggaactgcgcagcctcttcgagcgccgcggacgcgtcatcgagtgtgacgtggtgaaagactacgcgtttgttcacatggagaaggaagcagatgccaaagccgcaatcgcgcagctcaacggcaaagaagtgaagggcaagcgcatcaacgtggaactctccaccaagggtcagaagaaggggcctggcctggctgtccagtctggggacaagaccaagaaaccaggggctggggatacggccttccctggaactggtggcttctctgccaccttcgactaccagcaggcttttggcaacagcactggtggctttgatgggcaagcccgtcagcccacaccacccttctttggtcgcgaccgcagccctctgcgccgttcacctccccgagcctcttatgtggctcctctgacggcccagccagctacctaccgggcccagccgtccgtgtcactgggagctgcctacagggcccagccttctgcctctttgggtgttggctatcggactcagcccatgacagcccaggcagcctcttaccgcgctcagccctctgtctcccttggggcaccatacaggggccagctggctagtcctagctcccagtctgctgcagcttcttcactcggcccatatggtggagcccagccctcagcctcggccctttcctcctatgggggtcaggcagctgcagcttcttcgctcaactcctatggggctcagggttcctcccttgcctcctatggtaaccagccatcctcttacggcgcccaggctgcctcttcctatggggttcgtgcagctgcttcttcctacaacacccagggagcagcttcctccttaggctcctacggggctcaggcagcctcctatggggcccagtctgcagcctcctcactagcttatggagcccaggcagcttcatataatgcccagccctcggcctcttacaatgcccagtctgccccatatgctgcacagcaggctgcttcctactcttcccaacctgctgcctatgtggcacagccagccacagctgctgcctatgccagccagccagcagcctacgccgcacaagccactaccccaatggctggctcctatggggcccagccggttgtgcagacccagctgaatagttacggggcccaagcatcaatgggcctttcaggctcctatggggctcagtcggctgctgcggccactggctcctatggtgccgcagcagcctacggggcccaaccttctgccaccctggcagctccttaccgcactcagtcatcagcctcattggctgcttcctatgctgcccagcagcatccccaggctgctgcctcctaccgcggccagccaggcaatgcctacgatggggcaggtcagccgtctgcagcctacctgtccatgtcccagggggccgttgccaacgccaacagcaccccgccgccctatgagcgtacccgcctctccccaccccgggccagctacgacgatccctacaaaaaggctgtcgccatgtcgaaaaggtatggttccgaccggcgtttagccgagctctctgattaccgccgtttatcagagtcgcagctttcgttccgccgctcgccgacaaagtcctcgctggattaccgtcgcctgcccgatgcccattccgattacgcacgctattcgggctcctataatgattacctgcgggcggctcagatgcactctggctaccagcgccgcatgtagggccatcctgggatggggcaccacagggagggagggagaaaacaggtgggtagggttacagatccaggttataactactctggcccatacctttcctggttgtggtttttcatgccctctaccatgtgggccttccccaggagatgatcctgttaagtgttcggcagtaacctactttgttccttcgcctcagcagcaaatcttgctactggctctagatctgcggtttcccctctaccctgcctcccgtctccccagaatgggaatttcttttatgtttttatttttttcctggctcccttttatttttgtgcgcgatatttaaggtcgtctggatggggaagcaacctgcagctgaggtcgccggcgcctttttctttttagatgggaaggaggccaggaaagggtcagcttaaccatttcctatgtgccaagctgtgccagcagtccagggtaccctgactgtccctctgtagactgttgagacgtccagggtaccctgactgtccctctgtagactgttgagactgagttcctgttgggacagtcagttggtatgtatccaagtccctgctgaccactaatgttctagctgatggtgagcggcacagtcccacttccccatctccccaagtaggtggtgttagaaaaccttaattttttttcccttttgtatggactacaaataaaacttggggcaatttgcagtttggaaaaaaaaaaaaaaaaaaaaaaaaaaaaaaaaaaaaaaaaaaaaaa

SEQ ID NO: 25188 - DNA, 1267 bp, Homo Sapiens
ggcgcaagcatctcttcttttttccacctcgccttccgcggattcccagcttgagaaacacctctttgccccgtcatgccaaagaggaaagtgaccttccaaggcgtgggagatgaggaggatgaggatgaaatcattgtccccaagaagaagctggtggaccctgtggctgggtcagggggtcctgggagccgctttaaaggcaaacactctttggatagcgatgaggaggaggatgatgatgatggggggtccagcaaatatgacatcttggcctcagaggatgtagaaggtcaggaggcagccacactccccagcgaggggggtgttcggatcacaccctttaacctgcaggaggagatggaggaaggccactttgatgccgatggcaactacttcctgaaccgggatgctcagatccgagacagctggctggacaacattgactgggtgaagatccgggagcggccacctggccagcgccaggcctcagactcggaggaggaggacagcttgggccagacctcaatgagtgcccaagccctcttggagggacttttggagctcctattgcctagagagacagtggctggggcactgaggcgtctgggggcccgaggaggaggcaaagggagaaaggggcctgggcaacccagttcccctcagcgcctggaccggctctccgggttggccgaccagatggtggcccggggcaaccttggtgtgtaccaggaaacaagggaacggttggctatgcgtctgaagggtttggggtgtcagaccctaggaccccacaatcccacacccccaccctccctggacatgttcgctgaggagttggcggaggaggaactggagaccccaacccctacccagagaggagaagcagagtcgcggggagatggtctggtggatgtgatgtgggaatataagtgggagaacacgggggatgccgagctgtatgggcccttcaccagcgcccagatgcagacctgggtgagtgaaggctacttcccggacggtgtttattgccggaagctggacccccctggtggtcagttctacaactccaaacgcattgactttgacctctacacctgagcctgctgggggcccagtttggtgggcccttctttcctggactttgtggaggaggcaccaagtgtctcaggcagcgaggaaattggaggccatttttcagtcaatttccctttcccaataaaagcctttagttgtgtaaaaaaaaaaaaaaaaaaaaaaaaaaaaa

SEQ ID NO: 25189 - DNA, 999 bp, Homo Sapiens
gaagatggcggctgtgtcggtgtatgctccaccagttggaggcttctcttttgataactgccgcaggaatgccgtcttggaagccgattttgcaaagaggggatacaagcttccaaaggcccggaaaactggcacgaccatcgctggggtggtctataaggatggcatagttcttggagcagatacaagagcaactgaagggatggttgttgctgacaagaactgttcaaaaatacacttcatatctcctaatatttattgttgtggtgctgggacagctgcagacacagacatgacaacccagctcatttcttccaacctggagctccactccctctccactggccgtcttcccagagttgtgacagccaatcggatgctgaagcagatgcttttcaggtatcaaggttacattggtgcagccctagttttagggggagtagatgttactggacctcacctctacagcatctatcctcatggatcaactgataagttgccttatgtcaccatgggttctggctccttggcagcaatggctgtatttgaagataagtttaggccagacatggaggaggaggaagccaagaatctggtgagcgaagccatcgcagctggcatcttcaacgacctgggctccggaagcaacattgacctctgcgtcatcagcaagaacaagctggattttctccgcccatacacagtgcccaacaagaaggggaccaggcttggccggtacaggtgtgagaaagggactactgcagtcctcactgagaaaatcactcctctggagattgaggtgctggaagaaacagtccaaacaatggacacttcctgaatggcatcagtgggtggctggccgcggttctggaaggtggtgagcattgaggcccagtaagacactcatgtggctagtgtttgccgaatgaaactcaactcaataaaaaacaaaaaccaaattgggcagctgaaaaaaaaaaaaaaaaaaaaaaaaaaaaa

SEQ ID NO: 25190 - DNA, 2411 bp, Homo Sapiens
gctcgccctctgctccgtcctgcggctgcccactgccctcctacggtccaccatggccctgctgcactccggccgcgtcctccccgggatcgccgccgccttccacccgggcctcgccgccgcggcctctgccagagccagctcctggtggacccatgtggaaatgggacctccagatcccattctgggagtcactgaagcctttaagagggacaccaatagcaaaaagatgaatctgggagttggtgcctaccgggatgataatggaaagccttacgttctgcctagcgtccgcaaggcagaggcccagattgccgcaaaaaatttggacaaggaatacctgcccattgggggactggctgaattttgcaaggcatctgcagaactagccctgggtgagaacagcgaagtcttgaagagtggccggtttgtcactgtgcagaccatttctggaactggagccttaaggatcggagccagttttctgcaaagattttttaagttcagccgagatgtctttctgcccaaaccaacctggggaaaccacacacccatcttcagggatgctggcatgcagctacaaggttatcggtattatgaccccaagacttgcggttttgacttcacaggcgctgtggaggatatttcaaaaataccagagcagagtgttcttcttctgcatgcctgcgcccacaatcccacgggagtggacccgcgtccggaacagtggaaggaaatagcaacagtggtgaagaaaaggaatctctttgcgttctttgacatggcctaccaaggctttgccagtggtgatggtgataaggatgcctgggctgtgcgccacttcatcgaacagggcattaatgtttgcctctgccaatcatatgccaagaacatgggcttatatggtgagcgtgtaggagccttcactatggtctgcaaagatgcggatgaagccaaaagggtagagtcacagttgaagatcttgatccgtcccatgtattccaaccctcccctcaatggggcccggattgctgctgccattctgaacaccccagatttgcgaaaacaatggctgcaagaagtgaaagtcatggctgaccgcatcattggcatgcggactcaactggtctccaacctcaagaaggagggttccacccacaattggcaacacatcaccgaccaaattggcatgttctgtttcacagggctaaagcctgaacaggtggagcggctgatcaaggagttctccatctacatgacaaaagatggccgcatctctgtggcaggggtcacctccagcaacgtgggctaccttgcccatgccattcaccaggccaccaagtaatgtccctggtgcgaggaaacagagacaacctttctgtcttcagcctctgctattgagagcttcacacagacaatgagagagggtggatggtggtgagtggatcatttctttcagccacagtgtgtaacactcagcatttgaatgtttctcagaaaagaacatgtagtgacacagggcagaggcatccatggctggcgtctggaatattaaaccaaactctccccggtccttttttctccaacttttctcaaagagtttacatgtgcaagaaagtcatcgcaccaaaaaacctgtcaattatgccattgcaatatttcagaagctttaactgaagtgtcaggttcctcgtgagaaacagcacacgttagaggctttgagagaaggcctagttctgtcatgagtagtcggcctcgtgtctgtcctcccatcttggaacaaccttatcaacaggccgcactgcagaaatgatgttttatgaaaaccaatgaggctgctgccactccagcaagggaaataatgcagtttcctgtcttatttaagaaaaagagaaggctctcttttctcccttgtcattgccgttcttttccttacacgcaaagattttttaactattgcagattttcatcccattctactgcttgattgaccatcaactccatcctatcgagatttatttaagaatgaagaacataattttctgctgatgctgtaccctcacccttttcagcaaagaatagtggagagtaggaaactgtactttatctcggcatcctcttgaatgatagtgcaagtttctccagttgggatgttgtctctgcccggttggacctcctccctttgttgaatgtggtgtgcagcctctcatctcacactgtgagtccagcggcgcagggtggtaccaggaaagaggatattctaggctttgcgtgctgctagctgggttcaggcttcacccactggaaagaaccaccatctgctctaaccatgtagacttattgcggcctggtttctctgttacaataaaattactgtagacccaaaaaaaaaaaaaaaaaaaaaaaaaaaa

SEQ ID NO: 25191 - DNA, 1373 bp, Homo Sapiens
cggcacgaggccagctcctagcctccgactccctccccccctcacgcccgccctctcgccttcgccgaaccaaagtggattaattacacgctttctgtttctctccgtgctgttctctcccgctgtgcgcctgcccgcctctcgctgtcctctctccccctcgccctctcttcggcccccccctttcacgttcactctgtctctcccactatctctgcccccctctatccttgatacaacagctgacctcatttcccgataccttttcccccccgaaaagtacaacatctggcccgccccagcccgaagacagcccgtcctccctggacaatcagacgaattctccccccccccccccaaaaaaaagccatccccccgctctgccccgtcgcacattcggcccccgcgactcggccagagcggcgctggcagaggagtgtccggcaggagggccaacgcccgctgttcggtttgcgacacgcagcagggaggtgggcggcagcgtcgccggcttccagacaccaatgggaatcccaatggggaagtcgatgctggtgcttctcaccttcttggccttcgcctcgtgctgcattgctgcttaccgccccagtgagaccctgtgcggcggggagctggtggacaccctccagttcgtctgtggggaccgcggcttctacttcagcaggcccgcaagccgtgtgagccgtcgcagccgtggcatcgttgaggagtgctgtttccgcagctgtgacctggccctcctggagacgtactgtgctacccccgccaagtccgagagggacgtgtcgacccctccgaccgtgcttccggacaacttccccagataccccgtgggcaagttcttccaatatgacacctggaagcagtccacccagcgcctgcgcaggggcctgcctgccctcctgcgtgcccgccggggtcacgtgctcgccaaggagctcgaggcgttcagggaggccaaacgtcaccgtcccctgattgctctacccacccaagaccccgcccacgggggcgcccccccagagatggccagcaatcggaagtgagcaaaactgccgcaagtctgcagcccggcgccaccatcctgcagcctcctcctgaccacggacgtttccatcaggttccatcccgaaaatctctcggttccacgtccccctggggcttctcctgacccagtccccgtgccccgcctccccgaaacaggctactctcctcggccccctccatcgggctgaggaagcacagcagcatcttcaaacatgtacaaaatcgattggctttaaacacccttcacataccctccccccaaattatccccaattatccccacacataaaaaaaaaaaaaaaaaa

SEQ ID NO: 25192 - DNA, 2117 bp, Homo Sapiens
ggcacgaggcgccattttgtgagaagcaaggtggcctccacgtttcctgagcgtcttcttcgcttttgcctcgaccgccccttgaccacagacatgtctcgggatcggttccggagtcgtggcggtggcggtggtggcttccacaggcgtggaggaggcggcggccgcggcggcctccacgacttccgttctccgccgcccggcatgggcctcaatcagaatcgcggccccatgggtcctggcccgggccagagcggccctaagcctccgatcccgccaccgcctccacaccaacagcagcaacagccaccaccgcagcagccaccgccgcagcagccgccaccgcatcagccgccgccgcatccacagccgcatcagcagcagcagccgccgccaccgccgcaggactcttccaagcccgtcgttgctcagggacccggccccgctcccggagtaggcagcgcaccaccagcctccagctcggccccgcccgccactccaccaacctcgggggccccgccagggtccgggccaggcccgactccgaccccgccgcctgcagtcacctcggcccctcccggggcgccgccacccaccccgccaagcagcggggtccctaccacacctcctcaggccggaggcccgccgcctccgcccgcggcagtcccgggcccgggtccagggcctaagcagggcccaggtccgggtggtcccaaaggcggcaaaatgcctggcgggccgaagccaggtggcggcccgggcctaagtacgcctggcggccaccccaagccgccgcatcgaggcggcggggagccccgcgggggccgccagcaccacccgccctaccaccagcagcatcaccaggggcccccgcccggcgggcccggcggccgcagcgaggagaagatctcggactcggaggggtttaaagccaatttgtctctcttgaggaggcctggagagaaaacttacacacagcgattcggttgtttgttgggaatctacctgctgatatcacggaggatgaattcaaaagactatttgctaaatatggagaaccaggagaagtttttatcaacaaaggcaaaggattcggatttattaagcttgaatctagagctttggctgaaattgccaaagccgaactggatgatacacccatgagaggtagacagcttcgagttcgctttgccacacatgctgctgccctttctgttcgtaatctttcaccttatgtttccaatgaactgttggaagaagcctttagccaatttggtcctattgaaagggctgttgtaatagtggatgatcgtggaagatctacagggaaaggcattgttgaatttgcttctaagccagcagcaagaaaggcatttgaacgatgcagtgaaggtgttttcttactgacgacaactcctcgtccagtcattgtggaaccacttgaacaactagatgatgaagatggtcttcctgaaaaacttgcccagaagaatccaatgtatcaaaaggagagagaaacccctcctcgttttgcccagcatggcacgtttgagtacgaatattctcagcgatggaagtctttggatgaaatggaaaaacagcaaagggaacaagttgaaaaaaacatgaaagatgcaaaagacaaattggaaagtgaaatggaagatgcctatcatgaacatcaggcaaatcttttgcgccaagatctgatgagacggcaggaagaattaagacgcatggaagaacttcacaatcaagaaatgcagaaacgtaaagaaatgcaattgaggcaagaggaggaacgacgtagaagagaggaagagatgatgattcgtcaacgtgagatgggccattatcgaagaattcacaaaaaacaatagcctcatcatccccaccatcatagccaccatcaccctccttaacctctacttctacctacgcctaatctactccacctcaatcacactactccccatatctaacaacgtaaaaataaaatgacagtttgaacatacaaaacccaccccattcctccccacactcatcgcccttaccacgctactcctacctatctccccttttatactaataatcttataaaaaaaaaaaaaaaaaaa

SEQ ID NO: 25193 - DNA, 2721 bp, Homo Sapiens
gcgcaaaggggcaagttacccgtcctggcgtttctggggttcgcctcggaggctagcctcggtgctctcgcaggctcgctcgcttctgcatccccgttgccgcccggagccaactcttaagttctggacgccaggcctgaggcagttccgccatggacttctccaagttcctggcagacgacttcgacgtgaaggagtggatcaatgcggccttcagggccggctccaaggaggcggcgtccgggaaggcggatggccacgcagccaccctggtgatgaagctgcagctgttcatccaagaggtgaaccacgccgtggaggaaacaagtcaccaagctctccagaacatgcccaaagtgctccgtgatgttgaagccctaaaacaggaggcatctttcctgaaagaacagatgattcttgtcaaggaggacattaaaaaatttgaacaggacacatctcaatccatgcaggtgttggtagaaattgaccaagtgaagtccagaatgcaacttgctgccgaatctcttcaggaagcagataagtggagcacgttgagcgccgatattgaggagacatttaagactcaggacatagctgtgatttctgccaagctaacaggtatgcagaacagcttaatgatgcttgttgatacaccagactactcagaaaagtgtgtgcacttggaggcactgaagaacaggctggaggccctagccagtccacagattgtagcggcattcacctctcaggctgtagatcagtccaaagtgtttgtgaaggtgtttactgaaattgaccggatgccccagctcctggcctactactacaagtgtcacaaggtgcagcttttagcagcctggcaagagctgtgtcaaagtgacctatccctggaccggcagcttaccggactctatgatgccttgcttggtgcttggcacacacaaatccagtgggctacacaggttttccagaagccccacgaggtggtaatggtgctgctgattcagaccctgggggccctcatgccctcgctgccctcctgcctcagcaacggcgtggagagggcagggcccgagcaggagctcaccaggctgctggagttctacgacgccaccgcccacttcgccaagggcttggagatggcactgctcccccacctacatgaacacaatctggtaaaagtcacggagctggtggatgctgtgtatgatccatacaaaccctaccagctgaagtatggcgacatggaagagagcaacctcctcatccagatgagtgctgtgcctctggagcatggggaagtgattgactgtgtgcaggagctgagccactccgtgaacaagctgtttggtctggcgtctgcagccgttgacagatgcgtcagattcaccaatggcctggggacctgcggcctgttgtcagccctgaaatccctctttgccaagtatgtgtctgatttcaccagcactctccagtccatacgaaagaagtgcaaactggaccacattcctcccaactccctcttccaggaagattggacggcttttcagaactccattaggataatagccacctgtggagagcttttgcggcattgtggggacttcgagcagcagctagccaacaggattttgtccacagctgggaagtatctatctgattcctgcagcccccggagcctggctggttttcaggagagcatcttgacagacaagaagaactctgccaagaacccatggcaagaatataattacctccagaaagataaccctgctgaatatgccagtttaatggaaatactttatacccttaaggaaaaagggtcaagcaaccacaacctgctggctgcacctcgagcagcgctgactcggcttaaccagcaggcccaccagctggctttcgattccgtgttcctgcgcatcaaacaacagctgttgcttatttcgaagatggacagctggaatacggctggcatcggagaaaccctcacagatgaactgcccgcctttagtctcacccctctcgagtacatcagcaacatcgggcagtacatcatgtccctccccctgaatcttgagccatttgtgactcaggaggactctgccttagagttggcattgcacgctggaaagctgccatttcctcctgagcagggggatgaattgcccgagctggacaacatggctgacaactggctgggctcgatcgccagagccacaatgcagacctactgtgatgcgatcctacagatccctgagctgagcccacactctgccaagcagctggccactgacatcgactatctgatcaacgtgatggatgccctgggcctgcagccgtcccgcaccctccagcacatcgtgacgctactgaagaccaggcctgaggactatagacaggtcagcaaaggcctgccccgtcgcctggccaccaccgtggccaccatgcggagtgtgaattactgaccccaccacacaccggaccaccaagagagccagggctgctgtttcgcgactcaccagcacagatttgctcagaaactctgcccaagattgggcagaagttactttaaaaagacttggttcagctggtcacggtggctcacgcctgtaatcccagcactttgggaggccaagccagatggatcatgaagccaggagttcgagaccagcctgaccaacatggtgaaaccccatctctactaaaaaaaaaaaaaaaaaa

SEQ ID NO: 25194 - DNA, 1091 bp, Homo Sapiens
gctatggttgcttggagagtgcatccggcccggtacttgtgatcggaggagagccggatcgtccttccttgaaccctctgggtagggctgtgctgaggggctgggcggggagcacaggccgtgtccgctcgcttgcaccttttcagactgccgtgtcaggcctcgagccgggcccacctggagccctcccctgcccacccgcccccagcgctcgatatccgcccccggcccagaagggccgggctcggtcatccccagtcccgtcgcggccactgacccttgagatcagccctcccctccccaccttcccgtcccaggccagcccagggcccgaagcccacccactcgcgtctctagcagccgctcttgtcctctgggtacggctcgcgggagtgttggttaccatggtgaagctggcagccaaatgcatcctggcaggagacccagcagtgggcaagaccgccctggcacagatcttccgcagtgatggagcccatttccagaaaagctacaccctgacaacaggaatggatttggtggtgaagacagtgccagttcctgacacgggagacagtgtggaactcttcatttttgactctgctggcaaggagctgttttcggaaatgctggataaattgtgggagagtcccaatgtcttatgtctcgtctatgatgtgaccaatgaagaatccttcaacaactgcagcaagtggctggagaaggctcggtcacaggctccaggcatctctctcccaggtgttttagttgggaacaagacagacctggccggcagacgagcagtggactcagctgaggcccgggcatgggcgctgggccagggcctggaatgttttgaaacatccgtgaaagagatggaaaacttcgaagcccctttccactgccttgccaagcagttccaccagctgtaccgggagaaggtggaggttttccgggccctggcatgacgagctggagcagatcgtgctgcacaaccggagaagacagaattacctctgctcttttaatatataatgatggctttaaataaaattaggagaaaatgtcaaaaaaaaaaaaaaaaaaaaaaaaaa

SEQ ID NO: 25195 - DNA, 2162 bp, Homo Sapiens
ggagggagccggagcgcttctcccgagttggtgatagattggtggtcatccaacatgcagaaatgaatgagcagtgaaaagcagcagagccgatgggtcatgaggatgtaagtgcgtttgaaggcttccacaccctctactccaggacagaatcatgaataaactggaggataagcaggaccagatgataccatgaagagaagtttacaggccctctattgccaactgttaagtttcctgctgatcttggcactgaccgaagcgctggcatttgccatccaggaaccatctcccagggaatctcttcaggtcctcccttcaggcactcccccgggaaccatggtgacagcaccccacagctctaccagacatacttctgtggtgatgctgacccccaatcccgatggacccccctcacaggctgcagctcccatggcaacaccgacaccccgtgcagaggggcaccctcctacgcacaccatctccaccatcgctgcgacagtaaccgccccccattctgaaagctccctgtccacagggcccgctccagcagccatggcaaccacatcctccaagccagagggccgccctcgagggcaggctgcccccaccatcctgctgacaaagccaccgggggccaccagccgccccaccacagcgcccccccgcactaccacacgcaggccccccaggcccccaggctcttcccgaaaaggggctggtaattcatcacgccctgtcccgcctgcacctggtggccactccaggagtaaagaaggacagcgaggacgaaatccaagctccacacctctggggcagaagcggcccctggggaaaatctttcagatctacaagggcaacttcacagggtctgtggaaccggagccctctaccctcacccccaggaccccactctggggctactcctcttcaccacagccccagacagtggctgcgaccacagtgcccagcaatacctcatgggcacccaccaccacctccctggggcctgcaaaggacaagccaggccttcgcagagcagcccaggggggtggttctaccttcaccagccaaggagggacaccagatgccacagcagcctcaggtgcccctgtcagtccacaagctgccccagtgccttctcagcgcccccaccacggtgacccacaggatggccccagccatagtgactcttggcttactgttacccctggcaccagcagacctctgtctaccagctctggggtcttcacggctgccacggggcccaccccagctgccttcgataccagtgtctcagccccttcccaggggattcctcagggagcatccacaaccccacaagctccaacccatccctccagggtctcagaaagcactatttctggagccaaggaggagactgtggccaccctcaccatgaccgaccgggtgcccagtcctctctccacagtggtatccacagccacaggcaatttcctcaaccgcctggtccccgccgggacctggaagcctgggacagcagggaacatctcccatgtggccgagggggacaaaccgcagcacagagccaccatctgcctgagcaagatggatatcgcctgggtgatcctggccatcagcgtgcccatctcctcctgctctgtcctgctgacggtgtgctgcatgaagaggaagaagaagaccgccaacccggagaacaacctgagctactggaacaacaccatcaccatggactacttcaacaggcatgctgtggagctgcccagggagatccagtcccttgaaacctctgaggaccagctctcagagccccgctccccagccaatggcgactatagagacactgggatggtccttgttaaccccttctgtcaagaaacactgtttgtgggaaacgatcaagtatctgagatctaactacagcaggcatcactttgccattccgtatttttcgtctctaaattataaatatacaaatatatatattataaatataacctttgtgtaaccctgacttaatgagaaacattttcagctttttttcctatgaattgtcaacatcttttttacaagtgtggtttaaaaaaaaaaaaactttacagaatgatctgtggctttataaaataaaggtatttctaagcaaaaaaaaaaaaaaaaaa

SEQ ID NO: 25196 - DNA, 2381 bp, Homo Sapiens
ggcggacgctggaaagcgccgttcctgactctaatgtacttagacacttgaagccacaaaaggatttatccccgaggttcctcatctgctcgcgaggatgccttttctcttctgccttgcgaaataacagcagcctagctgttgcccgtgaccagtgagaaaggcagcgtcgcgggctgattaggtttcacccaaagggtgccggcgccgaattggtttctaacgagaacttttaaaatgatccgttccaaaaaagggtaggagccgcgagaccctccaactgcccagagaaaacaagtctcgtctggcaaagttctcggcccacgcggtccgcggccaagggccaacggtccctcgccccacgttgccgcagcactgcgcgtgcgcgagccgctgtcaaacgcgctgacggaggccgagaagaaaaaaaggcgggagccgtcaatcccgggttgagcaaaatggcgcgggagaaggagatgcaggagttcacccgtagcttcttccgaggccgcccggacctcagcacgcttacgcattccatcgtgcggcggaggtacttagctcactcgggccgcagccacctggagcccgaggagaagcaggcactgaagcggctggtggaggaggagctgctgaagatgcaggtggatgaagccgcttccagggaagacaaactggaccttaccaagaagggcaagaggcctcccaccccttgtagcgacccggagagaaaaaggttccgcttcaattcagagtcggagtccggctctgaagcctccagcccagactactttggacccccagcaaagaatggggtggcagcagaagtcagcccagccaaagaggagaatccaaggcgagcctcaaaggcagttgaggagagcagtgatgaggaacggcagagggacctgcccgcacagaggggagaggagagcagtgaggaggaggaaaaggggtacaaggggaagactaggaagaaacctgtggtaaagaagcaggcaccaggcaaggcctcagtcagtaggaagcaggccagggaagaaagtgaggagagcgaggcagaacccgttcagaggacagcaaagaaggtggagggaaataaaggaactaaaagcctgaaggaaagtgaacaggagagtgaagaggagatcctagcccagaagaaagagcagagagaggaggaagtggaggaggaagagaaagaagaggatgaggaaaagggggattggaaacccagaaccaggagcaatggccggagaaagtcagctagggaggagaggagctgtaagcagaaaagccaggcaaagaggctcttgggagactcagacagcgaggaagagcagaaagaggcagccagcagtggggatgacagtgggagagatagagaacccccagtgcagaggaagagtgaggacaggacccagcttaagggtgggaagaggttgagtggaagcagcgaggacgaggaagacagtgggaagggggaacccacagctaaaggctctagaaagatggccagactgggcagcaccagtggtgaggaaagtgacttggagagggaggtaagtgacagcgaggcagggggaggcccccagggggagaggaagaaccgctcttccaagaagagctccaggaaaggcaggacacgaagctcctcttcctcctcagatggaagtccagaggccaaaggagggaaggctggctcaggtcgccgtggagaggaccacccggctgtgatgaggctgaagcgctacattcgggcctgtggtgcccatcgaaactacaagaagctgttgggctcctgttgctcacacaaggagcgcctgagtatcctccgggcagaactggaagcgctaggcatgaagggtaccccttccctagggaagtgtcgggccctgaaggagcagagggaggaggcagctgaggtggcctccttggatgttgcgaacatcatcagtggctcgggccggccacgcagacgtacagcctggaaccctttaggagaagcagcacccccaggggagctgtaccgacggaccctggactcagatgaagagcggccccgtcccgcacccccagactggtcacatatgcgtggcatcatcagcagtgatggcgagagtaactgagctctgccacccccaggagggacccttgatacatgtacaaagcatacatagcaccccttgccctgtgtctgtggaacagaagcagcttccttcagagaagactgcagctcccaaggacacaagctgttgggatgctacttctcagcttcacgctgtccctttaaggtgtttattttttaagactcaataaaggagtgtttttaatcacctcaaaaaaaaaaaaaaaaaaaaaaaaaaaaaaaaaaaaaa

SEQ ID NO: 25197 - DNA, 3413 bp, Homo Sapiens
ctccagccatcggagaccagagccgccccctctgctcgagaaaggggctcagcggcggcggaagcggagggggaccaccgtggagagcgcggtcccagcccggccactgcggatccctgaaaccaaaaagctcctgctgcttctgtaccccgcctgtccctcccagctgcgcagggccccttcgtgggatcatcagcccgaagacagggatggagaggcctctgtgctcccacctctgcagctgcctggctatgctggccctcctgtcccccctgagcctggcacagtatgacagctggccccattaccccgagtacttccagcaaccggctcctgagtatcaccagccccaggcccccgccaacgtggccaagattcagctgcgcctggctgggcagaagaggaagcacagcgagggccgggtggaggtgtactatgatggccagtggggcaccgtgtgcgatgacgacttctccatccacgctgcccacgtcgtctgccgggagctgggctacgtggaggccaagtcctggactgccagctcctcctacggcaagggagaagggcccatctggttagacaatctccactgtactggcaacgaggcgacccttgcagcatgcacctccaatggctggggcgtcactgactgcaagcacacggaggatgtcggtgtggtgtgcagcgacaaaaggattcctgggttcaaatttgacaattcgttgatcaaccagatagagaacctgaatatccaggtggaggacattcggattcgagccatcctctcaacctaccgcaagcgcaccccagtgatggagggctacgtggaggtgaaggagggcaagacctggaagcagatctgtgacaagcactggacggccaagaattcccgcgtggtctgcggcatgtttggcttccctggggagaggacatacaataccaaagtgtacaaaatgtttgcctcacggaggaagcagcgctactggccattctccatggactgcaccggcacagaggcccacatctccagctgcaagctgggcccccaggtgtcactggaccccatgaagaatgtcacctgcgagaatgggctaccggccgtggtgagttgtgtgcctgggcaggtcttcagccctgacggaccctcgagattccggaaagcgtacaagccagagcaacccctggtgcgactgagaggcggtgcctacatcggggagggccgcgtggaggtgctcaaaaatggagagtgggggaccgtctgcgacgacaagtgggacctggtgtcggccagtgtggtctgcagagagctgggctttgggagtgccaaagaggcagtcactggctcccgactggggcaagggatcggacccatccacctcaacgagatccagtgcacaggcaatgagaagtccattatagactgcaagttcaatgccgagtctcagggctgcaaccacgaggaggatgctggtgtgagatgcaacacccctgccatgggcttgcagaagaagctgcgcctgaacggcggccgcaatccctacgagggccgagtggaggtgctggtggagagaaacgggtcccttgtgtgggggatggtgtgtggccaaaactggggcatcgtggaggccatggtggtctgccgccagctgggcctgggattcgccagcaacgccttccaggagacctggtattggcacggagatgtcaacagcaacaaagtggtcatgagtggagtgaagtgctcgggaacggagctgtccctggcgcactgccgccacgacggggaggacgtggcctgcccccagggcggagtgcagtacggggccggagttgcctgctcagaaaccgcccctgacctggtcctcaatgcggagatggtgcagcagaccacctacctggaggaccggcccatgttcctgctgcagtgtgccatggaggagaactgcctctcggcctcagccgcgcagaccgaccccaccacgggctaccgccggctcctgcgcttctcctcccagatccacaacaatggccagtccgacttccggcccaagaacggccgccacgcgtggatctggcacgactgtcacaggcactaccacagcatggaggtgttcacccactatgacctgctgaacctcaatggcaccaaggtggcagagggccacaaggccagcttctgcttggaggacacagaatgtgaaggagacatccagaagaattacgagtgtgccaacttcggcgatcagggcatcaccatgggctgctgggacatgtaccgccatgacatcgactgccagtgggttgacatcactgacgtgccccctggagactacctgttccaggttgttattaaccccaacttcgaggttgcagaatccgattactccaacaacatcatgaaatgcaggagccgctatgacggccaccgcatctggatgtacaactgccacataggtggttccttcagcgaagagacggaaaaaaagtttgagcacttcagcgggctcttaaacaaccagctgtccccgcagtaaagaagcctgcgtggtcaactcctgtcttcaggccacaccacatcttccatgggacttccccccaacaactgagtctgaacgaatgccacgtgccctcacccagcccggcccccaccctgtccagacccctacagctgtgtctaagctcaggaggaaagggaccctcccatcattcatggggggctgctacctgacccttggggcctgagaaggccttgggggggtggggtttgtccacagagctgctggagcagcaccaagagccagtcttgaccgggatgaggcccacagacaggttgtcatcagcttgtcccattcaagccaccgagctcaccacagacacagtggagccgcgctcttctccagtgacacgtggacaaatgcgggctcatcagcccccccagagagggtcaggccgaaccccatttctcctcctcttaggtcattttcagcaaacttgaatatctagacctctcttccaatgaaaccctccagtctattatagtcacatagataatggtgccacgtgttttctgatttggtgagctcagacttggtgcttccctctccacaacccccaccccttgtttttcaagatactattattatattttcacagacttttgaagcacaaatttattggcatttaatattggacatctgggcccttggaagtacaaatctaaggaaaaaccaacccactgtgtaagtgactcatcttcctgttgttccaattctgtgggtttttgattcaacggtgctataaccagggtcctgggtgacagggcgctcactgagcaccatgtgtcatcacagacacttacacatacttgaaacttggaataaaagaaagatttatgaaaaaaaaaaaaaaaaaaa

SEQ ID NO: 25198 - DNA, 2933 bp, Homo Sapiens
ctgggcggagaagctgcttcctcctgggaacaaccgcctcccgctcctagcaggttgctactgccccgaacccgcgctgcagggaacagcggggcaaacaaaaccaatagagccatggcgactccctctgctgccttcgaggcccttatgaatggtgtgacaagctgggatgtacccgaagatgctgttccatgtgaactgcttcttattggagaggcttcatttcctgtgatggtgaatgacatgggccaggtcctcattgctgcctcctcctatggccgtggccgcctggtggtcgtgtcccatgaggactacttggtggaagcccagctcacgccctttctcctgaacgcagtggggtggctttgctcttcccctggggctcccattggtgtacacccatccctggcacctttggccaaaatcctcgagggctctggagtggatgcaaaggttgagccagaagtgaaagactccctgggggtttactgtattgatgcctacaatgaaaccatgacagaaaagctggtcaagttcatgaaatgtggtggcggcttgctcataggaggacaagcctgggattgggccaaccagggggaggatgaaagggttctgttcacgttccctgggaacctcgtgaccagtgtggctggcatttactttactgacaacaaaggggacacgagtttctttaaagtctccaagaagatgcccaagatcccagtgttggttagttgtgaagatgacctctccgacgacagagaagagcttctgcatgggatttcagagctggacatcagcaactcggattgtttcccatcccagctgctagtgcatggggctttagcctttcctctagggttagattcctaccatggctgtgttatagcggctgcccgctatggccggggccgggtggttgtgactggccataaggtattattcactgttggtaaactgggcccctttctgctcaatgctgtccgctggctggatgggggccgcagaggcaagattgtggtgcagacagagctgagaaccctgagtggcctcctcgcagtggggggcatagacaccagcatcgagcccaatctgaccagtgatgcaagtgtctactgctttgaacccgtgagtgaagtgggggtcaaggaactgcaggagtttgtagcagagggtggcgggctatttgttggagcccaagcctggtggtgggccttcaagaaccccggagtgtcccctttggctcgattcccaggaaacctcctcctcaacccctttggcatcagcattacaagccaaagcctcaatccagggccctttcgtactcctaaagcagggataaggacctatcacttccgctccaccttggccgagttccaggttataatgggcaggaagagaggaaatgtggaaaagggctggttggcaaagctgggaccagatggtgcagctttcctgcagattcccgcagaagagatccctgcctacatgtctgtgcatcgactcctgaggaagctgctaagtcgatatcggcttccagtagcaacccgagagaaccctgttatcaatgactgctgcagaggtgctatgctttccctggccacagggctggcccactctggaagcgacctctctctgttagtcccagaaattgaagatatgtacagcagcccctatctgcgcccctcagaatctcctatcaccgtcgaggtcaactgcaccaatccaggcaccagatattgctggatgagtactgggctctacatacctggaaggcaaattatagaagtctcactgcctgaagctgctgcctctgccgacctgaagatacagattggctgccacacagatgacctgaccagggccagcaagcttttccgaggcccactcgtaattaaccggtgctgcttggacaaacccacaaaatcgatcacgtgcctctggggtggactcctctatataattgtgcctcagaacagcaaactgggttctgtgcctgtcaccgtgaagggggctgtgcatgctccatactacaagctgggggagaccaccctggaggagtggaagaggcgtatccaggagaatccagggccctggggagagctggccacggacaacatcattctgaccgtgccgaccgcaaatcttcgtactctggagaaccctgagccgctgctccgcctctgggatgaggtgatgcaggctgtggcgcgactgggagctgagcccttccctttgcgcctgcctcagaggattgttgccgacgtgcagatctcagtgggctggatgcatgcagggtaccccatcatgtgccatctggagtcagtgcaggagctcatcaacgagaagctcatcagaaccaaggggctgtggggccccgtccatgagctgggccgcaaccagcagcggcaggagtgggagttcccaccacacaccaccgaggccacctgcaacctgtggtgtgtgtatgtgcatgagacggtcttgggcattcctcgaagccgtgccaatattgctctgtggcccccagttcgggagaagagagtcagaatctacctgagcaagggtcccaatgtgaaaaactggaatgcatggaccgcactggaaacgtatttacagctccaggaagcctttggttgggagccattcatccgtctcttcaccgagtacaggaaccagaccaacttgcccacagaaaatgttgacaaaatgaatctgtgggtcaagatgttctcccaccaagtgcagaagaacctggctccgttctttgaggcctgggcctggcccatccagaaggaagtggctaccagcctggcctatctgcctgaatggaaggaaaatattatgaaattgtacctcctcacacagatgtaaggagtgcccatcgaggtggcaggccccactgaaattgaagtcaaaaaaaaaaaaaaaaa

SEQ ID NO: 25199 - DNA, 1691 bp, Homo Sapiens
ccttttcacgcgcgtcgcgagctaacggactcggcggcggcggcggcggcggcctgcgccccacccgcaccccatctggaccgcatcgctgaatgtgcccggacctgcgccttctgggtctctgaaagaagatgaatttggctgagatttgtgataatgcaaagaaaggaagagaatatgcccttcttggaaattacgactcatcaatggtatattaccagggggtgatgcagcagattcagagacattgccagtcagtcagagatccagctatcaaaggcaaatggcaacaggttcggcaggaattattggaggaatatgaacaagttaaaagtattgtcagcactttagaaagttttaaaattgacaagcctccagatttccctgtgtcctgtcaagatgaaccatttagagatcctgctgtttggccaccccctgttcctgcagaacacagagctccacctcagatcaggcgtcccaatcgagaagtaagacctctgaggaaagaaatggcaggagtaggagcccggggacctgtaggccgagcacatcctatatcaaagagtgaaaagccttctacaagtagggacaaggactatagagcaagagggagagatgacaagggaaggaagaatatgcaagatggtgcaagtgatggtgaaatgccaaaatttgatggtgctggttatgataaggatctggtggaagcccttgaaagagacattgtatccaggaatcctagcattcattgggatgacatagcagatctggaagaagctaagaagttgctaagggaagctgttgttcttccaatgtggatgcctgactttttcaaagggattagaaggccatggaagggtgtactgatggttggacccccaggcactggtaaaactatgctagctaaagctgttgccactgaatgtggtacaacattcttcaacgtttcgtcttctacactgacatctaaatacagaggtgaatctgagaagttagttcgtctgttgtttgagatggctagattttatgcccctaccacgatcttcattgatgagatagattctatctgcagtcgaagaggaacctctgatgaacatgaggcaagtcgcagggtcaagtctgaactgctcattcagatggatggagttggaggagctttagaaaatgatgatccttccaaaatggttatggtattggctgctactaatttcccgtgggacattgatgaagctttgcgaagaaggttagaaaaaaggatatatatacctctcccaacagcaaaaggaagagctgagcttctgaagatcaaccttcgtgaggtcgaattagatcctgatattcaactggaagatatagccgagaagattgagggctattctggtgctgacatcactaatgtttgcagggatgcctctttaatggcaatgagacggcgtatcaatggcttaagtccagaagaaatccgtgcactttctaaagaggaacttcagatgcctgttaccaaaggagactttgaattggccctaaagaaaattgctaagtctgtctctgctgcagacttggagaagtatgaaaaatggatggttgaatttggatctgcttgaatttctgtcagctctttaatttctggtatttttgttgataaaatacgaagaaattcctgcaatttttaaaaaaaaaaaaaaaaaaaa

SEQ ID NO: 25200 - DNA, 2634 bp, Homo Sapiens
gtggagggccgcccgaagggcactctcggacattaacccgcattctgtaccatggggcgcaagttggaccctacgaaggagaagcgggggccaggccgaaaggcccggaagcagaagggtgccgagacagaactcgtcagattcttgcctgcagtaagtgacgaaaattccaagaggctgtctagtcgtgctcgaaagagggcagccaagaggagattgggctctgttgaagcccctaagacaaataagtctcctgaggccaaaccattgcctggaaagctaccaaaagggatctctgcaggagctgtccagacagctggtaagaagggaccccagtccctatttaatgctcctcgaggcaagaagcgcccagcacctggcagtgatgaggaagaggaggaggaagactctgaagaagatggtatggtgaaccacggggacctctggggctccgaggacgatgctgatacggtagatgactatggagctgactccaactctgaggatgaggaggaaggtgaagcgttgctgcccattgaaagagctgctcggaagcagaaggcccgggaagctgctgctgggatccagtggagtgaagaggagaccgaggacgaggaggaagagaaagaagtgacccctgagtcaggccccccaaaggtggaagaggcagatgggggcctgcagatcaatgtggatgaggaaccatttgtgctgccccctgctggggagatggagcaggatgcccaggctccagacctgcaacgagttcacaagcggatccaggatattgtgggaattctgcgtgattttggggctcagcgggaggaagggcggtctcgttctgaatacctgaaccggctcaagaaggatctggccatttactactcctatggagacttcctgcttggcaagctcatggacctcttccctctgtctgagctggtggagttcttagaagctaatgaggtgcctcggcccgtcaccctccggaccaataccttgaaaacccgacgccgagaccttgcacaggctctaatcaatcgtggggttaacctggatcccctgggcaagtggtcaaagactggactagtggtgtatgattcttctgtgcccattggtgctacccccgagtacctggctgggcactacatgctgcagggagcctccagcatgttgcccgtcatggccttggcaccccaggaacatgagcggatcctggacatgtgttgtgcccctggaggaaagaccagctacatggcccagctgatgaagaacacgggtgtgatccttgccaatgacgccaatgctgagcggctcaagagtgttgtgggcaacttgcatcggctgggagtcaccaacaccattatcagccactatgatgggcgccagttccccaaggtggtggggggctttgaccgagtactgctggatgctccctgcagtggcactggggtcatctccaaggatccagccgtgaagactaacaaggatgagaaggacatcctgcgctgtgctcacctccagaaggagttgctcctgagtgctattgactctgtcaatgcgacctccaagacaggaggctacctggtttactgcacctgttctatcacagtagaagagaatgagtgggtggtagactatgctctgaaaaagaggaatgtgcgactggtgcccacgggcctagactttggccaggaaggttttacccgctttcgagaaaggcgcttccaccccagtctgcgttctacccgacgcttctaccctcatacccacaatatggatgggttcttcattgccaagttcaagaaattttccaattctatccctcagtcccagacaggaaattctgaaacagccacacctacaaatgtagacttgcctcaggtcatccccaagtctgagaacagcagccagccagccaagaaagccaagggggctgcaaagacaaagcagcagctgcagaaacagcaacatcccaagaaggcctccttccagaagctgaatggcatctccaaaggggcagactcagaattgtccactgtaccttctgtcacaaagacccaagcttcctccagcttccaggatagcagtcagccagctggaaaagccgaagggatcagggagccaaaggtgactgggaagctaaagcaacgatcacctaaattacagtcctccaagaaagttgctttcctcaggcagaatgcccctcccaagggcacagacacacaaacaccggctgtgttatccccatccaagactcaggccaccctgaaacctaaggaccatcatcagccccttggaagggccaagggggttgagaagcagcagttgccagagcagccttttgagaaagctgccttccagaaacagaatgatacccccaaggggcctcagcctcccactgtgtctcccatccgttccagccgccccccaccagcaaagaggaagaaatctcagtccaggggcaacagccagctgctgctatcttagatggttgaaaactagacgggtggctcactgccattgtcaccaggttggaactcttgcctctgtgaggatgccttctctactgtgcatacccatgaaatttaatacacattttaaaacctctgaaaaaaaaaaaaaaaaaaaaaa

SEQ ID NO: 25201 - DNA, 1947 bp, Homo Sapiens
catccctgccattgccgggcactcgcggcgctgctaacggcctggtcacatgctctccggagagctacgggagggcgctgggtaacctctatccgagccgcggccgcgaggaggagggaaaaggcgagcaaaaaggaagagtgggaggaggaggggaagcggcgaaggaggaagaggaggaggaggaagaggggagcacaaaggatccaggtctcccgacgggaggttaataccaagaaccatgtgtgccgagcggctgggccagttcatgaccctggctttggtgttggccacctttgacccggcgcgggggaccgacgccaccaacccacccgagggtccccaagacaggagctcccagcagaaaggccgcctgtccctgcagaatacagcggagatccagcactgtttggtcaacgctggcgatgtggggtgtggcgtgtttgaatgtttcgagaacaactcttgtgagattcggggcttacatgggatttgcatgacttttctgcacaacgctggaaaatttgatgcccagggcaagtcattcatcaaagacgccttgaaatgtaaggcccacgctctgcggcacaggttcggctgcataagccggaagtgcccggccatcagggaaatggtgtcccagttgcagcgggaatgctacctcaagcacgacctgtgcgcggctgcccaggagaacacccgggtgatagtggagatgatccatttcaaggacttgctgctgcacgaaccctacgtggacctcgtgaacttgctgctgacctgtggggaggaggtgaaggaggccatcacccacagcgtgcaggttcagtgtgagcagaactggggaagcctgtgctccatcttgagcttctgcacctcggccatccagaagcctcccacggcgccccccgagcgccagccccaggtggacagaaccaagctctccagggcccaccacggggaagcaggacatcacctcccagagcccagcagtagggagactggccgaggtgccaagggtgagcgaggtagcaagagccacccaaacgcccatgcccgaggcagagtcgggggccttggggctcagggaccttccggaagcagcgagtgggaagacgaacagtctgagtattctgatatccggaggtgaaatgaaaggcctggccacgaaatctttcctccacgccgtccattttcttatctatggacattccaaaacatttaccattagagaggggggatgtcacacgcaggattctgtggggactgtggacttcatcgaggtgtgtgttcgcggaacggacaggtgagatggagacccctggggccgtggggtctcaggggtgcctggtgaattctgcacttacacgtactcaagggagcgcgcccgcgttatcctcgtacctttgtcttctttccatctgtggagtcagtgggtgtcggccgctctgttgtgggggaggtgaaccagggaggggcagggcaaggcagggcccccagagctgggccacacagtgggtgctgggcctcgccccgaagcttctggtgcagcagcctctggtgctgtctccgcggaagtcagggcggctggattccaggacaggagtgaatgtaaaaataaatatcgcttagaatgcaggagaagggtggagaggaggcaggggccgagggggtgcttggtgccaaactgaaattcagtttcttgtgtggggccttgcggttcagagctcttggcgagggtggagggaggagtgtcatttctatgtgtaatttctgagccattgtactgtctgggctgggggggacactgtccaagggagtggcccctatgagtttatattttaaccactgcttcaaatctcgatttcactttttttatttatccagttatatctacatatctgtcatctaaataaatggctttcaaacaaaaaaaaaaaaaaaaaa

SEQ ID NO: 25202 - DNA, 1984 bp, Homo Sapiens
gtcccggcggcggctggaggaggaagccaggcggctggcggaggaggagagacggaggaggccgagaccggagcgccgctcgccgcagacttacttccccggctcagcagggaaaggttcctagaaggtgagcgcggacggtatgcaaagttgtgaatccagtggtgacagtgcggatgaccctctcagtcgcggcctacggagaaggggacagcctcgtgtggtggtgatcggcgccggcttggctggcctggctgcagccaaagcacttcttgagcagggtttcacggatgtcactgtgcttgaggcttccagccacatcggaggccgtgtgcagagtgtgaaacttggacacgccacctttgagctgggagccacctggatccatggctcccatgggaaccctatctatcatctagcagaagccaacggcctcctggaagagacaaccgatggggaacgcagcgtgggccgcatcagcctctattccaagaatggcgtggcctgctaccttaccaaccacggccgcaggatccccaaggacgtggttgaggaattcagcgatttatacaacgaggtctataacttgacccaggagttcttccggcacgataaaccagtcaatgctgaaagtcaaaatagcgtgggggtgttcacccgagaggaggtgcgtaaccgcatcaggaatgaccctgacgacccagaggctaccaagcgcctgaagctcgccatgatccagcagtacctgaaggtggagagctgtgagagcagctcacacagcatggacgaggtgtccctgagcgccttcggggagtggaccgagatccccggcgctcaccacatcatcccctcgggcttcatgcgggttgtggagctgctggcggagggcatccctgcccacgtcatccagctagggaaacctgtccgctgcattcactgggaccaggcctcagcccgccccagaggccctgagattgagccccggggtgtgctaaagaggcagtacaccagtttcttccggccaggcctgcccacagagaaggtggctgccatccaccgcctgggcattggcaccaccgacaagatctttctggaattcgaggagcccttctggggccctgagtgcaacagcctacagtttgtgtgggaggacgaagcggagagccacaccctcacctacccacctgagctctggtaccgcaagatctgcggctttgatgtcctctacccgcctgagcgctacggccatgtgctgagcggctggatctgcggggaggaggccctcgtcatggagaagtgtgatgacgaggcagtggccgagatctgcacggagatgctgcgtcagttcacagggaaccccaacattccaaaacctcggcgaatcttgcgctcggcctggggcagcaacccttacttccgcggctcctattcatacacgcaggtgggctccagcggggcggatgtggagaagctggccaagcccctgccgtacacggagagctcaaagacagcgcccatgcaggtgctgttttccggtgaggccacccaccgcaagtactattccaccacccacggtgctctgctgtccggccagcgtgaggctgcccgcctcattgagatgtaccgagacctcttccagcaggggacctgagggctgtcctcgctgctgagaagagccactaactcgtgacctccagcctgccccttgctgccgtgtgctcctgccttcctgatcctctgtagaaaggatttttatcttctgtagagctagccgccctgactgccttcagacctggccctgtagcttttctttttctccaggctgggccgtgagcaggtgggccgttgagttacctctgtgctggatcccgtgcccccacttgcctaccctctgtcctgccttgttattgtaagtgccttcaatactttgcattttgggataataaaaaaggctccctcccctgcaaaaaaaaaaaaaaaaaaa

SEQ ID NO: 25203 - DNA, 1909 bp, Homo Sapiens
aggcgctgagccgggccgcgcctgggcgaacggccggagcgggctgggctgggcccgggatggcggtggccctggcgccggtcccggtggcgccccgcgcgagttcctgagctggtgccaggcaggtgacacctcctgcagcccccagcatgcgggcaggcccaggccccaccgttacattggccctggtgctggcggtggcatgggccatggagctcaagcccacagcaccacccatcttcactggccggccctttgtggtagcgtgggacgtgcccacacaggactgtggcccacgcctcaaggtgccactggacctgaatgcctttgatgtgcaggcctcacctaatgagggttttgtgaaccagaatattaccatcttctaccgcgaccgtctaggcctgtatccacgcttcgattctgccggaaggtctgtgcatggtggtgtgccacagaatgtcagcctttgggcacaccggaagatgctgcagaaacgtgtggagcactacattcggacacaggagtctgcggggctggcggtcatcgactgggaggactggcgacctgtgtgggtgcgcaactggcaggacaaagatgtgtatcgccggttatcacgccagctagtggccagtcgtcaccctgactggcctccagaccgcatagtcaaacaggcacaatatgagtttgagttcgcagcacagcagttcatgctggagacactgcgttatgtcaaggcagtgcggccccggcacctctggggcttctacctctttcctgactgctacaatcatgattatgtgcagaactgggagagctacacaggccgctgccctgatgttgaggtggcccgcaatgaccagctggcctggctgtgggctgagagcacggccctcttcccgtctgtctacctggacgagacacttgcttcctcccgccatggccgcaactttgtgagcttccgtgttcaggaggcccttcgtgtggctcgcacccaccatgccaaccatgcactcccagtctacgtcttcacacgacccacctacagccgcaggctcacggggcttagtgagatggacctcatctctaccattggcgagagtgcggccctgggcgcagctggtgtcatcctctggggtgacgcggggtacaccacaagcacggagacctgccagtacctcaaagattacctgacacggctgctggtcccctacgtggtcaatgtgtcctgggccacccaatattgcagccgggcccagtgccatggccatgggcgctgtgtgcgccgcaaccccagtgccagtaccttcctgcatctcagcaccaacagtttccgcctagtgcctggccatgcacctggtgaaccccagctgcgacctgtgggggagctcagttgggccgacattgaccacctgcagacacacttccgctgccagtgctacttgggctggagtggtgagcaatgccagtgggaccataggcaggcagctggaggtgccagcgaggcctgggctgggtcccacctcaccagtctgctggctctggcagccctggcctttacctggaccttgtaggggtctcctgcctagctgcctagcaagctggcctctaccacaagggctctcttaggcatgtaggaccctgcagggggtggacaaactggagtctggagtgggcagagcccccaggaagcccaggagggcatccataccagctcgcacccccctgttctaagggggaggggaagtccctgggaggccccttctctccctgccagaggggaaggagggtacagctgggctggggaggacctgaccctactcccttgccctagatagtttattattattattattttggggtctcttttgtaaattaaacataaaacaattgcaaaaaaaaaaaaaaaaaa

SEQ ID NO: 25204 - DNA, 2290 bp, Homo Sapiens
cggcggcggcggcggccgaggctgaaggaagatggcggacggcgtggaccacatagacatttacgcggatgtcggcgaagagttcaaccaggaagctgaatatggtgggcatgatcagatagatttgtatgacgatgtcatatctccatctgcaaataatggagatgccccagaagaccgagattacatggatactctcccaccaactgttggtgatgatgtgggtaaaggagcagcaccaaatgttgtctatacatatactggaaagagaattgcattatatattggaaatctaacatggtggacaacagatgaagacttaactgaagcagttcattctttgggagtaaatgatattttggagataaaattttttgaaaatcgggcaaatggccagtcaaaggggtttgcccttgttggtgttggatctgaagcatcttcaaaaaagttaatggatctgttacctaaaagagaacttcatggtcagaatcctgttgtaactccatgcaataaacagttcctgagtcaatttgaaatgcagtccaggaaaactacacaatcaggacaaatgtctggggaaggtaaagctggtcctccaggaggcagttcccgtgcagcatttccacaaggtggtagaggacggggccgttttccaggggctgttcctggtggggacagatttcctgggccagcaggaccaggagggccacccccaccttttccaggaaatttgatcaagcatcttgttaaaggaactcggcctttgttcctggaaactaggattccatggcatatggggcacagcatagaggaaatacccatttttggcctaaaagctggacagactccaccacgtccacccttaggtcctccaggcccacctggtccaccaggtcctccacctcctggtcaggttctgcctcctcctctagctgggcctcctaatcgaggagatcgccctccaccaccagttctttttcctggacaaccttttgggcagcctccattgggtccacttcctcctggccctccacctccagttccaggctacggcccccctcctggcccaccacctccacaacagggaccacctccacctccaggcccctttccacctcgtccacccggtccacttgggccaccccttacactagctcctcctccgcatcttcctggaccacctccaggtgccccaccgccagctccgcatgtgaacccagctttctttcctccaccaactaacagtggcatgcctacatcagatagccgaggtccaccaccaacagatccatatgggcgacctccaccatatgataggggtgactatggcccccctggaagggaaatggatactgcaagaacgccattgagtgaagctgaatttgaagaaatcatgaatagaaatagggcaatctcaagcagtgctatttcgagagctgtgtctgatgccagtgctggtgattatgggagtgctattgagacactggtaactgcaatttctttaattaaacaatccaaagtatctgctgatgatcgttgcaaagttcttattagttctttgcaagattgccttcatggaattgagtccaagtcttatggttctggatcaagacgtgaacgatcaagagagagggaccatagtagatcacgagaaaagagtcgacgtcataaatcccgtagtagagaccgtcatgacgattattacagagagagaagcagagaacgagagaggcaccgggatcgtgaccgagaccgtgaccgagagcgtgaccgagagcgcgaatatcgtcatcgttagaagctgaaggaagaggatcaccttccaagacaaaacagtcttcatgggggaaaaatgacgcttgtccagcagtttgcttcttgtgattgaactgaacctgtaaggattcatggataaaatgaacaggaatagatctgaataaagcaaatctgcataaatggtaaccagtagctctacttttattttttatgttgcttaactgttttatttgaaggaaacctgtgtgatttaaaaagttatagcttttgcaactttattactggttatatacatttggccattatgatgtgcaagcaattggaaaaaaagtcaagtaaatgcttgtttttgtagtagtttgttcttgttaaaaatgtttatatgataatgtctgtaaacagcatcactttgattacaatagatgtagtgttgtaataaactgtttaatggggaaaaaaaaaaaaaaaaaaaaaaaaaaaaaaaaaaaaaaaaaaaaaaaaaaaaaaaaaaaaa

SEQ ID NO: 25205 - DNA, 2001 bp, Homo Sapiens
agatggcgatggagatgaggcttccagtggctcgcaagcctcttagcgagagactgggccgcgacactaagaaacatctagtggtgccgggggatacaatcactacggacacaggattcatgcggggccatggaacgtatatgggagaagagaagctcattgcatctgttgctggctctgtggagagagtaaacaagttgatctgtgtgaaagctttgaaaaccagatacattggtgaagtaggagacatcgtagtgggacgaatcacagaggttcaacagaagaggtggaaggtggagaccaactccaggctggattcggtcttgctgctctcgtccatgaaccttcctggaggagagctgaggagaagatctgcagaagatgagcttgcaatgagaggtttcttacaggaaggggaccttatcagtgctgaggtccaggcagtgttctctgacggagctgtctctttgcacacgaggagcctgaaatatggaaaactaggtcagggggttttggtccaggtttccccctccctggtgaaacggcagaagacccactttcatgatttgccatgtggtgcctcagtgattctcggtaacaacggcttcatctggatttacccaacacctgagcacaaagaagaggaagcagggggcttcattgcaaacctggagcctgtctctcttgctgatcgagaggtgatatcccggcttcggaactgcatcatctcgctggtaactcagaggatgatgctgtatgataccagcatcctgtactgctatgaagcatcccttccacatcagatcaaagacatcttaaagccagaaataatggaggagattgtgatggaaacacgccagaggcttttggaacaggagggataaggaggtgctccagaagcacgggactgtggaccttgcaggagtgaagactgtgatgtgtggtccccatatgtggctcagcaaagactcgagagatcatccctttgtctgcattgacggccctgtgacggcctccagcccacaggcctgctttctcctgtcctaacaccaagcctgggtggcagatgaacagtgcttccttgggttgccagctgagtcccggtattagggaatagtttcagctctttcaaagtgcacagtgttacagtcgaatgggctcccatcctggaataatatggagaatcctttgtcttccactcactgtcattcacaaggcacagtgccccatgaaattgccccaatagaaaacatggcatccctgacctccaaatggtctgttttggcctccattcctatatcctttaaatgactgagaatgcagctggtaaagttggaagaataaagttaaccaagcaggccaggcacggtggctcacgcctataatcccagcacttagggaggccaaggcgggcagatcacctgaggtcaatagttcgagaccagcctggccaacaaggtgaaaccccatctctactaaaaatacaaaaaattagccaggtgtggtggtgtgcacctgtagtcccagctatttgggaggctgaggtgggagaatcacttgaacctgggaggcggaggttgcagtgagctgaaatcgcgtaccacactccagcctgggtgacagagcgagactgtgtttcaaagaaaaaaaaaaacaagcagccttttgcttggttggaatctgattttctgttgcgtgttccttgtagccatagatgtgattatgtccacaccgggctgccttaatctgtcctgcttggagagtgacttgtaagatgctgaattattcatgataatacagtgaatgttctgggtccatgtactcagataaacatgaagaaaataagcaaagaaaaatggagactgggaaagcaaagctgttttcatcctataattgaagtagtgtggagcattaacttgtggatgattcagagttaaaagataaaaagacgccagagttctcgctgaagaatgtgagaaaaaaaaaaaaaaaaaaaaaaaa

SEQ ID NO: 25206 - DNA, 1290 bp, Homo Sapiens
gcggcggcggcggtagaggcggcggcggcggcggcagcgggctcggaggcagcggttgggctcgcggcgagcggacggggtcgagtcagtgcgttcgcgcgagttggaatcgaagcctcttaaaatggcagatgacttggacttcgagacaggagatgcaggggcctcagccaccttcccaatgcagtgctcagcattacgtaagaatggctttgtggtgctcaaaggccggccatgtaagatcgtcgagatgtctacttcgaagactggcaagcacggccacgccaaggtccatctggttggtattgacatctttactgggaagaaatatgaagatatctgcccgtcaactcataatatggatgtccccaacatcaaaaggaatgacttccagctgattggcatccaggatgggtacctatcactgctccaggacagcggggaggtacgagaggaccttcgtctccctgagggagaccttggcaaggagattgagcagaagtacgactgtggagaagagatcctgatcacggtgctgtctgccatgacagaggaggcagctgttgcaatcaaggccatggcaaaataactggctcccaggatggcggtggtggcagcagtgatcctctgaacctgcagaggccccctccccgagcctggcctggctctggcccggtcctaagctggactcctcctacacaatttatttgacgttttattttggttttccccaccccctcaatctgtcggggagcccctgcccttcacctagctcccttggccaggagcgagcgaagctgtggccttggtgaagctgccctcctcttctcccctcacactacagccctggtgggggagaagggggtgggtgctgcttgtggtttagtcttttttttttttttttttttttttttaaattcaatctggaatcagaaagcggtggattctggcaaatggtccttgtgccctccccactcatccctggtctggtcccctgttgcccatagccctttaccctgagcaccaccccaacagactggggaccagccccctcgcctgcctgtgtctctccccaaacccctttagatggggagggaagaggaggagaggggaggggacctgccccctcctcaggcatctgggagggccctgcccccatgggctttacccttccctgcgggctctctccccgacacatttgttaaaatcaaacctgaataaaactacaagtttaatatgaaaaaaaaaaaaaaaaaaaaaaaaaaaaaaaaaaaaaaaaaaaaaaaaaaa

SEQ ID NO: 25207 - DNA, 1474 bp, Homo Sapiens
aagcggcggcaggccggcggttggtgtgtcccgggtgtggggaggcgacagagccctggcacttgagggttgagggggcctccccagcgcggcgaaccgtctagcctccggaggccaggccgtgagtgcgggaggtatacgccaaggcggaagaattttgccactcactacctgtgtgacctcgggtaaattagccttggaacgtcagtttcttcgtctctataattgaaataataatagtacctctctcaggattgttgtgagccgtcagtgaaacacttagagcagtttctggcacatggtagaattgggctatttgctgaagcttcttggtggcccttgctagcccaggaagaaacttacattttgatttttttgtaccatggctttggttcacaaattgctgcgtggtacttattttctcagaaaattctctaagccaacttctgccttgtatccatttttgggtattcgctttgcagagtattccagtagtcttcagaaaccagtggcttctcctggcaaagcctcctcacagaggaagactgaaggggatttgcaaggagatcaccagaaagaagttgctttggatataacttcttctgaggagaagcctgatgttagtttcgataaagcaattagagatgaagcaatataccattttaggcttttgaaggatgaaattgtggatcattggagaggaccggaaggccaccctctgcatgaggtcttgctggaacaagccaaggttgtctggcaattccgggggaaagaagatttggataagtggacagtgacttctgataagacgattggaggcagaagtgaagtgtttttgaaaatgggcaagaataaccaaagtgcactgctatatggaactctgagctctgaggcgcctcaggacggggagtctacccgaagtgggtactgtgcaatgatatccaggattccaaggggtgcttttgagaggaagatgtcttacgattggtcccagttcaatactctgtatctccgtgtacgtggggatggtcggccttggatggtgaatatcaaggaggacacagatttcttccagaggacgaatcagatgtatagttacttcatgttcacccgcgggggaccctactggcaggaggtcaagattcctttttccaaatttttcttctctaatcgaggaagaatccgggatgttcagcatgagcttccgcttgataagatctcttctataggattcaccttggctgataaagtggatggtccattcttcctggagatagattttattggcgtgtttactgatccagctcatacagaagaatttgcctatgaaaattctccagagcttaacccaaggctttttaaataaagatcatatggtagttttgttttactaatctaagggtactagcatctacaatgatatagacaaaataaaatatttctttaatggcatccaaaaaaaaaaaaaaaaaaa

SEQ ID NO: 25208 - DNA, 1247 bp, Homo Sapiens
gtcgggctttacggcgccggatggctctggacgtgaagtctcgggcaaagcgttatgagaagctggacttccttggggagggacagtttgccaccgtttacaaggccagagataagaacaccaaccaaattgtcgccattaagaaaatcaaacttggacatagatcagaagctaaagatggtataaatagaaccgccttaagagagataaaattattacaggagctaagtcatccaaatataattggtctccttgatgcttttggacataaatctaatattagccttgtctttgattttatggaaactgatctagaggttataataaaggataatagtcttgtgctgacaccatcacacatcaaagcctacatgttgatgactcttcaaggattagaatatttacatcaacattggatcctacatagggatctgaaaccaaacaacttgttgctagatgaaaatggagttctaaaactggcagattttggcctggccaaatcttttgggagccccaatagagcttatacacatcaggttgtaaccaggtggtatcgggcccccgagttactatttggagctaggatgtatggtgtaggtgtggacatgtgggctgttggctgtatattagcagagttacttctaagggttccttttttgccaggagattcagaccttgatcagctaacaagaatatttgaaactttgggcacaccaactgaggaacagtggccggacatgtgtagtcttccagattatgtgacatttaagagtttccctggaatacctttgcatcacatcttcagtgcagcaggagacgacttactagatctcatacaaggcttattcttatttaatccatgtgctcgaattacggccacacaggcactgaaaatgaagtatttcagtaatcggccagggccaacacctggatgtcagctgccaagaccaaactgtccagtggaaaccttaaaggagcaatcaaatccagctttggcaataaaaaggaaaagaacagaggccttagaacaaggaggattgcccaagaaactaattttttaaagagaacactggacaacattttactactgagggaaatagccaaaaaggcaaataatggaaaaatagtaaacattaagtaaatgctgtagaagtgagtttgtaaatattctacacatgtaaaatatgtaaaactatgggttatttttattaaatgtattttaaaataaaaaaaaaaaaaaaaaaaaa

SEQ ID NO: 25209 - DNA, 1240 bp, Homo Sapiens
gtgttcatgggcctcattaagctctgccttccttctgctttttggagcctggcctttggttggccttgaatgaagagtggggccccaaaagtaccactgtcagcactctccagcatcatctggctgtctggcaccatcaaagaattgcatttctgacccaagaagagcttatgggtggatgggggtgggatggaagctggggagaggattgatgccagccagctgcctcacagggtgctggaaacacgtggccatgccattagcatcctgttcggcttctggacgagtttcatctgtgacacctacatagtcctcgcttggatcagcaagataaaaggcagccctgatgttagtgcctcctctgatgagccatacgccagaatccagcagagcagaaggcaatgccacgcagaagaggaccaaagtcaggtgccagaagcaggctgacctggaaaggtggaggaaaagaaggcagaagggagagatgaagcccaagaacctgagtatttttctcaggcaagactcaggactgctctggacattcagaagctgagtgtgcaagtgtgctgtgtagttcaaggccaccaccactgaagaggccaaggacaccttagtaggaattctaacctggcttccagggagaggtgcttccaaattggccctgtaggcaaattcacttttttcaccctctaagcgagtaagtgcttgttcccaatttccatggtttagtcttcagtttcagtctttggtctcctctggtctatcagctcccatctctctcccagtctttttctttattctgtgacacctgttgaatgaggcacatagggtttgtagtcactgtagtgttccttgtggttgtgaggtaataggctaatattatcactttctcagaaagtcttcaaaattatcatgaggaggtgatgcattcatctgctgggaggtgtctgtgtggtcagataagatgatggctacattccattcctatcctgtcattcaatcattcttcctccagggagccactgagggacgtgatagtccaaagcactcagctaaaacggaattgcaaacatggtacccacaactttggtttcttatcatccatttgtatatctgcatgtagtctgtctctgatttagggtttaggttcctctgtatttttttttcttttcctgccctttgagagtttaataaaagccagaagcatcttgtaataaaaaaaaaaaaaaaaaaaaaaaaa

SEQ ID NO: 25210 - DNA, 1310 bp, Homo Sapiens
agcaccggctcatgtgaggctcgcggcacagcgttctctgggctccccagaagccagcctttcgctcccggacccggcagcccgagcaggagccgtgggaccgggcgccagcaccctctgcggcgtgtcatgggcccgcgccgccggagccgaaagcccgaggccccgaggaggcgcagcccgagcccgaccccgacccccggcccctcccggcggggcccctccttaggcgcttcctcccatcaacacagtcggcggagacaaggttggctaaaggagatccgaaagcttcagaagagcacacacctcttgataaggaagctgcccttcagccgcctggcagcagaagcatttctagttcatctctttgaggacgcctatctcctcaccttacatgcaggccgagttactctcttcccaaaggatgtgcaactggcccggaggatccggggccttgaggagggactcggctgagctcctgcacccagtgtttctgtcagtctttcctgctcagccaggggggatgataccggggactctccagagccatgactagatccaatggattctgcgatgctgtctggactttgctgtctctgaacagtatgtgtgtgttgctttaaatatttttcttttttttgagaaggagaagactgcatgactttcctctgtaacagaggtaatatatgagacaatcaacaccgttccaaaggcctgaaaataattttcagataaagagactccaaggttgactttagtttgtgagttactcatgtgactatttgaggattttgaaaacatcagatttgctgtggtatgggagaaaaggttatgtacttattattttagctctttctgtaatatttacattttttaccatatgtacatttgtacttttattttacacataagggaaaaaataagaccactttgagcagttgcctggaaggctgggcatttccatcatatagacctctgcccttcagagtagcctcaccattagtggcagcatcatgtaactgagtggactgtgcttgtcaacggatgtgtagcttttcagaaacttaattggggatgaatagaaaacctgtaagctttgatgttctggttacttctagtaaattcctgtcaaaatcaattcagaaattctaacttggagaatttaacattttactcttgtaaatcatagaagatgtatcataacagttcagaattttaaagtacattttcgatgcttttatgggtatttttgtagtttctttgtagagagataataaaaatcaaaatatttaatgaaaaaaaaaaaaaaa

SEQ ID NO: 25211 - DNA, 1416 bp, Homo Sapiens
gggagactaacactgtgactctgggattggcaggtgcaacttggagccacttaatttcctggggacgtaagttcttcccaagcttagagcaagctgccctgccaaaggagaccaaaccatgccaaccacgctggcaactgctgctgtccagtccctgtgttttctgaccaccgtcactgtgcaactcatcgcctctgccacttaggaccaggaaagaggctggttttgctcccactcttagttgctgataaagtggggagaaggaaaatggacactctacagagtttggggaagggagagtagggagcccatcttgtccagaaagattcatctgtggtctgtctgttaaacacagctgatttcagtgggctttcccctggccctgggggagcagacactgactgggttgtgggcagaggagccatcctggcggagccctgctgcaggggagctccttcaggagccccatccggacctcttgcactgggctgcctttgcctccatttgccttcctgtatctgcaacaaaccttttaaaagtgttcactcttgctttttccagtatttcggtaatcagccatcttgctgtagtacaggatgacattgtcgaatgctctttgtatgtgtgcacacccccttactcccttactgcttcatacactccacaagtggtacagtattttgtgtcattgtaaaaatcaaaattggctttggatctttgtaatacacctgtacctgaaaaagtaaacaacattcttcaattactagccttcagcttgaaaagacatgctggagaagaaggaagggggaacccataggtgtggcgtggagccaagatgtactattcaactatgtgtttctgtttataaaaaacacataccatggaaccatggtgcttttgttcttagtttttgccgttagatcccttcaaactggaagttccttacaatatctttctcaggaaatattttgggaaatggggtaagagatggcaagtgtgagacgggctgtgtcagaggttgctacgtcatggatacagtgcagttccaagtgccataagtgtatgtacatatagttaataatgacactgttcatcaccattctaaaatactgttcttccaaccctatcttcaatgaccagtccagaaggggttaagctggattcatttgctctggcatgtgcattcccagcagggtgaagaaaggtttaaattaaagaatttattttctctctcccccttcctctttctcccagtctttgcataggagaatgttagacattcagaaattactgtttctgttttaaattgagtattgatttttttatattgactttgtattgagttctttttgaaagaataacaaaataaaatgcaggatctttgtaaagcctttaaaaaaaaaaaaaaaaaaaaaa

SEQ ID NO: 25212 - DNA, 968 bp, Homo Sapiens
agctgcagtggcggggagtggggtgcggatcttgtgtttgcgcacgcagtcgccggccacctcaggccggagctagagatacggctcgggataggagggcccggcggctctgaggcaggttcgcctcgagccgcacggcccggagcagcggctccgcggtggtccccggggcttgagaggggtgcgggcctgggagcccctgagggcctgatttacggaactccccctccttcctcctttctgccgttccctgctctgtggcggatgcgcagggatcagtagggacggcagcagtagggccactcgggcctgccccgcttcccgcattgcccggtttggcgcgccgcctccgggccttggcaaagccccagcgcccgattgtcactgaccagtgcttggaagtcctttaccgactgcccgtcagcgtcccgcggagaggattttgcgtctccaaagacgcccctcttccgaaaacaggctcctctgtgttctcagtcgggtatatttttctgtctccaaactagattggcagccgttttttgagagcagggtcttgctctgttgcccagactggagtgcagtggcgccatctcagctgactgcagattcaaccttctgagctcacgaaatcctcccatctcaacctcctgagtagctgggaccacaggctgagcacagggttgctccaggtgggcccaaatgctgaagagcctcatgttagagtttttcacctctgcgatggaactgtggtggactccagtatcatcattccagggaggcatagccgcaccaactgtgttcccaggtttcacatggagaagggttttagaaagtgcagatagccttgaaaccactggtttcctaccactgtttatttcagcataactttttttgtgtggaatgctagctctggaagagcagaaataaatacagcttaagctttgaaccataaaaaaaaaaaaaaaaaa

SEQ ID NO: 25213 - DNA, 2058 bp, Homo Sapiens
cacagccggccgacaccacaccagccggggagccgccgccgccgccgccacctctgagcagccggctgggagcgagagccgacagctagtctgcaagccaccgctgtcgccatggggagccgcgtctcgcgggaagacttcgagtgggtctacaccgaccagccgcacgccgaccggcgccgggagatcctggcaaagtatccagagataaagtccttgatgaaacctgatcccaatttgatatggattataattatgatggttctcacccagttgggtgcattttacatagtaaaagacttggactggaaatgggtcatatttggggcctatgcgtttggcagttgcattaaccactcaatgactctggctattcatgagattgcccacaatgctgcctttggcaactgcaaagcaatgtggaatcgctggtttggaatgtttgctaatcttcctattgggattccatattcaatttcctttaagaggtatcacatggatcatcatcggtaccttggagctgatggcgtcgatgtagatattcctaccgattttgagggctggttcttctgtaccgctttcagaaagtttatatgggttattcttcagcctctcttttatgcctttcgacctctgttcatcaaccccaaaccaattacgtatctggaagttatcaataccgtggcacaggtcacttttgacattttaatttattactttttgggaattaaatccttagtctacatgttggcagcatctttacttggcctgggtttgcacccaatttctggacattttatagctgagcattacatgttcttaaagggtcatgaaacttactcatattatgggcctctgaatttacttaccttcaatgtgggttatcataatgaacatcatgatttccccaacattcctggaaaaagtcttccactggtgaggaaaatagcagctgaatactatgacaacctccctcactacaattcctggataaaagtactgtatgattttgtgatggatgatacaataagtccctactcaagaatgaagaggcaccaaaaaggagagatggtgctggagtaaatatcattagtgccaaagggattcttctccaaaactttagatgataaaatggaatttttgcattattaaacttgagaccagtgatgctcagaagctcccctggcacaatttcagagtaagagctcggtgataccaagaagtgaatctggcttttaaacagtcagcctgactctgtactgctcagtttcactcacaggaaacttgtgacttgtgtattatcgtcattgaggatgtttcactcatgtctgtcattttataagcatatcatttaaaaagcttctaaaaagctatttcgccaggcacggtggctcatgcctataatcccagcactttgggaggccaaggtgggtggatcacctgaggtcaggagttcgagaccagcctggccaacacggtgaaaccccatctctactaaaaatgcaaaaattagccgggcgtggcggcacatgcctgtaatcccagctacatgggaggctgaggtgggagaattgcttgaacccaggaggcggaggcagaggctgcagtgacccaagattgtgccactgcactccaccctgggcaacagagcaagaccccatctcaaaaataaataaatatatataaaaaataaaaagctatttctagtttatttcactataaagttttgctttattaaaaagctaataaacagctattaatcacagtgtattagtatttgttacatttttgtatttcactatctttatactatataatatggttacttgggtaccgggggaactttaaaatttcatctcaaaaataatttttaaaaagcctgaggtatgatatagcataaaagattgagatgaaaatatatttccctgtaagctgaattactcatttaaaaattttaacttctatatgggacccgaattagacactgctgaatcctgtacagccttactcataaataaagtacttactgaatttccaccattcaaaaaaaaaaaaaaa

SEQ ID NO: 25214 - DNA, 2158 bp, Homo Sapiens
ggccgcggtgctctacctgcgtgtcgctccgccccagggagagccggcgctaccatggaggagtaccatcgccactgcgacgaggttggcttcaatgctgaggaagcccacaatattgtcaaagagtgtgtagatggggttttaggtggtgaagattataatcacaacaacatcaaccagtggactgcaagcatagtggaacaatccttaacacacctggttaagttgggaaaagcctataaatatattgtgacctgtgcagtggtccagaagagcgcatatggctttcacacagccagctcctgtttttgggataccacatctgatggaacctgtaccgtaagatgggagaaccggaccatgaactgtattgtcaacgtttttgccattgctattgttctttaactgactaaaaatgttgggctaaagccattaacttaagaatttgtcagtgtatcctttccaaaaagagtaatagttgtttactagtgtgctagatgaaaagcgtgcaatatgctttaaagctatcaacaaaaactgaatattataagcaagcaatatcatagtaattggcagattagctcatattctatacagcatcgtttaaataggaaaaatttaatgctagcaaaaaataaatttagaaatatggcatgacatgaaaatacaatcttatatttacaccagcttttcactaatattttgtacctaaggtgatggggaactccattcagataataaaattctctttcagctagagaagttaacaggaataaatatatgaacaaaaaagctgcaaggataaatgtggagaaaatgatgagaattagctaacatttttaagtttttttaaactttcttcccctcagttgtacttaatatttagtggaaagtaataatttttttaattttctatcaactaatagtatagtaacaactatgattaacttgtttactttttctgaggattagtaaatcaattttttttaatttcaaatttttggatttacacttgagggtaaattaaatctggtaaactgaatttcctagttaaataaaattagttgcagtatatgatgaacagtgtatgactcaaacagctgccttacaattcactcattccatgtggaacaaacatttatcagatgcctattatgggcatatgtctctgctaagcaccatagttgtcaatgtgctgtgcaaatgctaagttccttttagcaattgttcagttggaagacgtattaatatttggggaaggaaaagaaagtagttgttttacaagggaggaaaaaagtgaatctggttacacatatggaagtaagcaaaatgaaaagcacttattgctttctgacagaattatagatgtaattttaagagttgctcctagcaagttaaaagtgcatataaaatatgcaactcttagttaaaggccttattatcagtcttacctatacaagtagtaaattttgtcattgctttagttacaaccatctgtaaataacttaaaagacttattatgtggggttcaaattgagtggaataaagtatagattaaaagtatacaatccttagcacgttatctcagggcttatgaaatgtaattaaatttattaagaaaatagatgaaaaattagggtacacagctggccaccaaatgcgaagtcaatctgctacttaaccctgaaaacaaaatcagttttgcatattaccactaacactaatacatatagagagcggaaccataactcattgaattttggagaggaataagcttagcgttaatattgacaatattaaggcaatattcttgtaggaatactatgtgcatgtttgatattttgccaaataacaataattaataattgttcaatgtttaagaataatattaacaaaataaaggagtttaatgcagtgatctttgtttttggcacatcaaaaattctcagtcattattcatgtttctttatgctgctggcttttgtgccctggaagatcataatagtgaccaaaatatacatgcagacttgttttttattattgttgtttaagcataatttaagaaaaaaaatttttacctggtgaacttgctatctgctctgtttctagttaaaatataataaatattatcttcctgtgctgtaaaaaaaaaaaaaaa

SEQ ID NO: 25215 - DNA, 2886 bp, Homo Sapiens
agccagtggatgtggaaaagagaaagtgcctactaaaacagttggagagagcagaggttcgcctggaagggatagatacaattttaaaattgtatctggtgagcaagaatttcttacttccatctgtgccgtatgcgatgttttgtggatggcaaagacttattcctgagggaatcgatataggggaacctcttactgattgtttaaaggatgttgatttgatcccgccttttaatcggatgctgctggaagtcacctttggcaagctgtacgcttgggctgttcagaacattcgaaatgttttggtggatgccagtgccaaatttaaagagcttggtatccagccggttcccctgcaaaccatcaccaatgagaacccatcgggaccgagcttggggaccatcccgcaagcccacttcctcctggtgatgctcagcatgctcaccctgcagcacagcgcaaacaaccttgacctcctgctcaattccggcacgctggccctcgctcagacggcactgcgcctgattggccccagttgtgacagcgttgaggaagatatgaatgcttctgctcaaggtgcttctgccacagttttggaagaaacaaggaaggaaacggctcctgtgcagctccctgtttcagggccagaactggctgccatgatgaagattggaacaagggtcatgagaggtgtggactggaaatggggcgatcaggataggcctcctccaggcctaggccgagtgattggtgagctgggagaggacgggtggataagagtccagtgggacacaggcagcaccaactcctacaggatggggaaagaaggaaattacgacaagctggcagagctgccagcccctgcacagccctcagcagaggattcggacacagaggacgactctgaagccgaacaaactgaaaggaacattcaccccactgcaatgatgtttaccagcactattaacttactgcagactctttgtctgtctgctggagttcatgctgagatcatgcagagtgaagccaccaagactttatgcggactgctgcaaatgctggtgtacagggagcaacaccggagctggtgcacgctggggtttgtgcagagcatcgctctcacgctgcaggtgtgcggcaccctcagctccctgcagtggatcacgctgctcatgaaggtcgtggaagggcacgcacccttcactgccacctcgctgcagaggcagatcttagctgtgcatttgttgcaagcagtccttccgtcatgggacaagaccgaaagggcgagggacatgaaatgcctcatggagaagctgtttgacttcttggggagcttgctcactatgtgctcctctgacgtgccgttactcagagagtccacgctgaggcggcgcagggtgtgcccgcaggcctcgctgactgccacccacagcagcacactggcggaggaggtggtggcactgctgcacacgctgcactccctgactcagtggaatgggctcatcaacaagtacatcaactcccagctccgctccatcacccacagctttgcgggaaggccttccaaaggggcccagttagaggactacttccctgattccgagaaccctgaagtggggggcctcatggcggtcctggctgtggttggaggcatcgatggtcgcctgtgcctgggcggccaagttgtgcacgatgactttggagaagtcaccatgactcgcatcaccctgaagggcaaaatcaccgtgcagttctctgacatgcggacgtgtcacgtttgcccattgaatcagctgaaaccactccctgccgtggcctttaatgtgaacaacctgcccttcacagagcccatgctgtctgtctgggctcagttggtgaacctcgctggaagcaagttagaaaagcacaaaataaagaaatcgactaaacaggcctttgcaggacaagtggacctggacctgctgcggtgccagcagttgaagctatacatcctgaaagcaggtcgggcgctgttctcccaccaggataaactgcggcagatcctgtctcagccagctgttcaggagactggaactgttcacacagatgatggagcagtggtatcacctgaccttggggacatgtctcctgaagggccgcagccccccatgatcctcttgcagcagctgctggcctcggccacccagccgtctcctgtgaaggccatatttgataaacaggaacttgaggaaagaatgtccagatgttgtttttggagaagaagaactacaaagttagagcaaatactcttatttataagaagaatgaactcagtgtgtgagaaggagaatacaaatgcaacagcctcaaattagcagtggatgcctcctgggcttctgcaaccgctttccacgggttccaccagatggctagctggtaatgacccagacacctctgagtaaactcccagaaagcctgacaaatatgttgcaaacttagccatatgtagagtggctacaccacatttgcatcgctctcttaacagcatgaccttctttaatagtgatcacttccatttttaggccctttatgcattacttttgtcattttatattgcttctttttttctgatccttgcaaaaaccctgccaagaaagcaagaaaatatgtttccccctcaggacctggacaacatcagatagaatgtgtcacataaatatgtattcataatgaaagtttcataggtattaaaaatgaaagctcaaaatggctaggtgatattcctcaattcatatgaacatagatctcttaccttttttcttgatattatattgaatatgtaaagatatttgaaatagtttatatatgagtaattaaaccagctcatcttttaaaaaaaaaaaaaaa

SEQ ID NO: 25216 - DNA, 2042 bp, Homo Sapiens
ggcccggcgatgtcgctcgtgctgctaagcctggccgcgctgtgcaggagcgccgtaccccgagagccgaccgttcaatgtggctctgaaactgggccatctccagagtggatgctacaacatgatctaatcccgggagacttgagggacctccgagtagaacctgttacaactagtgttgcaacaggggactattcaattttgatgaatgtaagctgggtactccgggcagatgccagcatccgcttgttgaaggccaccaagatttgtgtgacgggcaaaagcaacttccagtcctacagctgtgtgaggtgcaattacacagaggccttccagactcagaccagaccctctggtggtaaatggacattttcctacatcggcttccctgtagagctgaacacagtctatttcattggggcccataatattcctaatgcaaatatgaatgaagatggcccttccatgtctgtgaatttcacctcaccaggctgcctagaccacataatgaaatataaaaaaaagtgtgtcaaggccggaagcctgtgggatccgaacatcactgcttgtaagaagaatgaggagacagtagaagtgaacttcacaaccactcccctgggaaacagatacatggctcttatccaacacagcactatcatcgggttttctcaggtgtttgagccacaccagaagaaacaaacgcgagcttcagtggtgattccagtgactggggatagtgaaggtgctacggtgcagctgactccatattttcctacttgtggcagcgactgcatccgacataaaggaacagttgtgctctgcccacaaacaggcgtccctttccctctggataacaacaaaagcaagccgggaggctggctgcctctcctcctgctgtctctgctggtggccacatgggtgctggtggcagggatctatctaatgtggaggcacgaaaggatcaagaagacttccttttctaccaccacactactgccccccattaaggttcttgtggtttacccatctgaaatatgtttccatcacacaatttgttacttcactgaatttcttcaaaaccattgcagaagtgaggtcatccttgaaaagtggcagaaaaagaaaatagcagagatgggtccagtgcagtggcttgccactcaaaagaaggcagcagacaaagtcgtcttccttctttccaatgacgtcaacagtgtgtgcgatggtacctgtggcaagagcgagggcagtcccagtgagaactctcaagacctcttcccccttgcctttaaccttttctgcagtgatctaagaagccagattcatctgcacaaatacgtggtggtctactttagagagattgatacaaaagacgattacaatgctctcagtgtctgccccaagtaccacctcatgaaggatgccactgctttctgtgcagaacttctccatgtcaagcagcaggtgtcagcaggaaaaagatcacaagcctgccacgatggctgctgctccttgtagcccacccatgagaagcaagagaccttaaaggcttcctatcccaccaattacagggaaaaaacgtgtgatgatcctgaagcttactatgcagcctacaaacagccttagtaattaaaacattttataccaataaaattttcaaatattgctaactaatgtagcattaactaacgattggaaactacatttacaacttcaaagctgttttatacatagaaatcaattacagttttaattgaaaactataaccattttgataatgcaacaataaagcatcttcagccaaacatctagtcttccatagaccatgcattgcagtgtacccagaactgtttagctaatattctatgtttaattaatgaatactaactctaagaacccctcactgattcactcaatagcatcttaagtgaaaaaccttctattacatgcaaaaaatcattgtttttaagataacaaaagtagggaataaacaagctgaacccacttttaaaaaaaaaaaaaaaaaaaaaaaaaaaaaaaaa

SEQ ID NO: 25217 - DNA, 1261 bp, Homo Sapiens
ccaactgctgccaactcgccaccactgctgccgacctcgcaaccactgctttgtctctgaagtgagactgctcctggtgccatgaacggagacgacacctttgcaaagagacccagggatgatgctaaagcatcagagaagagaagcaaggcctttgatgatattgccacatacttctctaagaaagagtggaaaaagatgaaatactcggagaaaatcagctatgtgtatatgaagagaaactataaggccatgactaaactaggtttcaaagtcaccctcccacctttcatgtgtaataaacaggccacagacttccaggggaatgattttgataatgaccataaccgcaggattcaggttgaacatcctcagatgactttcggcaggctccacagaatcatcccgaagatcatgcccaagaagccagcagaggacgaaaatgattcgaagggagtgtcagaagcatctggcccacaaaacgatgggaaacaactgcaccccccaggaaaagcaaatatttctgagaagattaataagagatctggacccaaaagggggaaacatgcctggacccacagactgcgtgagagaaagcagctggtgatttatgaagagatcagcgaccctgaggaagatgacgagtaactcccctgggggatacgacacatgcccttgatgagaagcagaacgtggtgacctttcacgaacatgggcatggctgcggctccctcgtcatcaggtgcatagcaagtgaaagcaagtgttcacaacggtgaaacttgagcgtcatttttcttagtgtgccaagagttcgatgttagtgtttccattgtattttcttacagtgtgccattctgttagatactatccttataattgatgagcaagacatactgaatgcatatttcggtttgtgtatccatgcacctacgtcagaaaacaagtattgtcaggtattctctccatagaacagcactatcctcatctctccccagatgtgactactgagggcagttctgagtgtttaatttcagactttttcctctgcatttacacacacacacacacacacacgcacacacacacaccaagtaccagtataagcatctcccatctgcttttcccattgccatgcgtcctggtcaagcccccctcactctgtttcctggtcagcatgtactcccctcatccgattcccctgtatcagtcactgacagttaataaacctttgcaaacgttcaaaaaaaaaaaaaaaaaa

SEQ ID NO: 25218 - DNA, 2593 bp, Homo Sapiens
ggacggcgggaagaggagtgcggaacccgcgggaggatgtgcacagagggcccaggaggagcctcaggagccggactgccgttggccaaccgagtccccagggagacacttaagggaaattaaactgcagagtgcaagagatgcctcagtcaagtcagccaaaaacacgcgggtcatccccaagccccagagagtgacagagccccgatgacacggacacctcggctgctgtcacttccctggttcgggcctcccacaggctttgaattgaaggcgagtgcctcagaatttgcatccattgttctgtctttcctgggaagttattcatcctggtggccagcccaccgacaaaatggatttggatctactggacctgaatcccagaattattgctgcaattaagaaagccaaactgaaatcggtaaaggaggttttacacttttctggaccagacttgaagagactgaccaacctctccagccccgaggtctggcacttgctgagaacggcctccttacacttgcggggaagcagcatccttacagcactgcagctgcaccagcagaaggagcggttccccacgcagcaccagcgcctgagcctgggctgcccggtgctggacgcgctgctccgcggtggcctgcccctggacggcatcactgagctggccggacgcagctcggcagggaagacccagctggcgctgcagctctgcctggctgtgcagttcccgcggcagcacggaggcctggaggctggagccgtctacatctgcacggaagacgccttcccgcacaagcgcctgcagcagctcatggcccagcagccgcggctgcgcactgacgttccaggagagctgcttcagaagctccgatttggcagccagatcttcatcgagcacgtggccgatgtggacaccttgttggagtgtgtgaataagaaggtccccgtactgctgtctcggggcatggctcgcctggtggtcatcgactcggtggcagccccattccgctgtgaatttgacagccaggcctccgcccccagggccaggcatctgcagtccctgggggccacgctgcgtgagctgagcagtgccttccagagccctgtgctgtgcatcaaccaggtgacagaggccatggaggagcagggcgcagcacacgggccgctggggttctgggacgaacgtgtttccccagcccttggcataacctgggctaaccagctcctggtgagactgctggctgaccggctccgcgaggaagaggctgccctcggctgcccagcccggaccctgcgggtgctctctgccccccacctgcccccctcctcctgttcctacacgatcagtgccgaaggggtgcgagggacacctgggacccagtcccactgacacggtggcggctgcacaacagccctgcctgagaagccccgacacacggggctcgggcctttaaaacgcgtctgcctgggccgtggcacagctgggagcctggttcagacacagctcttccagggcagcggctccactttctcatccgaagatggtggccacagactgacccccatctgagctggggggatgttctgcctctccctgggtctggggacaggcccgcttgctgggtacctggtccccactgctgagctggcccttggggagaggtgattctcagggctggagcctggggtgtcctacagtgactccctgggagccgcctgcttcttctctccacatggaagcccaactggggttgcgtctgaggcctgccccctgggctggggcctcagaccccctcagccttgggaccgtgcccacgagggtctcccctcctgcacacagggcagtccttactcccccaccactcaggccacagtggggctgcaggcaggcggctcctcctcacccacctctgggtccttggctcccgggggccccacctcggcacacactgtgccccacaaaacttcagtgtggtacaaggtggagaaagcatatcccaccaacctccagtgtcagggtccaggagagcctgggggtggggggactgccttgtctctagtagtgtggcctgtgccagcaccacagccggtcagaggagcgcaggcagcgcagggctggcacgtgacaggctcgtcagccacctgggaacacagttctgggcaaagaggatccgaggttgagaggaaggagggtcccggtgtatcctggccctgggggtctgggcgtccagctcagccctggcctggctgggtggtattctggtagggatatggcaggactcctggcagggccacctgcaggaccctgtcctgcagtcccacactgtgcagacccagtcccacactgtggccaggccttacatctggctggaaagcagagcctcctgggaacacatctggctgcacaggctgaaatatccacccagcaggcagagtggcgtggcctccccatgggcacagtggtgacccccttgattcccaccgtacaaccccctccaccccccactcagtgcctccacatgctgcctggcacagaccaggcctttgacaaataaatgttcaatggatgcaaaaaaaaaaaaaaaaaaaa

SEQ ID NO: 25219 - DNA, 2088 bp, Homo Sapiens
ggactgggccccggggcggtgcgctgggctgcacctccctccccgcgccccgtcctctcccgccctacaggccctagcagggcaggcgggagtccgtagttcgtggtccttcgccggtgtccccggagcccagcggctgtggatggcagaagcccagagtgggactggtcagctgcaggagcagaagaaaggtcttctgatagccgtcagcgtctccgttgataaaatcatctcgcatttcggggccgcccggaacttggtgcagaaggcccagttgggtgatagccggctgagcccggatgtggggcacctggtgctgaccaccctctgcccggccctccacgccctggtggcggacgggctgaagcctttccggaaggacctcatcaccgggcagcgcaggagcagcccctggagcgtggtggaggcgtcggtgaagccaggctccagcacccgctcccttggaaccctgtatagccaggtcagccgtctagccccgctgagcagcagccgtagccgcttccatgcctttatcctgggcctcctcaacaccaagcagttggagctgtggttttccagtctccaggaagatgcaggcctgctctccctcctgtacctgccaacaggatttttctccctggcccgcggtggttgtccctccctgtccacagagctgctgctcctgctgcagccattgtcggtgctcactttccacctggacctgctctttgagcaccaccaccacctgcccctgggcccacctcaggcccctgcccctccaggcccacctccagctctgcagcagactatgcaagccatgctgcactttgggggccggctggcccagagccttcgggggacttccaaggaagctgcttcagacccctctgactctccaaaccttcccacaccagggagctggtgggagcagttgacccaggcctcccgggtctatgcctctgggggcactgagggctttcctctttcccgatgggcaccggggcgtcatgggactgcagctgaagaaggtgcacaggagagacccctgcccacagatgagatggcaccaggcaggggcctctggttgggaagactatttggagtgcctgggggccccgcagaaaatgagaatggagccctaaagtccaggagaccatctagctggctgcccccgacagtgagtgtgttggctcttgtgaagcggggggcacctcccgagatgccttctcctcaggagcttgaggcctcagcacccaggatggtgcaaacccatagggcagtgcgggctctctgtgatcacactgctgcaagacctgaccagttgagcttccggcgtggggaagtgctgcgtgtcatcaccacagtggatgaggactggctccgctgtgggcgggatggcatggagggtctggtgcctgtggggtatacctcccttgttctgtagccctgggaccctttcctgcgtatgtgtctccttcctgtcacctgggaatggaatggccagtgaacaccatcccagaagcattttccctctgcaaaatgacgtttcttcccacgtctgtttctgctaatatttaaaataaactttccttcttccctcctatacccacctgtaaggtgaaatctgctcttcttccaaatatataaaaaaggaattgccctccaggtaatccctttcctttttcccgtctatataagggaatgtcttccttcctatctatctgcaaaatggaaatctagacctccttcttcatccataagtggactgtgccagtacaatacatgcctcagcccccaagcctagaaggacctctagtctccttcctgtgtggaatcttccccactccatccctcccaagttgcctgtattgataatgtactcactcatgctgtactaggtgctgaagcctggacacccttggtgggtgggcctgtggtgatggtttgcatccttcctcctttgtcccaataaagtatgggagttgaaaaaaaaaaaaaaaaaaaaaaaaaaaaaaaaaaaaaaaaaaaaaaaaaaaaaaaaaaaaaaaaaaaaaaaaaaaaaaaaaaaaaaaaaaaaaaaaaaaaaaa

SEQ ID NO: 25220 - DNA, 1880 bp, Homo Sapiens
gccagctcagctccggagagccggcggcgcggcgggcatggctcgggtggcgtgggggctgctgtggttgctgctgggcagcgccggggcgcagtacgagaagtacagcttccggggcttcccgcccgaggacctgatgccgctggccgcggcgtacgggcacgctctggagcagtacgagggagagagctggcgcgagagcgcgcgctacctggaggcggcgctgcggctgcaccggctcctgcgcgacagcgaggccttctgccacgccaactgcagcggccccgcgcccgcggccaagcccgatcccgacggcggccgcgcagacgagtgggcctgcgagctgcggctcttcggccgcgtcctggagcgagccgcctgcctgcggcgctgcaagcggacgctgcccgccttccaggtgccctacccgccgcggcagctgctgcgtgacttccagagccgcctgccctaccagtacctgcactacgcgctgttcaaggctaaccggctggagaaggcggtggcggcggcctacaccttcctccagaggaacccgaagcacgagctgaccgccaagtatctcaactactatcaggggatgctggacgtcgccgacgagtccctcacggacctagaggcccagccctacgaggccgtgttcctccgggctgtgaagctctacaacagcggggatttccgcagcagcacggaggacatggagcgggccttgtcagagtacctggcagtctttgcccggtgcctggccggctgtgaaggggcccatgagcaggtggacttcaaggacttctacccggccatagcagatctctttgcagagtccctgcagtgcaaggtggactgtgaggccaatttgacccccaatgtgggtggctacttcgtggacaagttcgtggccaccatgtaccactacctgcagtttgcctactataagttgaatgatgtgcgccaggctgcccgcagcgccgccagctacatgctcttcgaccccaaggacagcgtcatgcagcagaacctggtgtattaccggttccaccgggctcgctggggcctggaagaggaggacttccagccccgggaggaggccatgctctaccacaaccagaccgccgagctgcgggagctgctggagttcacccacatgtacctgcagtcagatgatgagatggagctggaggagacagaaccgcccctggagcctgaggatgccctatctgacgccgagtttgagggggagggtgactacgaggagggcatgtatgctgactggtggcaggagccggatgccaagggtgacgaggccgaggctgagccagagcctgaactcgcatgagaaggggacaccccacacccctcaagcttgggaagcctggtgccgatggccccaccctcaccagcctgggcagcagcaagaactatttattaaaaacttaagatgggccaggtgcggtggctcacacctgtaatcccagcattttgggaggccaaggtgggtggatcacttgaggccaggagttcaagaccagcctggccaacatgatgagacctccgtctctactaaaatacataaattagccgggtgtggtggcaggcgcctgaaatcccagctactcaagaggctgaggcaggagaatcgcttgaacctgggaggcaaaggttgcagtgaactgagattgcgccaccgcactccagcctgggcgacagagcgagactccatctttaaaaaaaaacaagacgggccggcacggtggctcacgcctgtaatcccagcactgagaggccgatcacttgaggtcaggagttcaagaccagcctggccaacatggtgaaaccccatctctactaaaaaaaaaaaaaaaaaa

SEQ ID NO: 25221 - DNA, 1460 bp, Homo Sapiens
gacgggtcaggagcgtagaggcggcggcaaaatggcggcgcctgaggagcgggatctaacccaggagcagacagagaagctgctgcagtttcaggatctcactggcatcgaatctatggatcagtgtcgccataccttggaacagcataactggaacatagaggctgctgtacaggacagattgaatgagcaagagggcgtacctagtgttttcaacccacctccatcacgacccctgcaggttaatacagctgaccacaggatctacagctatgttgtctcaagacctcaaccaagggggctgcttggatggggttattacttgataatgcttccattccggtttacctattacacgatacttgatatatttaggtttgctcttcgttttatacggcctgaccctcgcagccgggtcactgaccccgttggggacattgtttcatttatgcactcttttgaagagaaatatgggagggcacaccctgtcttctaccagggaacgtacagccaggcacttaacgatgccaaaagggagcttcgctttcttttggtttatcttcatggagatgatcaccaggactctgatgagttttgtcgcaacacactctgtgcacctgaagttatttcactaataaacactaggatgctcttctgggcatgctctacaaacaaacctgagggatacagggtctcacaggctttacgagagaacacctatccattcctggccatgattatgctgaaggatcgaaggatgactgtggtgggacggctagaaggcctcattcaacctgatgacctcattaaccaactgacatttatcatggatgctaaccagacttacctggtgtcagaacgcctagaaagggaagaaagaaaccagacccaagtgctgagacaacagcaggatgaggcctacctggcctctctcagagctgaccaggagaaagaaagaaagaaacgggaggagcgggagcgtaagcggcggaaggaggaggaggtgcaacagcaaaagttggcagaggagagacggcggcagaatttacaggaggaaaaggaaaggaagttggaatgcctgccccctgaaccttcccctgatgaccctgaaagtgtcaagatcatcttcaaattacctaatgattctcgagtagagagacgattccacttttcacagtctctaacagtaatccacgacttcttattctccttgaaggaaagcccagaaaagtttcagattgaagccaattttcccaggcgagtgctgccctgcatcccttcagaggagtggcccaatccccctacgctacaggaggccggactcagccacacagaagttctttttgttcaggacctaactgacgaatgacatttttttcttcctgtcccctcctaccccagtccctaaaagaaatggggaaaaaagaaaacaacagcaagtcaaaaaaaaaaaaaaaaaa

SEQ ID NO: 25222 - DNA, 1979 bp, Homo Sapiens
ggagcctgagccctgcggaacctcggcgctcggccccaccccgcccgtacctgcacttatttattgttgttatttcttaccgcggagccccgcagtcgggtcctcccgcccgctcccgcgcagcgctagcattctccagtccctcagtcccttcccgcgcggtgcgccgcagccgaggcgatgcgcctcattcagaacatgtgcaccatcgccgagtaccccgcgccgggcaacgccgcggcctccgactgctgtgtgggcgccgccggccgccgcctggtcaagatcgccgtggtgggcgccagcggcgtgggcaagaccgcactggtggtccggttcctcaccaaacgattcatcggtgactatgaaagaaatgcaggtaatctctatactagacaagttcagatagaaggtgaaaccctggctcttcaggttcaagacactccaggtattcaggtccatgagaacagcctgagctgcagtgaacagctgaataggtgcattcgctgggcagatgctgtggtgatcgttttctccatcactgactacaagagctatgaactcatcagccagctccaccagcacgtgcagcagctacacctgggcacccggctgcctgtggtggtcgtggccaacaaagctgacctgttgcacatcaaacaggttgaccctcagcttggactgcagctagccagcatgctaggctgctcattctatgaagtgtctgtcagtgaaaattataatgatgtctacagcgccttccacgtcctctgtaaagaggtcagtcacaaacagcagcctagcagtacacccgagaagcgaagaacctccctcattcccaggcccaagtcacccaacatgcaggacctgaagaggaggtttaagcaagccctctctgccaaagtgaggactgtcacctccgtctgaagcaggaggagcactcaagggggtttggtcttcccaggaagagggcctgaggttctcctagtgcaggaacgttgaatattggcaatgattcctggttccagaaagggctggagcagaagggccaagagggcctgtggaactgctacagaaaaggaagtgttgttctgagcagggggacaggattgatgaggcttgaaagagcccactgagccactctctgaatatgtgaaatgtactctgtgtcttttcctttagagtggggagggggcataatcgtttcggtttctgcattcaactaccttgtaaatggtggtccgttgcagtttcaccaaatgtattgatgtgatttacagtgggaatgaaagaacagattaagcattgataggctttcttttttcccccttttttcttttttctcttttcttctttcttttcctctttttccccaagaggaagaattgcttttctcttaccagtatgatttgtaactctggaacactattcttacagaatgcctttctaacctgaaggatacccagatttctttctttatgtacaagatggaaaatcccctacccctcaaaaacaggttgagtttatgggccagaatattttgtataccagacattggtaagctctcatggtttacaggaaggctctggttccccctcacaggatgagcatgctcagttgggcgtgtgtggaggagctgtgaacttcacgctcttcaaccccagactttgactgtatagttttttgtttttttaactgttccatcaggaaaaaaatgtgtcagttgattttggtgtgacttgtgtaaatggttcatggcaatgacgttgggttgcttcctaggcctggctgagttgtgcctaagggtggctgaaatactaaaacacttatcttacagcaagtgaacaggggctacctgccacatcccctccacagatgcactttaaaaagccactcatgctttggcttaaactgtaattaatttattttatgtacaataaatcgcatttgaaaaagaaaaaaaaaaaaaaaaaaaaaaa

SEQ ID NO: 25223 - DNA, 921 bp, Homo Sapiens
ctgcctttctccaccagagactcttcctcagggaggacttggtgaattttattcaagcaaattttaagaaacgagaatgtgtcttctttaccaaagattccaaggccacgctcaatgaaatccttccttcctgtccacaccatcgtgcttatcagggagaatgtgtgcaagtgtggctatgcccagagccagcacatggaaggcacccagatcaaccaaagtgagaaatggaactacaagaaacacaccaaggaatttcctaccgacgcctttggggatattcagtttgagacactggggaagaaagggaagtatatacgtctgtcctgcgacacggacgcggaaatcctttacgagctgctgacccagcactggcacctgaaaacacccaacctggtcatttctgtgaccgggggcgccaagaacttcgccctgaagccgcgcatgcgcaagatcttcagccggctcatctacatcgcgcagtccaaaggtgcttggattctcacgggaggcacccattatggcctgatgaagtacatcggggaggtggtgagagataacaccatcagcaggagttcagaggagaatattgtggccattggcatagcagcttggggcatggtctccaaccgggacaccctcatcaggaattgcgatgctgaggtaccggtgggacaggaggaggtctgctaggtcacatggaagaaagaccatggcatgggcctgtggcctgaaccctggggctctgtgatggagccagccagatcatggggaagtctgcctttcaaggagtgcctttgggaccttaaaggaattgaaaacaaggatgacgtacctaattaactgctgggaaagagttaacaatgaatgttttgttcattaaaatgtgttctcagcaatctcaaaaaaaaaaaaaaaaaa

SEQ ID NO: 25224 - DNA, 1128 bp, Homo Sapiens
cctcctctccctggcttttgtgttggtgcctccgagctgcaaggagggtgcgctggaggaggaggaggggggcccggagtgagaggcacccccttcacgcgcgcgcgcgcacacggtgccggcgcacgcacacacgggcggacacacacacacgcgcgcacacacacacgcacagagctcgctcgcctcgagcgcacgaacgtggacgttctctttgtgtggagccctcaaggggggttggggccccggttcggtccgggggagatggcgcagcccatcctgggccatgggagcctgcagcccgcctcggccgctggcctggcgtccctggagctcgactcgtcgctggaccagtacgtgcagattcgcatcttcaaaataatcgtgattggggactccaacgtgggcaagacctgcctgaccttccgcttctgcgggggtaccttcccagacaagactgaagccaccatcggcgtggacttcagggagaagaccgtggaaatcgagggcgagaagatcaaggttcaggtgtgggacacagcaggtcaggaacgtttccgcaaaagcatggtcgagcattactaccgcaacgtacatgccgtggtcttcgtctatgacgtcaccaagatgacatctttcaccaacctcaaaatgtggatccaagaatgcaatgggcatgctgtgcccccactagtccccaaagtgcttgtgggcaacaagtgtgacttgagggaacagatccaggtgccctccaacttagccctgaaatttgctgatgcccacaacatgctcttgtttgagacatcggccaaggaccccaaagagagccagaacgtggagtcgattttcatgtgcttggcttgccgattgaaggcccagaaatccctgctgtatcgtgatgctgagaggcagcaggggaaggtgcagaaactggagttcccacaggaagctaacagtaaaacttcctgtccttgttgaaaccaaacgatataaatacaagataaattatcactggagttttttctttcccttttttctgtgcctgcataatgctgacacctgcttgtttccatacaaattgatatcaaaataaaatttgtatagattaaaaaaaaaaaaaaaaaaaaa

SEQ ID NO: 25225 - DNA, 2473 bp, Homo Sapiens
caatgcaccgcacaccctttactggccggccccgcgctgctctcctaagaccccgcgggccagcgccgcgaccccttcccagcgctcctcgcgctgtgtgcggcgcgtcctctcgccggtgacccggtgtgcgtggggtcgaggcgccgggcggagtggctccgggccgaaacgccatgcggaggggcgagcgcagggacgccggaggtccgcggcccgagtccccggtgcccgcgggcagggcctcgctggaggagccgcctgacgggccgtctgccggccaagccaccgggccgggcgagggccgccgcagcaccgagtccgaggtctacgacgacggcaccaacaccttcttctggcgagcccacaccttaaccgtgctcttcatcctcacctgtacgcttggctatgtgacgctgctggaggaaacacctcaggacacggcctacaacaccaagagaggtattgtggccagtattttggttttcttatgttttggagtcacacaagctaaagacgggccattttccagacctcatccagcttactggaggttttggctctgcgtgagtgtggtctacgagctgtttctcatctttatactcttccagactgtccaggacggccggcagtttctaaagtatgttgaccccaagctgggagtcccactgccagagagagactacgggggaaactgcctcatctacgacccagacaatgagactgacccctttcacaacatctgggacaagttggatggctttgttcccgcgcactttcttggctggtacctgaagaccctgatgatccgagactggtggatgtgcatgatcatcagcgtgatgttcgagttcctggagtacagcctggagcaccagctgcccaacttcagcgagtgctggtgggatcactggatcatggacgtgctcgtctgcaacgggctgggcatctactgcggcatgaagacccttgagtggctgtccctgaagacgtacaagtggcagggcctctggaacattccgacctacaagggcaagatgaagaggatcgccttccagttcacgccgtacagctgggttcgcttcgagtggaagccggcctccagcctgcgtcgctggctggccgtgtgcggcatcatcctggtgttcctgttggcagaactgaacacgttctacctgaagtttgtgctgtggatgcccccggagcactacctggtcctcctgcggctcgtcttcttcgtgaacgtgggtggcgtggccatgcgtgagatctacgacttcatggatgacccgaagccccacaagaagctgggcccgcaggcctggctggtggcggccatcacggccacggagctgctcatcgtggtgaagtacgacccccacacgctcaccctgtccctgcccttctacatctcccagtgctggaccctcggctccgtcctggcgctcacctggaccgtctggcgcttcttcctgcgggacatcacattgaggtacaaggagacccggtggcagaagtggcagaacaaggatgaccagggcagcaccgtcggcaacggggaccagcacccactggggctggacgaagacctgctggggcctggggtggccgagggcgagggagcaccaactccaaactgacctgggccgtggctgcctcgtgagcctcccagagcccaggcctccgtggcctcctcctgtgtgagtcccaccaggagccacgtgcccggccttgccctcaaggttttttgcttttctcctgtgcacctggcgaggctgaaggcgaggggtggaggaggccccagcacagcctcatctccatgtgtacacgtgtgtacgtgtgtatgcgtgtgtgtacgcgtgtgtacgcgcgtgtgtacacatgcgtggccgcctgtggtgtgcacgtgtgctctgggctccgaggcttctccagagctgggagctggctggcgtggcaagggcatgctctggggcagtgtgtccctcaggaaccagggtcctccctcccctttctgcctggtcagccccgtggcctctggcccaccaagctccctgtcacccagccatggtgtggtccaggcagggacatctcggtaccctttctgcactccgtgggccctgggtgcgctgaggcctggaggcgtctacactggctccacatccacttcccccgcagctcgtgtgggcgctcgtccacaaacactccgtggctgagaggcagcggatccaggcagcgatgctgagccacctcctccgagccttcctttcacacagaccaccccggaggacacgtggatgatggggtcagagatcactgagctgcccctcaagggggcctggaacccgggtgctggggtcatgctgcctccgtggctccaaggtgagggtcatcttcacgagcaaagagaaccaataaagtgacaacgaacgtctgaggcttccaaaaaaaaaaaaaaaaaaaaaaaaaaaaa

SEQ ID NO: 25226 - DNA, 3351 bp, Homo Sapiens
gcgggaggggcgcgagcgggctggccgaggaggaggcggcggcgtggagctgcctcctgccggcgggccgggccgggccgagccccgggcgctgcggcgacgcctggatcctgcctccgccaggccggctgcctggtgccccgaggaggctgctgagccccaggccatggtcccctctcgcaggacgtggaacctgggagccacgccctcgctgcggggcctgtggagagtgggccgggccccggagcccgagccggggatggctcgccccgccccagccccagccagcccggccgcccgccctttcccacacaccggcccggggaggttgagaactgggcgtggaaaagataccccagtctgcggtgacgaggactccagtgcccgaagtgcagctcgcccagccctagctcagtgccgagcccttagcgtggactgggctggccccggaagcccccacgggctctacctgaccctgcaggtagaacacctgaaggagaagctcattagccaggcccaggaagtgagccgactgcgatctgagctggggggcaccgacttggagaagcaccgggacctgctgatggtggagaatgagcgactgaggcaggagatgcggcgctgtgaggccgagctgcaagagctgcgcacaaagccagcaggtccctgcccaggttgtgagcacagccaggagagcgcccagctccgtgacaagctgtcccagctgcagctggagatggcggaaagcaaaggcatgctgtcagagctgaacctagaggtgcagcagaagaccgaccggctggctgaggtggagctgcgactcaaggactgcctggctgagaaggcacaggaggaggagcggctcagtcggcgcctgcgtgacagccacgagaccattgccagcctgcgggcccagtccccacctgtcaagtatgtcatcaagacagtggaggtggagtcgtccaagaccaagcaggccctcagcgagtcccaggcccggaaccagcacctgcaggagcaggtggctatgcagaggcaggtgctgaaggagatggaacagcagctgcagagctcacaccagctgaccgcgcggctccgggcgcagattgccatgtacgagtcagagctggagcgggcccatgggcagatgctggaggagatgcagtccctggaagaggacaagaaccgggccattgaggaggcctttgccagagcccaggtggagatgaaggctgtgcacgagaatctagcaggcgtccggaccaacttgctgaccttgcagccggcactgcggaccctcaccaacgactacaatgggctcaagcggcaggtgcgcggcttcccactgctgctgcaggaggccctcaggagtgtcaaggccgagataggccaggccatcgaggaggtcaacagcaacaaccaggagctgctgcgcaagtaccgccgcgagctgcagctgcgtaagaagtgccacaatgagctcgtgcggctgaaagggaacatccgagtgattgctcgtgtccggccagtcaccaaagaggatggggaaggacctgaggccaccaatgctgtgactttcgatgccgacgacgactccatcatccacctgctgcacaagggcaagcctgtgtccttcgagctggacaaggtcttctccccacaggcctcgcagcaggacgtgttccaggaggtgcaggccctggtcacctcttgcattgatggcttcaatgtctgcatctttgcgtacggccagacgggcgccggcaagacgtacacgatggaggggaccgctgagaacccaggtatcaaccagcgggccctgcagctgctcttctccgaggtgcaggagaaggcgtctgactgggagtacaccatcaccgtcagcgctgcggagatctacaatgaggtcctcagggacctgctagggaaagagcctcaggaaaaactggagatccggctgtgcccagatggcagtgggcagctgtatgtaccagggctgactgagttccaagtgcagagcgtggacgacatcaacaaggtgtttgagtttggccacactaatcgcacgaccgagttcaccaacctgaacgagcacagctcccgctcgcacgcgctgctcatcgtgacggtgcgaggcgtggactgcagcacaggcctccgcaccacggggaagctgaacctggtggacttggctggctcggagcgcgtgggcaagtcgggggccgagggcagccgcctgcgggaggcgcagcacatcaacaagtcgctgtcggctctgggggacgtcattgctgccctgcgctcccgccagggccacgtgcccttccgcaactccaagctcacctacctgctgcaggattcgcttagtggtgacagcaagaccctcatggtggtacaggtgtcccccgtggagaagaacactagcgagacgctctattccctcaagtttgctgagagggtgcgctctgtggagctggggcctgggctacgcagggcagagcttgggtcctggtcaagccaggagcatctagagtgggagccggcttgtcagacgccacagccctcggcacgggcccactcagcccccagctctgggaccagtagccgccctggatccatccggaggaagctgcagccctcggggaagtcgcggccactgcctgtgtgacggatgtgaccccgctgggcctgaagctgggccctcactggcctgtccctgctgcagcgccaggacccccggaggtagaggcgagagtggaggctcttcttctgccccgtctcccctcaaagatgagaaacatgttcagaaggaaacggtgtctctcggctgtggctctgagtgcaaattgcatgggcggaaaggcgggggtggctgctcttcctggcaggcctgggccatcagcgaactgggccccgtgaggagggcgggagtgtggaggagggtgggcctctcacccaggctttctcggcccctctcctcagcttgcagagctggccagccccctccttagggggtgggcgaggagcctctgggcagacccaagaaccatggggactggggtgggttggtggcaccaatggcagccctccccgcccctctccttcaaggagggttcccgcagctggggggtgtgcggaggcgcatggcctcccgccacggggccgtgctgtgtttatggctggcagaggcagccagcgggtgggggattctgctgctcgctcacctgcctggctcgctggtctctcgaattttcttccctctgaaatcctatttaagaacttttggaagcttagccatttttacttattaaaataaaagaagcctttttacacaaaaaaaaaaaaaaaaaa

SEQ ID NO: 25227 - DNA, 1223 bp, Homo Sapiens
ctttcggccggcgccgccagttcctggggcacacccagaggtccccttctcgccgccgcctgcaactgcgagggtagcccggggccgcttggagtcgcccggacctgagaggctgctgcactgggcctcagccagccctccggatgctggtgctgccatccccctgccctcagcctctggcattttcctccgttgagaccatggagggccctccccgtcggacttgccgctccccagaacctggaccttcctcctccatcggatctccccaggcttcatctcctccaaggcccaaccactacctgcttattgacactcagggtgtcccctacacagtgctggtggacgaggagtcacagagggagccaggggccagtggggctccaggccagaaaaagtgctacagctgccccgtgtgctcaagggtcttcgagtacatgtcctaccttcagcgacacagcatcacccactcggaggtaaagcccttcgagtgtgacatctgtgggaaggcattcaagcgcgccagccacttggcacggcaccattccattcacctggcgggtggtgggcggccccacggctgcccgctctgccctcgccgcttccgggatgcgggtgagctggcccagcacagccgggtgcactctggggagcgcccgtttcagtgtccacactgccctcgccgctttatggagcagaacacactgcagaaacacacgcggtggaagcatccatgagccgggctgccgggtgccccaggtaccacaggactttgcagggagcctggactcctgtccagacacctggtgagagcctgaggctggtgttcagggccctggacacagacacagagcagccgcatctcaaaggcagagccctgcctgaaggaggaatccgtgagtaatcttcaggtcctccgtgttctggagctgagatgggaatgagcccctacacagaatggagtcctctagcctaaagatatcagctgttccatggcagagccttgactggatggaggtggggagtgtggtgtgtaaagtctctggcctcataaaaggtggctgtgggtcgtcaggaatctgcgccatcttcctggggcttctgcgctgttgttggggaagggaccccagtcctgccttccaccccccaaccaggcctgagactgatcaaacaataaacacgtttcccactctgaaaaaaaaaaaaaaaaaaaaaaaaaaaaa

SEQ ID NO: 25228 - DNA, 2452 bp, Homo Sapiens
cgcaagaatgcatacaaactccagggctgctctctcctggagagggagggaggggatttaaaaacctgcagcaacatgggggaggaggctgtttgtccttctctctctggggaagtaactcgctcaaactgccttccttgctgagctgcttcgcgtagctttgaggaaggtctagtgaaattggtctttccattacatctggatgtactaccagagagttctgctgctgttgttttttttagcttttctttctttgagtctttaaagggcaattgtcgacactctgcaaacataccgatttgttgtctgcccactttggagtcttcaatctgggcagtaactatttaccctttttcctgctagcctgtccccctctctggattgaagtcacctgctaagacaatggactaccgaccagactcccggaaatcatgttggtaggatcccagtctttttcgcctggagggcccaatgggatcattagaagccagtcctttgcgggtttcagcggcctccaggaaaggcgatccaggtgtaactccttcattgaaaattcctccgctctcaagaagcctcaggccaaactgaagaaaatgcacaatttaggccacaaaaacaacaatccccccaaagagcctcagcctaaaagggtggaagaagtctacagggccttgaaaaatggacttgatgaatatctggaggttcaccagacggagctggacaagttgacagctcagttaaaagatatgaaaagaaactctcgcctgggtgtactgtatgacctagacaagcaaattaaaacaattgaaagatacatgagacgcctggagtttcatataagtaaggtagatgaactctatgaagcttattgtatccagcgacgcctccaggatggtgccagcaaaatgaagcaagccttcgcaacatcccctgccagcaaagctgcccgggagagtctgacagagatcaatcggagcttcaaggagtacacagagaatatgtgcaccattgaagtggagctagagaatctgctgggagaattctccatcaagatgaaaggtctggctggctttgcacgcctctgtcctggagatcaatatgaaattttcatgaagtatggccggcagcggtggaaactgaaaggcaaaatagaagtaaatggcaagcagagctgggatggagaagaaacagtttttctgcccctgatagttgggttcatctccatcaaggtcacggagctcaaagggctagcaactcacatcctggtaggtagcgtgacctgtgagaccaaagagctgtttgcagcccgacctcaggtagtggctgtcgacatcaatgaccttggtaccatcaaactgaacctggaaatcacctggtatccatttgacgtggaggacatgaccgcatcctcaggcgctgggaacaaggcagcagcccttcagaggagaatgtccatgtacagccagggtaccccggaaacgcccaccttcaaagaccactccttcttttcaaatctacctgatgacatctttgaaaatggaaaggcagccgaggagaaaatgccactgtcgctcagcttcagtgacctgcccaacggggactgcgccctcacctcccactcaacaggctccccttccaactcaacaaatccagaaattaccatcacccctgcggagtttaacctcagcagcttggcctcccagaatgagggtatggatgacaccagctcagcatcttccaggaactccctgggagaaggccaagagccaaagtcacacctgaaggaggaagacccagaggagcccagaaaacctgcctcggccccatctgaggcttgccgccgacagtcctcaggtgctggggctgagcacctgttccttgagaatgatgttgcagaagcacttctgcaagagtctgaggaggcctctgagctcaagcctgtggaactggacacttcggaaggaaacatcacaaagcagctggtcaagaggctcacatctgcagaggtgccaatggccacagacaggctgctctctgagggttctgttggtggagaatctgaaggctgcagatcctttctagatggaagcttagaggatgcttttaatgggcttttacttgcattagaaccacataaagagcagtataaagagtttcaggatctgaaccaagaagtcatgaatttggatgatattctaaaaaagtagagaagatcctctaatggatcccagtgtgcccatccctcaacctcctcagtgatcaactcatggccaatcttgtttcctattcttcaacctgctgacttccctctggattcttctgcaaccagtcccagatattgtgccattttatccatggttgtacttcttttttggatataaagatttttaaatgcattttttaaatgctaacaaaaaataaaaacttgaaacaaaaaaaaaaaaaaaaaaaa

SEQ ID NO: 25229 - DNA, 1851 bp, Homo Sapiens
tgcagctgttttcactccgctgtgactcagagcgctccgggctgcaggagaggaagaaatcttgcatcaccatggtgcacttctgtggcctactcaccctccaccgggagccagtgccgctgaagagtatctctgtgagcgtgaacatttacgagtttgtggctggtgtgtctgcaactttgaactacgagaatgaggagaaagttcctttggaggccttctttgtgttccccatggatgaagactctgctgtttacagctttgaggccttggtggatgggaagaaaattgtagcagaattacaagacaagatgaaggcccgcaccaactatgagaaagccatctcccagggccaccaggccttcttattggagggggacagcagctccagggatgtcttctcttgcaatgtgggtaacctccaacctgggtcgaaggcggcagtcaccctgaagtatgtgcaggagctgcctctggaagcagatggggctctgcgctttgtgctcccagctgtcctgaatcctagataccagttctctgggtcgtctaaggacagttgccttaatgtgaagactcctatagtccctgtggaggacctgccctacacactcagcatggtcgccaccatagattcccagcatggcattgagaaggtccaatccaactgccccttgagtcctaccgagtacctaggagaggacaagacttctgctcaggtttccctggctgctggacacaagtttgatcgggacgtggaactcctgatttactacaatgaggtgcatacccccagcgtggttttggagatggggatgcctaacatgaagccaggtcatttgatgggagatccatctgcaatggtgagtttctatccaaatatcccagaagatcaaccatcaaatacctgtggagagtttatctttctcatggaccgctcgggaagtatgcagagccccatgagtagccaggatacatctcagctgcgaatacaggcagccaaggaaacactgattttgctgctgaagagtttacctataggctgttatttcaacatctatggatttggctcttcctatgaggcatgctttccggagagtgtgaagtacactcagcaaacaatggaggaggctctggggagagtgaagcttatgcaggccgacctagggggcactgaaatcttggcaccactccagaacatttacaggggaccctccatcccaggccaccccctacagctttttgtctttacagatggagaagttacagacacgtttagtgtaattaaagaagttaggatcaacagacagaaacacaggtaggaagaaaatgtgatttccgggtgattggtgctgagtagtgacacacagactctagtgctacatgatgccggtgttgaccttccttcaagaggaccaaatgatttcagaatttagttttagcagctgaaaatttatttctccctgtaaacgttaaaaacagttttccaaataacatcaacaacacagcaaaaccattgtttcttattctttctaaactacaacgaacacaagaattgaatagtaagatgttaattttttttactataaacatttttagagaagtaaaacatgctgaaaactacacaaattataagcatacaactggactcattatcacagtgaatgcactgtgtgatcgccacataggtaaaaactggaatggtcgtaggcctctccatctgtacccttttccatcatgtcctattccctgtcactacacactaaaactttcctgacttacaataccatgggttatttatgcttgtttttgaatgaaaataaataagttatacagtaaaaaaaaaaaaaaaaa

SEQ ID NO: 25230 - DNA, 2266 bp, Homo Sapiens
ctctgattttaatcagttctgcgtttgaaaggaaacccggtgatatccgacatccaaagcacgtccaacagacggatgtggctgcgacactggcgatagcacttggcttaccgattccaaaagacagtgtagggagcctcctattcccagttgtggaaggaagaccaatgagagagcagttgagatttttacatttgaatacagtgcagcttagtaaactgttgcaagagaatgtgccgtcatatgaaaaagatcctgggtttgagcagtttaaaatgtcagaaagattgcatgggaactggatcagactgtacttggaggaaaagcattcagaagtcctattcaacctgggctccaaggttctcaggcagtacctggatgctctgaagacgctgagcttgtccctgagtgcacaagtggcccagtacgacatctattcgatgatggtggggactgtcgtggttttggaggttctcaccctgctcctgctcagcgtcccacaggcactgcgcagaaaggctgagctggaagtcccactgtcatctcctgggttttctctgctcttttatttggtgatcctggttctttcggccgttcacgtcattgtgtgcacctcagctgaaagttcgtgctacttctgtggcctctcgtggctggcggcaggtggggtgatggtgctggcctcggcgctgctgtgtgtgattgtgtctgttctgaccaacgtgctcgtgggtggaaacaccccaaggaagaaccccatgcatcccagctcaaggtggtcagagctagaccttcttattctgttggggacggcgggccacgtcttgagcctgggcgccagcagcttcgtggaggaggagcaccagacctggtacttccttgtgaacaccctgtgtctagctctgagccaagaaacctacagaaactactttctgggagatgacggtgagcctccgtgtggcctctgtgtggaacaagggcatgacggggccacagcagcgtggcaggacgggcctggctgtgatgtcctggagcgagacaaaggccacggaagcccctctacctccgaagtgctcagaggccgcgagaagtggatggtgctggccagtccgtggctaatactggcctgctgccggctgctgcgctccctaaaccagacaggtgtgcagtgggctcaccggcctgacctcggccactggctcaccagctctgaccacaaagccgagctctctgtcctggctgccctctccctcctcgtagtttttgtgctggtgcagagggggtgctcccctgtgtccaaggctgccctggcgctggggctgctgggcgtctactgctaccgggcggccatcgggagtgtccggttcccgtggcggccggacagcaaggacatttccaagggtattattgaagctcgttttgtttatgtctttgtccttggcattctgttcacgggcaccaaagacttacttaaatctcaagtcattgctgcagacttcaaactcaagactgtaggtttatgggagatatatagtggattagttcttctggcagccttgctctttagaccacataatcttccggtcttagcatttagcctcttgattcagactctaatgactaaattcatctggaagcccctgagacacgatgcagctgagattactgtgatgcattattggtttggtcaagcattcttctattttcagggcaactccaacaacattgccaccgtggacatctccgcaggcttcgtgggcttagacacctacgtggaaatcccagccgtgctcctgacagcgtttgggacgtacgcagggcctgtgctgtgggccagccacttagtgcacttcctgagctcagaaacacgcagtggttcagcactgagtcatgcttgcttctgctacgcactgatttgttctattccagttttcacgtacatcgttttggtgacatctctgcgttatcatttatttatatggagtgtattttctccaaaacttctctacgagggaatgcacctgctcattacagctgctgtctgtgtattcttcacggcaatggatcaaaccagactcacacagtcttagactaagctgaacactggaaaaataatacatgcttaaagtctgctgttattctaaaatgaaagatatgaattcaacaaagttgatggataactttctttgactgctctacctgaatttagactaagcagtaaatagtttaataaaagatcactttaatataaaaaaaaaaaaaaaaa

SEQ ID NO: 25231 - DNA, 1577 bp, Homo Sapiens
gtgatttacaagtcaagttaaaatgtccccagaagtggccttgaaccgaatatctccaatgctctcccctttcatatctagcgtggtccggaatggaaaagtgggactggatgctacaaactgtttgaggataactgacttaaaatctggctgcacatcattgactcctgggcccaactgtgaccgatttaaactgcacataccatatgctggagagacattaaagtgggatatcattttcaatgcccaatacccagaactgcctcccgattttatctttggagaagatgctgaattcctgccagacccctcagctttgcagaatcttgcctcctggaatccttcaaatcctgaatgtctcttacttgtggtgaaggaacttgtgcaacaatatcaccaattccaatgtagccgcctccgggagagctcccgcctcatgtttgaataccagacattactggaggagccacagtatggagagaacatggaaatttatgctgggaaaaaaaacaactggactggtgaattttcagctcgtttccttttgaagctgcccgtagatttcagcaatatccccacataccttctcaaggatgtaaatgaagaccctggagaagatgtggccctcctctctgttagttttgaggacactgaagccacccaggtgtaccccaagctgtacttgtcacctcgaattgagcatgcacttggaggctcctcagctcttcatatcccagcttttccaggaggaggatgtctcattgattacgttcctcaagtatgccacctgctcaccaacaaggtgcagtacgtgattcaagggtatcacaaaagaagagagtatattgctgcttttctcagtcactttggcacaggtgtcgtggaatatgatgcagaaggctttacaaaactcactctgctgctgatgtggaaagatttttgttttcttgtacacattgacctgcctctgtttttccctcgagaccagccaactctcacatttcagtccgtttatcactttaccaacagtggacagctttactcccaggcccaaaaaaattatccgtacagccccagatgggatggaaatgaaatggccaaaagagcaaaggcttatttcaaaacctttgtccctcagttccaggaggcagcatttgccaatggaaagctctaggaaacaccagtcttgagaggtggccagccagactgcctgtccacatgcgtgtcagcacatacagccgcttcctggaagccgcctggaatgtcttcacggcagcgttttgctcacacagcagcttttgcacgccccaggcagccccgactgctgaaatccaacttgagctggctggtggtccctggatcctagagcccttcacttcgggttactccctctttcttgcctctatttcttagttggaagaaataaactcacaaattatggtgcagtaattttccggggaaagtaaagcctcaggaatgcccacgcctttcttccaaagcctttgtctctgagacctcttaagttctaagattaaatgcccctcgctgttcttcctctgaaaaaaaaaaaaaaaaaa

SEQ ID NO: 25232 - DNA, 2046 bp, Homo Sapiens
ctgggtttgggtgcagacgttgttgcttgggcgcttctccgctgcgtgtaggtgaagggggcttcctgaccgagacatggatttaggtgctattacaaaatactcagcattacacgccaagcccaatggactgatccttcaatacgggactgctggatttcgaacgaaggcagaacatcttgatcatgtcatgtttcgcatgggattattagctgtcctgaggtcaaaacagacaaaatccactataggagtcatggtaacagcgtcccacaatcctgaggaagacaatggtgtaaaattggttgatcctttgggtgaaatgttggcaccatcctgggaggaacatgccacctgtttagcaaatgctgaggaacaagatatgcagagagtgcttattgacatcagcgagaaagaagctgtgaatctgcaacaagatgcctttgtagttattggtagagataccaggcccagcagtgagaaactttcacaatctgtaatagatggtgtgactgttctaggaggtcaattccatgattatggcttgttaacaacaccccagctgcactacatggtgtattgtcgaaacacgggtggccgatatggaaaggcaactatagaaggttactaccagaaactctctaaggcttttgtggaactcaccaaacaggcttcttgcagtggagatgaatacagatcacttaaggttgactgtgcaaatggcataggggccctgaagctaagggaaatggaacactacttctcacagggcctgtcagttcagctgtttaatgatgggtccaagggcaaactcaatcatttatgtggagctgactttgtgaaaagtcatcagaaacctccacagggaatggaaattaagtccaatgaaagatgctgttcttttgatggagatgcagacagaattgtttattactaccatgatgcagatggccactttcatctcatagatggagacaagatagcaacgttaattagcagtttccttaaagagctcctggtggagattggagaaagtttgaatattggtgttgtacaaactgcatatgcaaatggaagttcaacacggtatcttgaagaagttatgaaggtacctgtctattgcactaagactggtgtaaaacatttgcaccacaaggctcaagagtttgacattggagtttattttgaagcaaatgggcatggcactgcactgtttagtacagctgttgaaatgaagataaaacaatcagcagaacaactggaagataagaaaagaaaagctgctaagatgcttgaaaacattattgacttgtttaaccaggcagctggtgatgctatttctgacatgctggtgattgaggcaatcttggctctgaagggcttgactgtacaacagtgggatgctctctatacagatcttccaaacagacaacttaaagttcaggttgcagacaggagagttattagcactaccaatgctgaaagacaagcagttacacccccaggattacaggaggcaatcaatgacctggtgaagaagtacaagctttctcgagcttttgtccggccctctggtacagaagatgtcgtccgagtatatgcagaagcagactcacaagaaagtgcagatcaccttgcacatgaagtgagcttggcagtatttcagctggctggaggaattggagaaaggccccaaccaggtttctgaagataattttcatattcctgagaaactggactttttacaagtctttacaaaactgtcaataataatggcagtactaagagatttataatcataatgtttacaatgcagcctactggattgtctctagatctgtttttcttaaacactaacagaataattctttataaataggtaagccttacacttgttaaagaaatttacctctaatttcagtctcactaatgtaaaatactgggacttaagtatacaattcagtcactaactgtacagttttatgtggggaacaattcatgcaggctactggaaaattaaatcttattaccaaaaaaaaaaaaaaaaaa

SEQ ID NO: 25233 - DNA, 2460 bp, Homo Sapiens
cggaggcggcgccgacggggactgctgaggcgcgcagagggtcggcggcgcccgggagcctgtcgctggcgcggtccgggcgggaggctcggcggcgggcggcagcatgtcggtggcggggctgaagaagcagttctacaaggcgagccagctggtcagtgagaaggtcggaggggccgaggggaccaagctggatgatgacttcaaagagatggagaagaaggtggatgtcaccagcaaggcggtgacagaagtgctggccaggaccatcgagtacctgcagcccaacccagcctcgcgggctaagctgaccatgctcaacacggtgtccaagatccggggccaggtgaagaaccccggctacccgcagtcggaggggcttctgggcgagtgcatgatccgccacgggaaggagctgggcggcgagtccaactttggtgacgcattgctggatgccggcgagtccatgaagcgcctggcagaggtgaaggactccctggacatcgaggtcaagcagaacttcattgaccccctccagaacctgtgcgagaaagacctgaaggagatccagcaccacctgaagaaactggagggccgccgcctggactttgactacaagaagaagcggcagggcaagatccccgatgaggagctacgccaggcgctggagaagttcgaggagtccaaggaggtggcagaaaccagcatgcacaacctcctggagactgacatcgagcaggtgagtcagctctcggccctggtggatgcacagctggactaccaccggcaggccgtgcagatcctggacgagctggcggagaagctcaagcgcaggatgcgggaagcttcctcacgccctaagcgggagtataagccgaagccccgggagccctttgaccttggagagcctgagcagtccaacgggggcttcccctgcaccacagcccccaagatcgcagcttcatcgtctttccgatcttccgacaagcccatccggacccctagccggagcatgccgcccctggaccagccgagctgcaaggcgctgtacgacttcgagcccgagaacgacggggagctgggcttccatgagggcgacgtcatcacgctgaccaaccagatcgatgagaactggtacgagggcatgctggacggccagtcgggcttcttcccgctcagctacgtggaggtgcttgtgcccctgccgcagtgactcacccgtgtccccgccccgcccctccgtccacactggccggcaccccctgctgggtctcctgcattccacggagcccctgctgccagggcggtgtctgagcctgccggcgccacctgggccccggcccttgaggtactccctgagcaggaccccacacttgggtgggggggcttatctgggtgggtggggatgcctgtttacactagcgctgactcccaacggtgacggctcccttccccactccatggcgccagcctcctcccccgctccccaacttctcgcccagctggccgaggcggggcaacactaaggtgctcttagaaacactaatgttcctctggggcagcccccacctccgtcctgacccgacgggggcccggcccactgcctaccctcgagtcccgcagccttaacaggatgggatcgagggtccccatggggtggctcagagataggaccctggttttaaatccctcccagcctggtgctggtgatgggccctggccctactccagggccaatgcacccccgcctcacacacgcactccttctcctcaaggccagggcagagggcctcaccgcctcccgggcctgctgtcagcttgcagcccggggacagaggccagctgggatctgcctgaggacagagaacatggtctcctgcagggccctgcctcccaagccccgccctcagaaagccaagtaccttttcagctttttaactgcccccatcccaacccagggaggcctgtgtcactctggcacaagctgccaccaccagccacccacacccaccccagcacacctcacacgggaccacagccgcgctgccgagggccaagcacaaaggttccagtgagcgcatgtcccagcccctggtggccaggctccccttgctgagccgctgccacttcaccctgtgggaagtggccccagccatctcctctagaccaaggcaggcagccccgacatctgcttcctctatcgcccaatgcaaaatcgatgaaatggggagttctctgggccaggccacattcacattcccctccccctgtggtccagtgaagcctccggaccccaggctctgctctgccctgccctgcacccccctcgtcagaagtacatgaggggcgcagagatgagcacacagctttgggcacggtccagggcaaactgaaatgtacgcctgaattttgtaaacagaagtattaaatgtctctttctacaaaaaaaaaaaaaaaaaa

SEQ ID NO: 25234 - DNA, 2148 bp, Homo Sapiens
gactgggtttgttgtgaagttgcggtgatccagcgcagagccccgtcctgattgatcgcatcgcggggctcagatgactgtaaaatgaatagatgaaattcttgcttctcgaagattttcttgggcatctcccggaaagtgcgttttaaggcgaagtcatgatgtattctcccatctgtctcactcaggatgaatttcacccattcatcgaggcacttcttccacatgtccgtgcaattgcctatacttggttcaacctgcaggctcgaaaacgcaagtactttaaaaagcatgagaagcgaatgtcaaaggatgaagaaagagcagtcaaagatgagcttctcagtgaaaagcctgaaatcaaacagaagtgggcatccaggctccttgccaaactgcgcaaagatattcgccaggagtatcgagaggactttgtgctcaccgtgactggcaagaagcacccgtgctgtgtcttatccaatcccgaccagaagggtaagattaggagaatcgactgcctgcgacaggcagacaaagtctggcgtctggatctagtcatggtgatcctgttcaaaggcatccccttggaaagtaccgatggagagcggctcatgaaatccccacattgcacaaacccagcactttgtgtccagccacatcatatcacagtatcagttaaggagcttgatttgtttttggcatactacgtgcaggagcaagattctggacaatcaggaagtccaagccacaatgatcctgccaagaatcctccaggttaccttgaggatagttttgtaaaatctggagtcttcaatgtatcagaacttgtaagagtatccagaacgcccataacccagggaactggagtcaacttcccaattggagaaatcccaagccaaccatactatcatgacatgaactcgggggtcaatcttcagaggtctctgtcttctccaccaagcagcaaaagacccaaaactatatccatagatgaaaatatggaaccaagtcctacaggagacttttacccctctccaagttcaccagctgctggaagtcgaacatggcacgaaagagatcaagatatgtcttctccgactactatgaagaagcctgaaaagccattgttcagctctgcatctccacaggattcttccccaagactgagcactttcccccagcaccaccatcccggaatacctggagttgcacacagtgtcatctcaactcgaactccacctccaccttcaccgttgccatttccaacacaagctatccttcctccagccccatcgagctacttttctcatccaacaatcagatatcctccccacctgaatcctcaggatactctgaagaactatgtaccttcttatgacccatccagtccacaaaccagccagtcctggtacctgggctagcttggttcctttccaagtgtcaaataggacacccatcttaccggccaatgtccaaaattacggtttgaacataattggagaacctttccttcaagcagaaacaagcaactgagggaaaaagaaacacaacaatagtttaagaaattttttttttaaataaaaaaaaaggaaaagaggaagactggacaaaacaacacaaaggcagaaaggaaagaaactgaagaaagaagataatagaccagcaattgcagcacttacaatcactaattcccttaaggttgaaactgtaatgacataaaaagggtcgatgatatttcactgatggtagatcgcagcccctgcaacgtagcctttgttacatgaagtccgctgggaaatagatgttctgtctctatgacaatatattttaactgactttctagatgccttaatatttgcatgataagctagttttattggtttagtattcttgttgtttacgcatggaatcactattcctggttatctcaccaacgaaggctaggaggcggcgtcagaggtgctgggtgacagagccatgagccagccattttataagcactctgatttctaaaagttaaaaaaaatatatgaaatctctgtagcctttagttatcagtacagatttattaaatttcggcccttaacccagccttttccagtgtgtaacccagtttgaaatcttaaaaaaagaaaaaaaaaaaaaaaa

SEQ ID NO: 25235 - DNA, 1275 bp, Homo Sapiens
gggccggcgcacgaaacctgtttggaggttatggatgataaacccaatcctgaagccctaagtgacagttcagagcgtcttttctcctttggcgtcatcgcagatgttcaatttgcagacttagaagatggctttaatttccaaggaaccaggcggcgatactacagacatagtcttcttcacttacagggtgccattgaagactggaataatgaaagcagcatgccctgttgtgtccttcagcttggagatatcatcgatggatataatgcacagtataatgcatccaaaaagtccctagaacttgttatggacatgttcaagaggcttaaagttccagttcatcatacatggggaaaccatgaattctataacttcagtagagagtatttaacacactctaaacttaacactaagtttctagaagatcagattgtacatcatcctgagaccatgccttcagaagattattatgcttatcattttgtaccattccctaaattccggttcattttacttgatgcatatgacttgagtgtcttgggcgtggatcagtcttctccaaaatacgagcagtgtatgaagatattgagggagcacaatccaaatacggaactgaatagtcctcaaggtgaattattcctttgagctgagaatctaatagattgtctttaaattcttcagctaccttttattcagcaggaagatggacaattaaggactttctgagccccagtttgtccagtttaatggaggattcagccaagaacagctaaactggttgaatgaagtgctaacattctctgacacaaaccaagaaaaggtggtgattgccatcttcccatttacccggacgcctctgacaatgtgtgcctggcctggaactacagagatgccctggcagtcatttggtctcatgagtgtgtggtgtgtttctttgctggtcacacccatgatggtggctactctgaggatccttttggtgtataccacgtcaacctagaaggagttattgaaacagctccagacagccaagcctttggcacagttcatgtctatcctgacaaaatgatgttgaaagggagaggcagagttccagatagaattatgaattacaagaaaggaagagccttccattgttagtctaatttattttaacttgatagaaaatgagctttgtgtttgtccctcctaaacaaaaaaataaaaatcctctgtctcatcaaaaaaaaaaaaaaaaaaaaaaaaaaaaaaaaaaaaaaaaaaaaaaaaaaa

SEQ ID NO: 25236 - DNA, 1638 bp, Homo Sapiens
acgcatgttttacccatcttagaagggagattagatgctaaaaactgcaagcgcatcaatcttggaggaagccaagcagctggttacctccagcgtctcctccagctgaagtaccctgggcacctggcagccatcaccctcagccgcatggaggagattctgcatgagcacagctacatcgctgaggattatgtggaagaattacacaaatggcggtgtcctgattattatgagaataatgtccacaagatgcagctcccattttccagcaagctcctgggcagcactctgacctctgaggagaaacaagaaaggcggcagcagcaattgcggcggctgcaggagctcaatgcccggcggcgggaggagaagctgcagctggatcaggagcgtctggaccgactgctatatgtgcaggaacttctagaggatggccagatggatcagtttcacaaagctctgatagagctgaatatggactccccagaagagctgcagtcctacatccagaagctcagtatagcagtggagcaggctaagcagaaaatcctccaagcggaagtcaacctcgaggtggatgtggtagacagcaagccagagacccctgacctggagcagctggagccgtctttggaagatgtggaaagcatgaatgattttgatcccttgttttcagaggaaacacctggagtggagaagccggtcaccactgttcagcccgtgtttaacttggcagcatatcatcagctatttgttgggacagaaagaattcgagctccagagattattttccagccatctctcataggagaagaacaggctgggattgcagagactcttcagtacattctggacaggtacccaaaggacattcaggaaatgctggttcagaacgttttcctcactggcggcaacacgatgtatcctggcatgaaagccagaatggagaaggaactgttggagatgagacccttccggtcttcttttcaggttcaacttgcctcgaaccctgtgctggatgcctggtacggtgctcgtgactgggccttgaaccacctagatgataatgaagtttggatcaccaggaaagagtatgaagaaaagggaggagagtacctcaaggagcactgtgcttccaacatctatgtccccatccgcctgccgaagcaggcctcccgctcctcagatgcccaggcatccagcaagggctccgctgctggtggaggtggtgctggtgagcaggcatagcagaggccctccagagagactgccctgcacgccatgccttgggccacgttggcagtgtgacaggactgtgattgtgctagatgtacctgcccaagtctgctggtcacatttggcagcaaaatggatttctcctggggagaacaaagttaagggacactgagacctgcccttcagaattcggttcacttgggggcttctgtggtagagactaactggccttctgatgtctttgttcaactgtggccagctgtggcatcagcttcctggagcagtaaatgaagacagagtggaggacacaaatgtacaaaatgcacaagactgatttcttaccacattttagtctttcttgttttaaaaaaaattctttaaaatttaaaaaaaaaaaaaaaa

SEQ ID NO: 25237 - DNA, 1620 bp, Homo Sapiens
gactacatcgatgcgcagtttgaaaattatctgcaggaggagctgaagatccgccgctcgctcttcgactaccatgacacaaggatccacgtttgcctctacttcatcacgcccacagggcactccctgaagtctctagatctagtgaccatgaagaaactagacagcaaggtgaacattattcccatcatcgccaaggctgacaccatctccaagagcgagctccacaagttcaagatcaagatcatgggcgagttggtcagcaacggggtccagatctaccagttccccacggatgatgaggctgttgcagagattaacgcagtcatgaatgcacatctgccctttgccgtggtgggcagcaccgaggaggtgaaggtggggaacaagctggtccgagcacggcagtacccctggggagtggtgcaggtggagaatgagaatcactgcgacttcgtgaagctgcgggagatgttgatccgggtgaacatggaagacctccgcgagcagacccacagccggcactacgagctctaccggcgctgcaagttggaggagatgggctttcaggacagcgatggtgacagccagcccttcagcctacaagagacatacgaggccaagaggaaggagttcctaagtgagctgcagaggaaggaggaagagatgaggcagatgtttgtcaacaaagtgaaggagacagagctggagctgaaggagaaggaaagggagctccatgagaagtttgagcacctgaagcgggtccaccaggaggagaagcgcaaggtggaggaaaagcgccgggaactggaggaggagaccaacgccttcaatcgccggaaggctgcggtggaggccctgcagtcgcaggccttgcacgccacctcgcagcagcccctgaggaaggacaaggacaagaagaattaacgcacgcacagacttacatgtcaagagtggactttagactttcatgtgttaagttgcttgagttacaccttgtgacccttctcccataacatggtgtgaggacggactgggagccggtacagactccagtgtttacagccttgctttcctcccaccgaccctggccccaggctgccccgggcctggcgggccacccctctctatgcaaacacgtaaaagccatgaatgctggaatccaaaactgacgaggtttatttttttcagagccagtggctggtcttccatttacagtgtcactattccctgacggagctgttatgtgccgctctagcgaaggccccagccgggatgctaggcctaattgttcagcgtggagatggcaactcacgtggtgccctaggtgcagctgcgtggtctggtatacatgctgcaaaattcacccagttcccctcattttaatttttctaacctacagcttaattttaataactttaaaacacttctaaatatttattttggcaccagcgtcaagacaaataatatcctctcccattattttcataagtaacacagattccctgatttttaaaaactaaaaatacagctaaacctttcttatgtataaagtatgcctatcatatacagggagaggtgggtaataaacttcctgtaatgacaaaaaaaaaaaaaaaa

SEQ ID NO: 25238 - DNA, 1727 bp, Homo Sapiens
ccacgcgtccgggagagattctggtcagcttccccctctccagcatagttgagatcaagaaggaggcttcacattttatcttcagctccatcaccatcctggagaagggccatgccaagcactggttcagctccctgcggccaagtcgaaatgtggtcttcagcatcatcgagcatttctggagggagctgctgctgtctcagcctggagccatggcagacgcatctgtcccaaggacccggggcgaggagctgacgggactcatggctggatcccagaaacgcctggaggacacggcgagggtcctgcaccaccagggccagcagctggacagcgtcatgagaggcctggacaagatggagtcagacctggaggtggcggacagattgctgacagaactggaatctcctgcttggtggccctttagctccaagctttggaagacaccaccggaaacaaagcccagggaagatgtctccatgaccagttgtgaaccctttgggaaagaagggatactgataaaaattcctgctgttatttcccacagaacagagtctcacgttaaaccagggaggctcaccgtccttgtgtctgggttggaaatacatgactccagttctttgctcatgcacaggtttgaaagagaagacgtggacgacatcaaggtccactcaccttacgaaattagcatccgccagcggtttattggaaagccagacatggcctatcgtttgatatctgccaagatgccagaggttatccccattttagaagtgcagttcagcaagaagatggagctgttagaagatgcattggtgctcagaagcgcaagaacctcttcccccgcagagaagagctgctcagtctggcatgcagcatctgggctgatgggccgtaccctgcaccgtgagccacccgcaggagaccaggagggcacagcactgcacctgcagacaagcctgccagccctttctgaggcagatacccaggaactaacccagatcctgaggaggatgaaggggctggccctggaggccgagagtgagctggagagacaagacgaagccctggatggcgttgcagcagctgtggacagggcaaccttgaccatcgacaagcacaacaggcggatgaagaggctgacctaggggcagaacgtccctgcattcctgtctcaccctgcacatcccgctgagatggagggctgggcggcagtgccagggctgcagaggcctgtggccctccggagtggtcttcctctggatggggctgctactgtggggctgcttctgcaccaggggcctccccaggtgtgcaccatgcctgcctcccacttggctgtccctgctgctgggcaggacccggccacatgttctgcggatgctgcagaagtgtggaccatggcgggaccccaaggacacttggcacaggcctggaagaggccgccctcgtcttgtctcggctccctttcatggacagactggccttcttagctgtactataaatttgtgagtgaagttagagcccagctcacttagccagctcactttgagggcatcctataaacacccaactgttcttttatcgtctcggttttagccaaaagtgaaattagcatgactgcatctttcaaacaaaaatattgatttctgcttttagggccccgtttccatccagaaataaagggaaatgctggcttcaaaaaaaaaaaaaaaaaaaaaaaaaaa

SEQ ID NO: 25239 - DNA, 1079 bp, Homo Sapiens
ggtgccctaggcgctggagaaaaacttcacccgcgcccacaggccccctttccgcaggctgcgctggcggttcaggtttgcaggccggaagtgaaatgttcttttttgatttttaaaaaggaagcctccggccctatggttttctggggttggagtggatgtgtgtgctgggggaggcggagacgtcccgctccaggcagggccttgggtcttaataggtggggaaatctctgccaaataggaggcctctcggagcctcagtttccccatctgcagactgggctctgacttcttctggcatgagagggtgtgtgagagtaaaaggaggcagctagccccgtgccgggagacacgtcagccatgtcatctgagcctcccccaccaccacagccccccacccatcaagcttcagtcgggctgctggacacccctcggagccgtgagcgctcaccatcccctctgcgcggcaacgtggtcccaagcccactgcccactcgccggacgaggaccttctcggcgacggtgcgggcttcacagggccccgtctacaaaggagtctgcaaatgcttctgccggtccaagggccatggcttcattaccccagctgatggcggccccgacatcttcctgcacatctctgatgtggaaggggagtatgtcccagtggaaggcgacgaggtcacctataaaatgtgctccatcccacccaagaatgagaagctgcaggccgtggaggtcgtcatcactcacctggcaccaggcaccaagcatgagacctggtctggacatgtcatcagctcctaggagatggtggaagcaccccttgtcctgtgcttgtgggagactttgcggggaggaggcagcagacactggagatgacattcttccacacgagacggggcttcagccgggcatggtccctctcaagtatctcctggaggaaggggtatggggggcaggtgtggggtgtggggtgttcccggccatcagcacagcctatgaccattgcaacaacctctcaccatctgaagagcattaaaagcatttaaaaaggaaaaaaaaaaaaaaaaaaaaaaaaa

SEQ ID NO: 25240 - DNA, 2680 bp, Homo Sapiens
cttgtgttgtaaaacatccagccttggaaaaggacatccgatactctttcatattagacatacagtatgctcctgaagtttcggtaacaggatatgatggaaattggtttgtaggaagaaaaggtgttaatctcaaatgtaatgctgatgcaaatccaccacccttcaaatctgtgtggagcaggttggatggacaatggcctgatggtttattggcttcagacaatactcttcattttgtccatccattgactttcaattattctggtgtttatatctgtaaagtgaccaattcccttggtcaaagaagtgaccaaaaagtcatctacatttcagatcctcctactactaccacccttcagcctacaattcagtggcatccctcaactgctgacatcgaggatctagcaacagaacctaaaaaattgcccttcccattgtcaactttggcaacaattaaggatgacacaattgccacgatcattgctagtgtagtgggtggggctctcttcatagtacttgtaagtgttttggctggaatattctgctataggagaagacggacgtttcgtggagactactttgccaagaactacattccaccatcagatatgcaaaaagaatcacaaatagatgttcttcaacaagatgagcttgattcttacccagacagtgtaaaaaaagaaaacaaaaatccagtgaacaatctaatacgtaaagactatttagaagagcctgaaaaaactcagtggaacaatgtagaaaatctcaataggtttgaaagaccaatggattattatgaagatctaaaaatgggaatgaagtttgtcagtgatgaacattatgatgaaaacgaagatgacttagtttcacatgtagatggttccgtaatttccaggagggagtggtatgtttagcaaccactgaatgtgacttaactatgtacaatgttcattcacactagttgatcattttcagattgttcatactttttcttgaggaagaataagctttttcaagttgattttcaagcttactttttatattctaatctgacaaatgaaaatgtaaaatctgagttcagtgtatctaagctgctttacaattttttttcaatgctgtactactgtctcaagatttaaattttaatgcagagtactttattggtgtgaggcacacaggtaagaagaaatgtcaacattaaatgtatgacttacttggtacaaaaattttttaaaaagggaactaccttgacattgtgtattaaatgtttacctaagactataatctcaagtatgatgtttgtttaacatatacctctcaaaatttatcaccactcaatgacactgcatcaaaattgactataaaactaattcaagaaatatttatatatattttttaatatacaaaaaatatttagcctgatggaatggctttccttttcaaacattattttctaagtttctatacaaatgaaatctttacctctgcatattaatgagccttgccataattactgtagagtggcttttcaaagatattttgttgcactaaaactgtggtagtaaactcagtgaacatgatgtgtggaagagcataattagctggtcaatatttttgtccaaaatacctgcaagagtaataaaatacatacctttcaaacatgataattattagttttttttttcctttctggaacatggattttggtacattagcagtagccttattttaatgctttatgtcctaaacatactaatagaaatgaaaagacgcagagagagcatttcggaatactgaagtactagttttagaaatgagactttcagccaacaatctatagaaagaattttatggaccatcttgttttagttatttaatgttgatgttgttcaaatgggtaaatgtacagaaagaaaattttagagtaaacttggaactttggatataactagaaaaaactagattatagaattagtcggtaacacttgctaatggacattggcattcatctcctttttcctcctaagtgtatgtatgtgttttaagatttctgtttttacgattaaaactggaaacatgaggttttttgtttttgtttttttacataattacatatattccttctgaatcatttatcttttgagaaagaaatgttacctaaacttcaaatgtgctttttgtttgtgaggtaattaaattgcttctacagtggaggcttacaaaattattgtgacaactattttgaagctgaaaggatagtttttctattgctaagtcatttgaaaaagtgaccattttgccagtgaaatgaagtggaagttagtaggagaatcataaattaaatatattattttgttaataaaaaggcaaagtagtaggtactttttaaaccctcccaaccagccctttctcaatattcatcaaatctaaaacatttagggggcaaaattctaacatgttcatggtatcttgcaaatagtgaaagctttattctgaaggattataaactagttttcttcattttaactagcactattttgtggaaattagaaacctcttttatttctcttcccaaaagtaatacttaaggatacagataaataaagttcacttatatcttcttacaaaaaaaaaaaaaaaaaaaaaaaaaaaaaaaaaaaaaaaaaaaaaaaaaaaa

SEQ ID NO: 25241 - DNA, 1851 bp, Homo Sapiens
gcctgggctcccgcgtgtttaaaagtgcgcttgtggctgctgctgtcttaactcctgtgcttggcggacagacaggccagatggcggcggaggtgttgccgagtgcgaggtggcagtattgtggggcgcccgacgggagccagagagctgtactggtccagttctccaacgggaagctacagagtccaggcaacatgcgctttaccttgtatgagaacaaagattccaccaaccccaggaagaggaatcaacggatcctggcagctgaaacagataggctctcctatgtgggaaacaattttgggactggagccctcaaatgcaacactttgtgcaggcactttgtgggaattttgaacaagacctctggccaaatggaagtatatgatgctgaattgttcaacatgcagccactattttcagatgtatcagttgagagtgaactggcgctagagagtcagaccaaaacttacagagaaaagatggattcttgtattgaagcctttggtaccaccaaacagaagcgagctctgaacaccaggagaatgaacagagttggcaatgaatctttgaatcgtgcagtggctaaagctgcagagactatcattgatacgaagggtgtgactgctctggtcagcgatgctatccacaatgacttgcaagatgactccctctaccttcctccctgctatgatgatgcagccaagcctgaagacgtgtataaatttgaagatcttctttcccctgcggagtatgaagctcttcagagcccatctgaagctttcaggaacgtcacgtcagaagaaatactgaagatgattgaggagaacagccattgcacctttgtcatagaagcgttgaagtctttgccatcagatgtggagagccgagaccgccaggcccgatgcatatggtttctggataccctcatcaaatttcgagctcatagggtagttaagcggaaaagtgctctgggacctggagttccccacatcatcaacaccaaactgctgaagcactttacttgcttgacctacaacaatggcagattacggaacttaatttcggattctatgaaggcgaagattactgcatatgtgatcatacttgccttgcacatacatgacttccaaattgacctgacagtgttacagagggacttgaagctcagtgagaaaaggatgatggagatagccaaagccatgaggctgaagatctccaaaagaagggtgtctgtggccgccggcagtgaagaagatcacaaactgggcaccctgtccctcccgctgcctccagcccagacctcagaccgcctggcaaagcggaggaagattacctagacgcatgctttccagacagggcgttttggctgcatcacagccactggctggtcctattcatttccatttttatgtatgttttgaaaagaaaaggtccggggatggtggctcacacctgaaatcccagcactttgggaggccgaggcaggaagatcattgagctcaggagtttgaaaccagtctggacaacatagggagaccccatctctaccggaggaaaaaaaaaagagtcaggcctggtggtgtgcgcctgtaatcccagctactcgggaggctgaggcaggacgattacttgagcttgggaaatcaaggttgcagtgagctatgattgtgtggccacactccatcctgggtcacagagtgagaccttgtctcaaaaaagtaacataaggaaaaaagaagccttgctttagcacaggtatgaagccagaagccagcatctcaactgtgcttgtcttatgcagaaatataaagcgatggccaggttggacttcaaaaaaaaaaaaaaaaa

SEQ ID NO: 25242 - DNA, 1539 bp, Homo Sapiens
gctgggagcgcggggaaggcggttggggttctgacagctgcgcgcgatcctgctctctctcagccgcctgtggacatgcgcaaagggccctctcctgagtccagatgatgctcataccaatggcttcagtgatggcggtgactgaaccgaaatgggtctcggtctggagccgcttcctctgggtgacgctgctgagcatggtgctggggtccctgctggccctgctgctgccgctgggggctgtggaggagcagtgcttggctgtgctcaaaggcctctacctgctcaggagcaaaccggacagggcgcagcatgccgccaccaagtgcaccagcccgtccacggagctcagcatcacctccaggggcgcgacgctgctggtggccaagaccaaggcctctccagcgggtaagttggaagccagagctgccctgaaccaggccctggagatgaagcgccagggcaagcgggaaaaagcccaaaagctcttcatgcacgccctcaagatggacccggacttcgtggacgcgctcaccgagtttggcatcttctcggaagaagacaaggacatcatccaggcggactacttgtacaccagagcattgaccatctcaccctaccatgagaaagcactggtcaaccgcgatcggacactgcctcttgtggaagagatcgaccagaggtatttcagcatcatcgacagcaaagtgaagaaggtcatgtccatccccaaggggaactcagctctgcgcagggtcatggaggagacctactaccatcacatctaccacacagtggccatcgagggcaacaccctcaccctctcggaaatcaggcacatcctggagacccgctacgccgtgcccgggaagagcctggaggagcagaacgaggtcataggcatgcatgcagccatgaagtacatcaacacgactctggtttcgcgcatcggctccgtcaccatcagcgacgtgctggagatccacaggcgggtgctgggctacgtggaccccgtggaagccggcaggtttcggacaacacaggtcctggtcggacaccacatccctccccatccgcaggatgtggaaaagcagatgcaggagtttgtacagtggctcaactccgaggaagccatgaacctgcacccagtggagtttgcagccttagcccattataaactcgtttacatccaccctttcattgatggcaacgggaggacctcccgtctgctcatgaacctcatcctcatgcaggcgggctacccgcccatcaccatccgcaaggagcagcggtccgactactaccacgtgttggaagctgccaacgagggcgacgtgaggcctttcattcgcttcatcgccaagtgtactgagaccaccctggacaccctgctttttgccacaactgagtactcggtggcactgccagaagcccaacccaaccactctgggttcaaggagacgcttcctgtgaagccctaaccctagaaatcctcagtgacaaaggctgtcctgaggtaggaaaaaaaaaaaaaaaaaa

SEQ ID NO: 25243 - DNA, 1500 bp, Homo Sapiens
atgaaacagctcctcctcatccaagagagatggaaaagggcccagcgtgaagaaagattgaaagcccagcagaacacagacaaggatgcagctgcccatcttcagacatctcacaaaccctctgcagaggatgcagagggccagagtcccctttctcagaagtacagcccttccacagagaaatgcctgcctgagattcaggggatctttgacagggatccagacacactactttatttacttcagcaaaagagtgagccagcagagccatgtattggaagcaaagccccaaaagatgataaaacaattatagaggagcaggcaaccaaaattgcagatttgaagaggcatgtggaattccttgtggctgagaatgaaagattaaggaaagaaaataaacaactaaaggctgaaaaggccagacttctaaaaggtccaatagaaaaggagctggatgtagatgctgattttgtagaaacgtcagagttatggagcttgccaccacatgcagaaactgctacagcctcctcaacctggcagaagttcgcagcaaatactgggaaagccaaggacattccaatccccaatcttcctcccttggattttccatctccagaacttcctcttatggagctctctgaggatattctgaaaggatttatgaataattaaaatggaaggccacagaaaaggggaaaagaggaaataatacagtaatcgttaatccagcaaaaagaaatgaaaagggaaaaccacatagaagggtaatcccggaaatgcttcatctggtggactgtgggagcagaggcattgccaggacttgggaaacagtcactgtgaaatgcgctgcgtatctcattcactcacttcagctaatgattccgacttggcagacgctaaactcatggaggttcggtttctcctgatacaaaccaaatggctacctggaagaatttctttcaagcaacagttatttttcttatcttcagggttaaaatgtataaaagttatgtgtaattaatctataatgccataaatgataatgcaaaacctaaataatatggtggccggaggggctgccttatatttgaaacatgctttctatcatgcattgactgtatgcattttgttaatgcacattctgtttgtttaaggtgtgtaagatacacacccttctagatgaaactatatgtgccacactttgcactactcataatgataacctcaagactatcagaagaaatatttaaatttccattttatgaagaaaggaaccaaattattatgctttttaaaacaaattaccagtttacataattaatcagggtgcattttaagttctaacttcgtttattgtataatgcatcatttgaaaataccaaggaggaaataccctttgtttttaatgatgcaagagtggacgtaatgctagttggcagtattttattgtaagaaatcaataaagtaattgtgttttataaaaaaaaaaaaaaaaaaaaa

SEQ ID NO: 25244 - DNA, 1803 bp, Homo Sapiens
gggggctcgggctgggggcgcggcctgtgccggccgccccaccctccttgcataaaagccggagcccgcggggccggcgctctcagcccgtcggttcccgagcgccttcccggtgaccccgcagtgggtgtgtgaggggaggacggacagacccagacgccgccggaccaggaggacgctgacgaggcaccatgcgtgagatcgtgcacatccaggcgggccagtgcggcaaccagatcggcgccaagttttgggaggtcatcagtgatgagcatgggattgaccccactggcagttaccatggagacagtgatttgcagctggagagaatcaatgtttactacaatgaagccactggtaacaaatatgttcctcgggccatcctcgtggatctggagccaggcacgatggattcggttaggtctggaccattcggccagatcttcagaccagacaatttcgtgtttggccagagtggagccgggaataactgggccaagggccactacacagagggagccgagctggtcgactcggtcctggatgtggtgaggaaggagtcagagagctgtgactgtctccagggcttccagctgacccactctctggggggcggcacggggtccgggatgggcaccctgctcatcagcaagatccgggaagagtacccagaccgcatcatgaacaccttcagcgtcatgccctcacccaaggtgtcagacacggtggtggagccctacaacgccaccctctcggtccaccagctggtggaaaacacagatgaaacctactgcattgacaacgaggccctgtatgacatctgcttccgcaccctgaagctgaccacccccacctacggggacctcaaccacctggtgtcggccaccatgagcggggtcaccacctgcctgcgcttcccgggccagctgaacgcagacctgcgcaagctggcggtgaacatggtgcccttccctcgcctgcacttcttcatgcccggcttcgcgcccctgaccagccggggcagccagcagtaccgggcgctcacggtgcccgagctcacccagcagatgttcgactccaagaacatgatggccgcctgcgacccgcgccacggccgctacctgacggtggctgccatcttccggggccgcatgtccatgaaggaggtggacgagcagatgctcaacgtgcagaacaagaacagcagctacttcgtggagtggatccccaacaacgtgaagacggccgtgtgcgacatcccgccccgcggcctgaagatgtcggccaccttcatcggcaacagcacggccatccaggagctgttcaagcgcatctccgagcagttcacggccatgttccggcgcaaggccttcctgcactggtacacgggcgagggcatggacgagatggagttcaccgaggccgagagcaacatgaacgacctggtgtccgagtaccagcagtaccaggacgccacggccgacgaacaaggggagttcgaggaggaggagggcgaggacgaggcgtagatgcccccgcgagacgggttagggaaagcggaggaggaaagcgagggggtggggggcttcccgggacgataacctggcagtggaaggaaagaagcatggtctactttaggtgtgcgctgggtctctggtgctcttcactgttgcctgtcacttttttttccttttttgtaatattgatgacatcaatgtaacatttgagatatttctgaattactgttgtaatggctaaaatcacataaacgtttgtgtcggaaaaaaaaaaaaaaaaaaaaaa

SEQ ID NO: 25245 - DNA, 1482 bp, Homo Sapiens
cgcaagcagctggatctccggtaactgagacatagggtataactgttgtcgcggcggaggaagtgaggacggcgccaagggccttccgggccagtgttggatccctgtagtttgtgaagatggtgttgctaacaatgatcgcccgagtggcggacgggctcccgctggccgcctcgatgcaggaggacgaacagtctggccgggaccttcaacagtatcagagtcaggctaagcaactctttcgaaagttgaatgaacagtcccctaccagatgtaccttggaagcaggagccatgacttttcactacattattgagcagggggtgtgttatttggttttatgtgaagctgccttccctaagaagttggcttttgcctacctagaagatttgcactcagaatttgatgaacagcatggaaagaaggtgcccactgtgtcccgaccctattcctttattgaatttgatactttcattcagaaaaccaagaagctctacattgacagtcgtgctcgaagaaatctaggctccatcaacactgaattgcaagatgtgcagaggatcatggtggccaatattgaagaagtgttacaacgaggagaagcactctcagcattggattcaaaggctaacaatttgtccagtctgtccaagaaataccgccaggatgcgaagtacttgaacatgcgttccacttatgccaaacttgcagcagtagctgtatttttcatcatgttaatagtgtatgtccgattctggtggctgtgaaataatgaatacagtcactggtaagggagaacctagaacccagtaggtgtatattttcaggaaactgagctcacagagatgtgtattagaatccaagtggaacttctgcctctaaagaccttgcaagaaaagagatgccctgaaaatgaaaggttgcacctcatttaatgaagcttaaccctatgtagaaagtctctttcgggggcagaggctttctctgggtgccaagccatatatattagggaatagtagattgttaatttcgttttttccctcccagtgcattttaaaaacagcactggctggggcattctcattctctgatggagccatcaatgagatttaacttagtcaacctgtgctagcaacattctgaaattccttcaaagaaggcagtcctttgggaaggtgtttttttttttttttttttgactctaatcaacattccttttgttggtgacatttgtgattttcagtaatctgagtttttgatggccttttaaacaagactccagtatgtgaaggttaattgctgtgctccacagatcttgtctattggcccctgtagaaagttaacctttgttgttttccttttataatttgcttattgcacaattgctttagggtaagtgaattatattaagatgccttgaaattatagcactccttgattaagaaaaaaaaaaaaaaaaaaaaaaaaaaaaaaaaaaaaaaa

SEQ ID NO: 25246 - DNA, 2635 bp, Homo Sapiens
gctggtaacagggccttgcctagtgggccttccttcccaggtcgcccctcagtctccactagagacaggactgaccagttgctcttccttccaagaaccttcgagatctgcggtctggggtctggttgaaagatggcggccctcactaccctgtttaagtacatagatgaaaatcaggatcgctacattaagaaactcgcaaaatgggtggctatccagagtgtgtctgcgtggccggagaagagaggcgaaatcaggaggatgatggaagttgctgctgcagatgttaagcagttggggggctctgtggaactggtggatatcggaaaacaaaagctccctgatggctcggagatcccgctccctcctattctgctcggcaggctgggctccgacccacagaagaagaccgtgtgcatttacgggcacctggatgtgcagcctgcagccctggaggacggctgggacagcgagcccttcaccctggtggagcgagacggcaagctgtatgggagaggttcgactgatgataagggcccggtggccggctggataaacgccctggaagcgtatcagaaaacaggccaggagattcctgtcaacgtccgattctgcctcgaaggcatggaggagtcaggctctgagggcctagacgagctgatttttgcccggaaagacacattctttaaggatgtggactatgtctgcatttctgacaattactggctgggaaagaagaagccctgcatcacctacggcctcaggggcatttgctactttttcatcgaggtggagtgcagcaacaaagacctccattctggggtgtacgggggctcggtgcatgaggccatgactgatctcattttgctgatgggctctttggtggacaagagggggaacatcctgatccccggcattaacgaggccgtggccgccgtcacggaagaggagcacaagctgtacgacgacatcgactttgacatagaggagtttgccaaggatgtgggggcgcagatcctcctgcacagccacaagaaagacatcctcatgcaccgatggcggtacccgtctctgtccctccatggcatcgaaggcgccttctctgggtctggggccaagaccgtgattcccaggaaggtggttggcaagttctccatcaggctcgtgccgaacatgactcctgaagtcgtcggcgagcaggtcacaagctacctaactaagaagtttgctgaactacgcagccccaatgagttcaaggtgtacatgggccacggtgggaagccctgggtctccgacttcagtcaccctcattacctggctgggagaagagccatgaagacagtttttggtgttgagccagacttgaccagggaaggcggcagtattcccgtgaccttgacctttcaggaggccacgggcaagaacgtcatgctgctgcctgtggggtcagcggatgacggagcccactcccagaatgaaaagctcaacaggtataactacatagagggaaccaagatgctggccgcgtacctgtatgaggtctcccagctgaaggactaggccaagccctctgtgtgccatctccaatgagaaggaatcctgccctcacctcacccttttccaacttgcccagggaagtggaggttccctctttcctttccctcttgtcaggtcatccatgactttagagaacagacacaagtgtatccagctgtccacgggtggagctacccgttgggcttatgagtgacctggagtgacagctgagtcaccctgggtaagttctcagagtggtcaggatggcttgacctgcagaagatacccaaggtccaaaagcacaaggtctgcggaaagttctggttgtcggctgggcaccacggctcacacctataatcgagcactttgggaggccaagacaggaggatcacttgaggccaggagtctgagacaagcctaggcaacaaaacaagactctgtctctacaaaaagtttaagaaatgagccagacatggtggtgtatgcctgtagtcccagccactcagaaggctgaggcaggaggatcgcttgagaccaagagtttgagcctgcggtgagctgtgaatgcaccacggcactcaagcctgggcaatgtagcaagatcctgtctctacaagaaattttttaaaaatgagccaagtgtggtggtgcatgcctgtagttccagctactcaggacactgacgtaggagggttgcttgagactgagagttggaggctgcgatgagccatgaatgccccactgcactccagcctgggcgacagaacgagaccccatctcaaaaaaaataagttctggttgtcattgaattgggataaacagagagcttgatgctttctgccttctgtctcaggtgatgcattgcacatttgggatatttggaaaggaaatgaggaaagaaattagggcctcctctgatctctcgctatctgcgggtcctgtccttttctcaagaccttcaccattactggtgttttcctgtcttctctttagtatgatccctcaaaacctcactaactggaaggatgattttgtctcagtttgtactcctaaataaaaagtaaacatgacacctctaaaaaaaaaaaaaaaaaaaaaa

SEQ ID NO: 25247 - DNA, 2028 bp, Homo Sapiens
ggtggacaggcgggcaaggacagctccgcgagccccctacaactcgtttccttccgttcaccttcgcagggcggcgactggcggcgcgatggacctgaccgggctcctgctggacgaagaaggcaccttctccctcgccggcttccaggacttcacgttcctcccaggacaccagaagctgagtgcccggatccgaaggaggctctactatggctgggactgggaagccgactgtagcctggaggagctctccagcccggtggcagacattgctgtcgaactgctccagaaggcagcccccagccctattcgccgactccagaagaaatacgtagctcatgtgtcccgggaggcatgcatctccccatgtgctatgatgctggctctggtgtacattgaacggctccggcaccgaaacccagactacttgcagcatgtgtcatcctctgacttgttcctgatctccatgatggtggccagtaagtacctctatgatgaaggggaggaggaggaggtcttcaacgacgaatggggagctgctgggggtgtggccgtgcccactctcaatgccttggagaggggcttcctgagtgccatggattggcatctctacactgaccctcgggagatctttgaggtgctgagctggttggagagctgtgtggctgagcagcagggacggtggcgaggctggtacacctacacagacctgtgtgtgctgctggagcagccgacctggcagttggccctgggctccctctgccagcggctggtaaagctgtcttgcctgttagctgtggcatatgtgagcagtgtggccctggctgtggcatcggtggccgtaatacatcagtctttggggctgtcctgcacccctacacctgggccgcctgaccttggactgacctcccgttgcctcctggagccctgcataccttctgtgccacaatgcctgccgtctcccgctaatgtctccagctgcctggaaggcagcatggggctgcggtcactctggggcagtcttctggcctcactgactcctccaccattgcctcccccagacccccctgctcctcccactcttcttcataactgccacctttgccagaagctccagagagactccccaacctgccatgcctgcctccaccccaaccgtacagtccccactgcgctgtccagcccctggtaccatacctatggcctggctcccccctggccttggagcccggtgcccctttcacttcctcagcctcagcaatgttcccttttcagtgtcatggagctggctcgcctcaagtctttcgttttcccaggctaggtagggctgtgaggaatgcattaagagggtttgggagtttctgagaacctggaggagcaaagcttgattcagatcctgtctgcctcgctgggtccttggcaggtcccctgtcctcctgggtgggagcttatggggtggtggggcagaaggactgaaggtaattcactcctagatcgcagtggctggctgcttggccaggacagtgatgccaccagggagagcttccgcttggtgaccagggacatgtcccagatggacatagaagcccctctctgcctccctgggattttttagacttttacttttgatttccctaggatggaagagtataggtgggagataagggaagtggggtgagaggagaaaggaaatgttggcatgggcctgtgtgatgtccctgaggcagaagagccggggactgatgggttcaggtgggagctgctgggtgaggcagggaacccttttcactcccattccttagctttagtctaatggagccaaggactgctgggaccttcaaccctgatcttttgtcttccagtcttctcttagtgtcctgctcctaggtttccctctcttctggttcttctcccaggtattctcttcccaggcctctctggccactgctttgtatcagggtttttcacgcttttgtagaactgaggtttcaataaacagtttcagttgcaaaaaaaaaaaaaaaaaaa

SEQ ID NO: 25248 - DNA, 2251 bp, Homo Sapiens
ctctctctctcttctcctccctgcgacaggtggagcgcacggggcgggcgcacggccatgtccgccgagggcgcggagccggggccggggtccgggtccgggcccgggccggggccactctgccccgaacacggccaggctctgagctggttctgcggctccgagcgacggcccgtgtgcgccgcctgcgcggggttgggcggtcgctgccgggggcaccgcatccgccgggcggaggagcgcgccgaggagctgcggaacaagattgtggaccagtgtgagaggctgcagttacagagtgctgccatcaccaagtatgtggcggacgtcctgccggggaagaatcaaagagcagtgagcatggccagtgcagcgagggaactggttatccagcggttgagtctggtgaggagtctttgcgagagcgaggagcagcggttactggaacaggtgcatggcgaagaggagcgggcccaccagagcatcctgacacagcgggtgcactgggccgaggcgctgcagaaacttgacaccatccgcactggcctggtgggcatgcttactcacctggatgacctccagctgattcagaaggagcaagagattttcgagaggcacagaggacatacggatcgatgagaggacagtcagccccttcctgcaattgtcagatgatcgaaagaccctgaccttcagcaccaagaagtcaaaggcctgtgcagatggcccggagcgcttcgaccactggcccaatgccctggctgccacctccttccagaatgggctccatgcctggatggtgaatgtccagaacagttgtgcctataaggtgggcgtggcttcaggccacctgccccgcaagggttctggcagtgactgccgtctgggccacaatgccttctcctgggtcttctctcgctatgatcaggagtttcgtttctcacacaatgggcagcacgagcccctggggctgctgcggggcccagcccagctgggtgtagtgctggacttgcaggttcaggagctgctcttctatgagccagcctccggcacagtgctctgtgcccatcatgtgtccttcccggggcccctcttcccagtctttgctgtggccgatcagaccatttctatcgtccgctgacctctggccacaggaagccaggtccaccgcccaccaccctttcaggccatgtttctactcagtgtgcttttcccaaatgatgtgtgtggtgtttctaagagaaacagggcccataaccagtgggcagctttaggagggatggggatctgtttcagatctaggcataacctgtaaatcacaggtgtccaaacttttggcttccctgggccacatttgaagaagaattttcttgggccacataaaatacactaacgatagctgatgagctaaaaaaaaaaaaaaagtctgtgtataatttttgtgatatctgccaccacagataagcaaaaaagtccttgcattcaaagggttggagattgctgctttgagtgctgggtacctgtggggaacctactactccctgggccttagtctcccaaatccaccatgcatctgcccctctgagggtgtcttcactttgtctctggcatctagcatggtgcctggtgcatagtgagcatgcaataaatatttggcaggtgagtggatggatagatggataggtgaatgtaggtggacaggtgactgggtggatgttgtggtctctggagaagcactgccattcagcctcctgctccagctgttcacatgcagaaatgctctcttcacaggcagagaagcctgtggctaaagcttccacatctcattaactcagtgcttttgtctttttcatgacatggcacatagagaaaatatttttttctagcacacaagagcaacctgaaaggctgctcctggccagaggactctgtcccgggggaccgtgtcctcccccatgtcctgcctaggccctcagaggaccaggggatcatgtctccaggtaacccgactgtagcccctgctggctgagctccagcctgtgcccactgataatagcagggacggccttttctcttagagcagctgataagtttccctacctgatggccccctctgacataaactgcacacctggggtgatggcttaaagccagaaagagctgagggagttaagagggccaaccttagggcacgtgggcattattaaaggtcttaaaagcattgaagatttaaaaaaaaaaaaaaaaaaaa

SEQ ID NO: 25249 - DNA, 2693 bp, Homo Sapiens
ggaagctggagccacctgcggctctgagagggacagacggtgctcagcctgtgtcctggggcaaagctggattcattttcctccctggcgatcttctggggcccacagctggtgatatggaggcactgacaccctggtctcggcgcttgttttagaagaggcagaacagtgataaagacaaggatctaaatgggcaaggacgccctgccctcactgggctcactggcagccctgaccctctattctgcaccctgtgagccaccgagactgaaccaaacccaggaagcggcgccaccaaccagcctcgcagaggcagaggccctggagcagtgacagcacaggagatctgctggctcgggggaaggggaggaaagaggaaaacaaagggagtgatcgagtgagcctcgccccgccctccctgcgccggcccatgatgtgtcagtcagaggcgcggcaaggaccagagctccgcgcggcgaaatggttgcacttcccccagctggccctgaggcggaggctggggcagctgagctgcatgtccagacccgctctgaaactgcgctcctggcccttgaccgtcctctactacctcctgcccttcggcgccctcagaccgctcagccgggtgggatggaggcccgtaagcagggtggctttgtacaagtcagtgccaacgcgcttgctgtcacgggcctggggtcgcctcaatcaggtggagctgccacactggctgcgcaggcccgtctacagcctgtacatctggacgtttggggtgaacatgaaagaggccgctgtggaggacctgcatcactaccgcaacctcagcgagttcttccggcgcaagctgaagccgcaggcccggcctgtctgtggcctgcacagcgtgattagcccatcggatggaaggatcctcaactttgggcaggtgaagaactgtgaggtggagcaggtaaagggggtcacctactccctggagtcgttcctgggcccgcgtatgtgcacagaggacctgcccttcccaccagccgcgtcgtgtgactccttcaagaaccagctggtcacccgggaagggaatgagctctatcactgtgtcatctacctggcccctggggactaccactgcttccactcccccaccgactggactgtgtcccaccggcgccacttcccaggctccctgatgtcagtgaaccctggcatggctcgctggatcaaagagctcttctgccataacgagcgggtggtcctgacgggggactggaaacatggcttcttctcactgacagctgtgggggccaccaacgtgggctccattcgcatctactttgaccgggacctgcacacaaacagcccaaggcacagcaagggctcctacaatgacttcagcttcgtgacgcacaccaatagagagggcgtccccatgcgtaagggcgagcacctgggcgagttcaacctgggctccaccatcgtgctcatcttcgaggcccccaaggacttcaatttccagctgaaaacaggacagaaaatccgctttggggaagccctgggctcgctctagagtctctttcctgattatggctgctaagggatcttttccaaacagagtgagggtcttttcaagagggaggcccatgaggccatccaggtaagggcctgcctcagcgtggttgggagtctgaccaggtaggacttgaatgattcggctaccacctgttccagaggtgcagacaagaggtggcgagagcccccatcatgcccctcaacctatcccgttccttctgcctacaaataaaaagtgcaggctggaatgatctcagtcacatttggatctttttaaacactgtatagacggaagagcctgcattcctgaccgaaccttcagttggtctcggttgtcgttttttcttgctgctcctccccccatcacctgagctgttttctgttggccccttttgttttttggccttaacgctcctgctgcacagggtgaggtgcctccttggcacagactgtggatgcctctcccccagcagagccacacagccttcgtgacaactgctttccgttcccacattcacctcatcctgctctttagaaaaagcagtctttgtgcttgtggctgaacgcatcaccctggactctgctagtgtcttctgaggacactgatgacactgattaatgatacagacctttgcaggacctgatgagtgacccttctggagctggccaggtcctctgcagcaggcaagaccaatcaatcactgaacctgcctcatggcaccagagtgaacagggcaggcaggtagtaggcccagctggggaaatgggagagttcctgtccccctccacatatccctacatgaaatatgggaaagttgctgctattgattcagggtctgtcttggaggcagaggacccttggtggatagttggtcagtgcctggaaaacctgtcccagtttatcaggaacgcaggcctggggagcccccagtggcggggacagggccagatttcatgttgaccctggggatgctgtgaatttctcctgcaggagagacatcattgaattttttcaactgtatcagtagcacagtatttttgtatgaaaagtgggagacttctgaacagtaattcatttaattgcaaagcattttgaaataaaaaaaatcaaacttaaaaaaaaaaaaaaaaaa

SEQ ID NO: 25250 - DNA, 1522 bp, Homo Sapiens
cctctttgccccaccaccgctgctcctcagcaggcgcctcaccagcctccacaccccttgcgcccgcagaaacgcgcctggccctgagctgtcaccaccgacactctccaggctccggacacgatgcaggccatcaagtgtgtggtggtgggagatggggccgtgggcaagacctgccttctcatcagctacaccaccaacgcgtttcccggagagtacatccccaccgtgtttgacaactattcagccaatgtgatggtggacagcaagccagtgaacctggggctgtgggacactgctgggcaggaggactacgaccgtctccggccgctctcctatccacagacggacgtcttcctcatctgcttctccctcgtcagcccagcctcttatgagaacgtccgcgccaagtggttcccagaagtgcggcaccactgccccagcacacccatcatcctggtgggcaccaagctggacctgcgggacgacaaggacaccatcgagaaactgaaggagaagaagctggctcccatcacctacccgcagggcctggcactggccaaggagattgactcggtgaaatacctggagtgctcagctctcacccagagaggcctgaaaaccgtgttcgacgaggccatccgggccgtgctgtgccctcagcccacgcggcagcagaagcgcgcctgcagcctcctctaggggttgcaccccagcgctcccacctagatgggtctgatcctccaggatccccacccaaagcctgatggcaccccggctggccatgctgtcccctccctgtggcgtttcttagcagatggctgcagagcttcgttgatggtcttttctgtactggaggcctcctgaggccaggaacgtgcaaatttgcaggtgctgcatcccaagcccctcatgctcctgccttcctgagggccagaggggagccccaggacccattaagccacccccgtgttcctgccgtcagtgccaactgccgcatgtggaagcatctacccgttcactccagtcccaccccacgcctgactcccctctggaaactgcaggccagatggttgctgccacaacttgtgtaccttcagggatggggctcttactccctcctgaggccagctgctctaatatcgatggtcctgcttgccagagagttcctctacccagcaaaaatgagtgtctcagaagtgtgctcctctggcctcagttctcctcttttggaacaacataaaacaaatttaattttctacgcctctggggatatctgctcagccaatggaaaatctgggttcaaccagcccctgccatttcttaagactttctgctccactcacaggatcctgagctgcacttacctgtgagagtcttcaaacttttaaaccttgccagtcaggacttttgctattgcaaatacaaaacccaactcaacctgcttaagcagaaaataaatttattgattcaaaaaaaaaaaaaaaaaaaaaaaaaaaaaaaaaaaaaaaaaaaaaaaaaa

SEQ ID NO: 25251 - DNA, 1522 bp, Homo Sapiens
gctgaagagaccggttgccgccatgatagaacagcagaagcgtaagggcccagagttgccgctggttccagtcaagcggcagcggcatgagttgctgttgggagcggggtctggcccaggagccgggcagcagcaggcgacgccgggagccttgctgcaagcgggacctccaagatgttcctcccttcaagccccaatcatgctgctctctggacatgaaggggaagtctactgctgcaagttccaccccaacggatccaccttagcatctgcaggatttgaccgactgatattactgtggaatgtctatggtgactgtgataactatgccacactgaagggacacagtggagcagtgatggaattgcattacaacacagatggcagtatgcttttctcagcatccacagataaaaccgtggctgtgtgggatagtgaaacaggtgagagggttaaaaggctaaagggacatacttcctttgtgaattcctgttatccagccaggagaggccctcagcttgtctgcactggcagtgacgatggcacagttaagctttgggacatccggaagaaagcagccatccagacatttcagaacacgtaccaggtgttagctgtgaccttcaatgacacaagtgatcagattatttctggtggaatagacaatgatatcaaggtctgggacctgcgccagaacaagctaacctacaccatgagaggccatgcagattcagtgactggcctgagtttaagttctgaaggctcttatcttttgtccaatgcaatggacaatacagttcgtgtctgggatgtccggccatttgcccccaaagagagatgtgtaaagatatttcaaggaaatgtgcacaactttgaaaagaaccttctgagatgttcttggtcacctgatggaagcaaaatagcagctggctcagccgacaggtttgtttatgtgtgggataccacaagcaggagaatattgtataagctgcccggccatgctggctccatcaatgaagtggctttccaccctgatgagcccatcattatctcagcatcgagtgacaagagactgtatatgggagagattcagtgaagatatggactggaagactccaaggccgcttgtctttgagacctcagactgcataagtgatgccaaatgttggatgtccaggctagcaccctcccttcagatgaccattgctagcaagaaacaggaggcggtggccatattccaaaaaccacttctgtcccatttcaccaggatgactaaggcaagctccctgtggcctctaaaaaccacctgccagatttcagggactgtttttttttttctttttcttttttcctgttttctaatgcaggcccaatgtgacaaatttgttggttgggatttttttttttttttgtaactggcttgtatgatattttctttctgtatttctctatatcattttgtattaaaagccaaatagatgcctttttaaaaaaaaaaaaaaaaaaaaaaaaaaaaaaaaaa

SEQ ID NO: 25252 - DNA, 2196 bp, Homo Sapiens
ggctgatgtacgagcagtaccgcatggacagtgggaacacgcgtgacatgaccctcatccatggctactttggcagcacgcaggggctctctgatgagctggctaagcagctgtggatggtgctgcagaggtcactggtcactgtccgccgtgaccccaccttgctggtctcagttgtcaggatcattgaaagggaagagaaaattgacaggcgcatacttgaccggaaaaagcaaactggctttgttcctcctgggaggcccaagaattggaaggagaaaatgttcaccatcttggagaggactgtgaccaccagaattgagggcacacaggcagataccagagagtctgacaagatgtggcttgtccgccacctggaaattataaggaagtacgtcctggatgacctcattgtcgccaaaaacctgatggttcagtgctttcctccccactatgagatctttaagaacctcctgaacatgtaccaccaagccctgagcacgcggatgcaggacctcgcatcggaagacctggaagccaatgagatcgtgagcctcttgacgtgggtcttaaacacctacacaagtactgagatgatgaggaacgtggagctggccccggaagtggatgtcggcaccctggagccattgctttctccacacgtggtctctgagctgcttgacacgtacatgtccacgctcacttcaaacatcatcgcctggctgcggaaagcgctggagacagacaagaaagactgggtcaaagagacagagccagaagccgaccaggacgggtactaccagaccacactccctgccattgtcttccagatgtttgaacagaatcttcaagttgctgctcagataagtgaagatttgaaaacaaaggtactagttttatgtcttcagcagatgaattctttcctaagcagatataaagatgaagcgcagctgtataaagaagagcacctgaggaatcggcagcaccctcactgctacgttcagtacatgatcgccatcatcaacaactgccagaccttcaaggaatccatagtcagtttaaaaagaaagtatttaaagaatgaagtggaagagggtgtgtctccgagccagcccagcatggacgggattttagacgccatcgcgaaggagggctgcagcggtttgctggaggaggtcttcctggacctggagcaacatctgaatgaattgatgacgaagaagtggctattagggtcaaacgctgtagacattatctgtgtcaccgtggaagactatttcaacgattttgccaaaattaaaaagccgtataagaagaggatgacggccgaggcgcaccggcgcgtggtggtggagtacctgcgggcggtcatgcagaagcgcatttccttccggagcccggaggagcgcaaggagggtgccgagaagatggttagggaggcagagcagctgcgcttcctgttccggaagctggcgtccggtttcggggaagacgtggacggatactgcgacaccatcgtggctgtggccgaagtgatcaagctgacagacccttctctgctctacctggaggtctccactctggtcagcaagtatccagacatcagggatgaccacatcggtgcgctgctggctgtgcgtggggacgccagccgtgacatgaagcagaccatcatggagaccctggagcagggcccagcacaggccagccccagctacgtgcccctcttcaaggacattgtggtgcccagcctgaacgtggccaagctgctcaagtagcctccgccggcctgccctgctcgcccctccacagcctcggtccctgcctttagaaacgcgggacagctgattgctctccttggccacacgtgctccttttagctgcacggcctgtctttaggtgccagtgtgatgcaccgggtgtgcgtcgagtgagcgtcccgaggccacgtgcggaggcccctcactgtgctgtcaaaggcctgtgggtgcagggctctgccgcacagcctctcttgggtgcttgtttgttgcagtggttgaaagtgtgtggggcacagaggacgtgcacctccctgccctcctcctccctgggccttcaccgcaccccatctgcttaagtgctcggaaccccgtcacctaattaaagtttctcggcttcctcagaaaaaaaaaaaaaaaaaaaaaaaaaaaaaaa

SEQ ID NO: 25253 - DNA, 2166 bp, Homo Sapiens
cccaggagtccttcggcggctgttgtgtcagtggcctgatcgcgatggggacaaaggcgcaagtcgagaggaaactgttgtgcctcttcatattggcgatcctgttgtgctccctggcattgggcagtgttacagtgcactcttctgaacctgaagtcagaattcctgagaataatcctgtgaagttgtcctgtgcctactcgggcttttcttctccccgtgtggagtggaagtttgaccaaggagacaccaccagactcgtttgctataataacaagatcacagcttcctatgaggaccgggtgaccttcttgccaactggtatcaccttcaagtccgtgacacgggaagacactgggacatacacttgtatggtctctgaggaaggcggcaacagctatggggaggtcaaggtcaagctcatcgtgcttgtgcctccatccaagcctacagttaacatcccctcctctgccaccattgggaaccgggcagtgctgacatgctcagaacaagatggttccccaccttctgaatacacctggttcaaagatgggatagtgatgcctacgaatcccaaaagcacccgtgccttcagcaactcttcctatgtcctgaatcccacaacaggagagctggtctttgatcccctgtcagcctctgatactggagaatacagctgtgaggcacggaatgggtatgggacacccatgacttcaaatgctgtgcgcatggaagctgtggagcggaatgtgggggtcatcgtggcagccgtccttgtaaccctgattctcctgggaatcttggtttttggcatctggtttgcctatagccgaggccactttgacagaacaaagaaagggacttcgagtaagaaggtgatttacagccagcctagtgcccgaagtgaaggagaattcaaacagacctcgtcattcctggtgtgagcctggtcggctcaccgcctatcatctgcatttgccttactcaggtgctaccggactctggcccctgatgtctgtagtttcacaggatgccttatttgtcttctacaccccacagggccccctacttcttcggatgtgtttttaataatgtcagctatgtgccccatcctccttcatgccctccctccctttcctaccactgctgagtggcctggaacttgtttaaagtgtttattccccatttctttgagggatcaggaaggaatcctgggtatgccattgacttcccttctaagtagacagcaaaaatggcgggggtcgcaggaatctgcactcaactgcccacctggctggcagggatctttgaataggtatcttgagcttggttctgggctctttccttgtgtactgacgaccagggccagctgttctagagcgggaattagaggctagagcggctgaaatggttgtttggtgatgacactggggtccttccatctctggggcccactctcttctgtcttcccatgggaagtgccactgggatccctctgccctgtcctcctgaatacaagctgactgacattgactgtgtctgtggaaaatgggagctcttgttgtggagagcatagtaaattttcagagaacttgaagccaaaaggatttaaaaccgctgctctaaagaaaagaaaactggaggctgggcgcagtggctcacgcctataatcccagaggctgaggcaggcggatcacctgaggtcaggagttcgagatcagcctgaccaacatggagaaaccctactggaaatacaaagttagccaggcatggtggtgcatgcctgtagtcccagctgctcaggagcctggcaacaagagcaaaactccagctcaaaaaaaaaaaagaaagaaaagaaagctggagctggtggcttaggccatcacccttcccttggctggaactactggacagacccttttgagatgtgcctgtggtgctgtggagatgtgtgtagtggtcttagctctttgttgagcttgtgtgtgtgttgtgtagtcttagctgtatgctgaaattgggcgtgtgttggagggcttcttagctctttggtgagattgtatttctatgtgtttgtatcagctgaatgttgctggaaataaaaccttggtttgtcaaggctaaaaaaaaaaaaaaaaaaaaaaaaaaaaaaaaaaaaaaaaaaaa

SEQ ID NO: 25254 - DNA, 2466 bp, Homo Sapiens
cttcccctcgcctctgccaggccccgcgcccctaaaaggtgggaaaaccatggcgaccaatttcagtgacatcgtcaagcaaggctacgtgaagatgaagagcaggaagctcgggatctaccggaggtgctggctggtgttccggaaatcctccagcaaggggccccagcggctggagaagtatccagatgagaagtcggtgtgcctccggggctgccccaaggtgactgagatcagcaacgtcaagtgtgttacgcggctccccaaggagaccaagcggcaggcggtggccatcatattcactgatgactcggcacgtaccttcacctgcgactcagagctagaggcagaggagtggtacaagacactatctgtggagtgtctggggtcccgcctcaacgacatcagtctgggagaacctgacctcctggccccaggggtgcagtgtgaacagacagatcgcttcaatgtcttcctgctgccctgccccaacctggacgtgtatggcgagtgcaagctgcagatcacccacgagaacatctacctctgggacatccacaacccccgtgtgaagctcgtctcgtggcccctctgctcactgcgccgctatggccgggatgccacacgctttaccttcgaggctggccggatgtgtgatgctggggaaggactctataccttccagacacaagagggggagcagatttaccagcgcgtccacagtgccaccctggccatcgcagagcagcacaagcgggtcctgctggaaatggagaagaacgtgaggctgctgaacaagggcacggaacattactcgtatccctgcacacccacgaccatgctgccgcgcagtgcctactggcaccacatcactggttcccagaacatcgccgaagcctccagctatgctggtgaggggtatggggcagcccaggccagctcggaaacagacctcctcaacagattcatcctgctaaagccaaagcccagccagggggacagcagtgaggccaagaccccatcccagtgaccacagtgctggcgagcaccgatgactgctgggggctgcctgctgcggggctggctgcagtgtaccgtggacagcctcagggggctgtcggccaagagcctggagaaagggagcaagctgccccctccttgcccccaaggatgaggctggactgaggcaaagggctggccacaccacctgagcatgtgtgaggggttggagctaccgtgggactatatactgttaatgattttaatatatatggcttatgacatactctgtatcaatgagatcccctcaccctcaccccatccttccccaccaatacacacaaattttttaatcccatgaccaggccacggtcaaggctgtttttgagtatgagtgcagtcgtgtccatcctccatggcacagccctcctgctgccaggacctgcttgaactaccagggccacaggagggggataatcagagcttgaggctggcactctgactgctggcttttcccaaacagcccaagggccggaacagcaggtggcttctcagttcctctgggcctggagtgacacaggaaggatctgcacttcctctgtgctgcttgccagccttgcagttggagttttaagcagaggtgacatctggttgacgcctcaggtgaaaatctggttttaaaatgtaacttctgcacaggctccttcctgctttgtaggctgggaagatgcccctggggtaggggtgctgattacctcagccatgtggaggaaggctggagcttgttcctgccccaggaataggccaggagggaaggccgcagcaggactgccgtggggagcacccctgctgcccccctctcactgaccaggggtggacaatgcccaagcagagggagcccccttgccctgtttggccaccctctggccagccaaaagcactctgaaaccaagaccttcccatttcctcctccccacatggtgctgaggctccctgctgcaatgcaattaaagcaattgattttctagtgctggtatttgttgactaccatgcagaagggctatctttctattcacgtcaaacttttggttgtgtggggttttttgttgttttttgggttttgttttttaatactttagggtcctgatttgtgggaacagaccttcttgtaaataaccactatttgagttgtggcaggaggatgataaagcacgcggcccctcccaaaggagcccttgagctagggaggtggtgcagtcagcctcgctctcaacgtgacccggggaatgaccacccagagggatgagctagcctgtagaggggaactggggtccaaaggtctttggggagggaggcagagctggctggctcagctaagtggcacgatgacgcatgaaggagattatgttgtgctctttattgccaaaaataaacacttttaaaaagacaaaaaaaaaaaaaaaaaaa

SEQ ID NO: 25255 - DNA, 1465 bp, Homo Sapiens
cggagccgaaacaccggtaggagcggggaggtgggtactacacaaccgtctccagccttggtctgagtggactgtcctgcagcgaccatgccccgtaaaggcacccagccctccactgcccggcgcagagaggaagggccgccgccgccgtcccctgacggcgccagcagcgacgcggagcctgagccgccgtccggccgcacggagagcccagccaccgccgcagagactgcaagtgaggaacttgataatagaagtttagaagagattttgaacagcattcctcctcccccgcctccagcaatgaccaatgaagctggagctcctcggcttatgataactcatattgtaaaccagaacttcaaatcctatgctggggagaaaattctgggacctttccataagcgcttttcctgtattatcgggccaaatggcagtggcaaatccaatgttattgattctatgctttttgtgtttggctatcgagcacaaaaaataagatctaaaaaactctcagtattaatacataattctgatgaacacaaggacattcagagttgtacagtagaagttcattttcaaaagataattgataaggaaggggatgattatgaagtcattcctaacagtaatttctatgtatccagaacggcctgcagagataatacttctgtctatcacataagtggaaagaaaaagacatttaaggatgttggaaatcttcttcgaagccatggaattgacttggaccataatagatttttaattttacagggtgaagttgaacaaattgctatgatgaaaccaaaaggccagactgaacacgatgagggtatgcttgaatatttagaagatataattggttgtggacggctaaatgaacctattaaagtcttgtgtcggagagttgaaatattaaatgaacacagaggagagaagttaaacagggtaaagatggtggaaaaggaaaaggatgccttagaaggagagaaaaacatagctatcgaatttcttaccttggaaaatgaaatatttagaaaaaagaatcatgtttgtcaatattatatttatgagttgcagaaacgaattgctgaaatggaaactcaaaaggaaaaaattcatgaagataccaaagaaattaatgagaagagcaatatactatcaaatgaaatgaaagctaagaataaagatgtaaaagatacagaaaagaaactgaataaaattacaaaatttattgaggagaataaagaaaaatttacacagctagatttggaagatgttcaagttagagaaaagttaaaacatgccacgagtaaagccaaaaaactggagaaacaacttcaaaaagataaagaaaaggttgaagaatttaaaagtatacctgccaagagtaacaatatcattaatgaaacaacaaccagaaacaatgccctcgagaaggaaaaagagaaaaaaaaaaaaaaaa

SEQ ID NO: 25256 - DNA, 1598 bp, Homo Sapiens
gatttggatcagattggctgttaggcttcaggtatgggaaacagctctcagatttataaattggaaatcaccaggttacttgccaatatatagtcatattgctgccattgtacttaatttctaaatatataaaatccacatttaaaaattataaaagcaaggacttgggagtgactgatgaatcatgaaattgctgcttttatagatcaaaactacttgaatcatcaggaatttcatatttttcatattgtgtgacaacttataattttgtttcaaattgtgatttcattgattttactaactggaaggaagaagagtaaaattggcatatttaggttttttgtagaagaaagatacaagtgaaaattaggagtggattggagaaattggggggaaatagaagagtacggagaaaggaagagaccagagttctttaaagctcacattttatagtatcactgctacaaactatttaatgaaatgtggcatcgggtgaaaagaggcatttgtttgatccttgaacgaattaatctcacgtacttccctgtttgtggttggagcctttcactggatgtgagctacttgagagcagggtttatgccttcatcagcgtgacccctgtgcctgcagcctcataggtgttaatctgtaattttaaattttgacaaaagcattttcacagccctgccacataagatctagtttttatttctagagtgctgctatgaataattactatagctgctgtccatcttgcccatccattaaggtaccttctcacaaacatttctaatctactggctggagtgcagtggtgcagtctgtagctcactgcagcctcaaactcctaggctcaggcgatcctcttgccctggcctcccatgtagctgcaactataggtgtgtgccactacacctggctaatgtttttagttttttagagatggagtcttgctctgttgcctaggctggtcttgaactcctgggctcagatgatcctcctgtcctcagcctcccaaaatgctgggagccaccaggcaccaggtgtgatctaccacacctgtctaaaaagtatgtatttttaaatttttttgtagagacaggatctcactatgttctccagctggtctcaagctcctggcctcggcctcctaaagtgctgggattacaagtgtgagccactgtgcctagtcactttaattgagatattggcaagtcaactgccatgcagagcccagggcactggttatattcagtaggaaactgaactcagcactcagaattttaaattaaatcaatgatcttcaagtatttgccactttcgagtacagctaattggataatctcaaaccctttagtgaaaatatcttaaatgcattgagaatattttctaattacctgtgtatgctacagtacagacattaattctataaacatgttcataggtcttccccctcgccccgcccgtcttctaagggcattttctgtttctttttagtgagttcatgaatgtttaacggttctggcgcaaagctttcttgcattctgagcataaaaataataaaacccacttatatttgcttgaaaaaaaaaaaaaaa

SEQ ID NO: 25257 - DNA, 1903 bp, Homo Sapiens
ggtcccttctgagagagtggaacactgtacactcatctgaaaactcacaagcacagctccttattcccacctttgccccaaattagcctctatttctccctcttttacaaatcatctactcttcagggttcttattcctaccctccacagctccatgaacttctttcttcttttccatcctttctgttcaggcctgtcctgtcctagtcactcatccttcatgctctattttccttcagctcttatgccagaaccccctccatcgtctacgttatctgcatcacttccaggtccaccctttctttcggggtgtggccttcgacccagagctcctacagaagcagccagtgaactttgtcacggagacacaagctacccagcccagttcagcggagaccatgccctttgacgactttgactgtgatctggagtccttcttgctctaccctatccctgcttgagcctctctactgtaaattggggcccggctgggagcctgaagatctccatccctgcctactcagtatgaccaccttgataatccagtttgtttttattttgtagcctcttaccgttctgctctcctaggctttagaccagagttccaacctggacattctgctactggcagccacagctggccctattccttccctatcatacaacctacctctcaattcaacatgtcagatcagggtggtgaccttttccttttctttacttctccagtgctctttaccctcaggctgtcagccagagctgcttctgcttgtttctctgccatgtttcctttcttgagcaataataatacttcatgggctcccagggtgctattgatgtgtttaataggcttgtcagaagcaatatgaatttttttttttttttttgagacggagtctcgctctgttgcccaggctggagtgcagtggtgcgttctcggctcgctgcaacctccgtctcctgggttggagtggttttcatgcctcagcctcccgagtagctgggattgcgaatgcacaccattatgcccggctgatttttgtattttttggtggagacggggttcaccatgttggccaggctgatctcaagctcctgacctcaagtgatcggcctgccttggcctcccggggtgctggaattacaggtaggtgtgagccactgcaccagaccctttttttttttttttttttttttttttttgagatagggtctcactctcgtcacccaggttggggtgcagtggcgcgatctcagctcactgcaaccttcacaggcatgagcctccacacccagcctgtgaatttttcaaaagtctcaaaagctggcatttcaacccctaaataatgcagctaaaaaatatagtctgggagcttgaggccagtctgcaataaatctaatttttaaaaattgaaaagtgaataaaataatctagtgaggaagaaaatagaaactgaaacatgggtgggttaaatgtcttctctaggtctataattgcaacagttatccaaaataaaacctctttgaaaagcataggatttttaaactgacaatttctcctagtgagcccatgattcagtttctgatgggcaaaccaagagattaagaggcatgcatcaaccttgagatttaaggttatttgggaggccagggtgggcagatcggttgaggtcaggagttcgagaccggcgtggccaacatggtgaaaccttgtgtctgctgaaggaatgcagagattagctgggtgtggtgttgcacgcctgtggtcccagctactcggagggctgaagcaggagaactgcttgaaccctggaggccaaggttgcagtgagccgagattgtgccattgaactcctgggtgacagaggtagactctgtctcggaaaaaaaaaaaaaaaaaaaa

SEQ ID NO: 25258 - DNA, 1818 bp, Homo Sapiens
gtggtgttctatggtaccgagaaagacaaaaattcagtgaattttaaaaatatttacgtcttacaggagctggataatccaggtgcaaaacgaattctagagcttgaccagtttaaggggcagcagggacaaaaacgtttccaagacatgatgggccacggatctgactactcactcagtgaagtgctgtgggtctgtgccaacctctttagtgatgtccaattcaagatgagtcataagaggatcatgctgttcaccaatgaagacaacccccatggcaatgacagtgccaaagccagccgggccaggaccaaagccggtgatctccgagatacaggcatcttccttgacttgatgcacctgaagaaacctgggggctttgacatatccttgttctacagagatatcatcagcatagcagaggatgaggacctcagggttcactttgaggaatccagcaagctagaagacctgttgcggaaggttcgcgccaaggagaccaggaagcgagcactcagcaggttaaagctgaagctcaacaaagatatagtgatctctgtgggcatttataatctggtccagaaggctctcaagcctcctccaataaagctctatcgggaaacaaatgaaccagtgaaaaccaagacccggacctttaatacaagtacaggcggtttgcttctgcctagcgataccaagaggtctcagatctatgggagtcgtcagattatactggagaaagaggaaacagaagagctaaaacggtttgatgatccaggtttgatgctcatgggtttcaagccgttggtactgctgaagaaacaccattacctgaggccctccctgttcgtgtacccagaggagtcgctggtgattgggagctcaaccctgttcagtgctctgctcatcaagtgtctggagaaggaggttgcagcattgtgcagatacacaccccgcaggaacatccctccttattttgtggctttggtgccacaggaagaagagttggatgaccagaaaattcaggtgactcctccaggcttccagctggtctttttaccctttgctgatgataaaaggaagatgccctttactgaaaaaatcatggcaactccagagcaggtgggcaagatgaaggctatcgttgagaagcttcgcttcacatacagaagtgacagctttgagaaccccgtgctgcagcagcacttcaggaacctggaggccttggccttggatttgatggagccggaacaagcagtggacctgacattgcccaaggttgaagcaatgaataaaagactgggctccttggtggatgagtttaaggagcttgtttacccaccagattacaatcctgaagggaaagttaccaagagaaaacacgataatgaaggttctggaagcaaaaggcccaaggtggagtattcagaagaggagctgaagacccacatcagcaagggtacgctgggcaagttcactgtgcccatgctgaaagaggcctgccgggcttacgggctgaagagtgggctgaagaagcaggagctgctggaagccctcaccaagcacttccaggactgaccagaggccgcgcgtccagctgcccttccgcagtgtggccaggctgcctggccttgtcctcagccagttaaaatgtgtttctcctgagctaggaagagtctacccgacataagtcgagggactttatgtttttgaggctttctgttgccatggtgatggtgtagccctcccactttgctgttccttactttactgcctgaataaagagccctaagtttgtactataaaaaaaaaaaaaaa

SEQ ID NO: 25259 - DNA, 2756 bp, Homo Sapiens
gaaagggagtgttcgggtttcgctggggcctcgcggctccagagcccagcatggcttcctcgcgagcctcttccacgcaggcaaccaaaactaaagcacccgacgacttagttgctccggtcgtgaagaaaccacacatctattatggaagtttggaagagaaggagagggagcgtctggccaaaggagagtctgggattttggggaaagacggacttaaagcagggatcgaagctggaaatattaatataacctctggagaagtgtttgaaattgaagagcatatcagcgagcgacaggcagaagtattggctgagtttgagagaaggaagcgagcccggcagatcaatgtttccacagatgactcagaggtcaaagcttgccttagagccttgggggaacccatcacactttttggagagggtcctgctgaaagaagagaaaggttaagaaatatcctctcagttgtcggtactgatgccttgaaaaagaccaaaaaggatgatgagaagtctaaaaagtccaaagaagagtatcagcaaacctggtatcatgaaggaccaaatagcttgaaggtggcaagactatggattgctaattattcgttgcccagggcaatgaaacgcttggaagaggcccgactccataaggagattcctgagacaacaaggacctcccagatgcaagagctgcacaagtctctccggtctttgaataatttttgcagtcagattggggatgatcggcctatctcctactgtcactttagtcccaattccaagatgctggccacagcttgttggagtgggctttgcaagctctggtctgttcctgattgcaacctccttcacactcttcgagggcataacacaaatgtaggagcaattgtattccatcccaaatccactgtctccttggacccaaaagatgtcaacctggcctcttgtgcggctgatggctctgtgaagctttggagtctcgacagtgatgaaccagtggcagatattgaaggccatacagtgcgtgtggcgcgggtaatgtggcatccttcaggacgtttcctgggcaccacctgctatgaccgttcatggcgcttatgggatttggaggctcaagaggagatcctgcatcaggaaggccatagcatgggtgtgtatgacattgccttccatcaagatggctctttggctggcactgggggactggatgcatttggtcgagtttgggacctacgcacaggacgttgtatcatgttcttagaaggccacctgaaagaaatctatggaataaatttctcccccaatggctatcacattgcaaccggcagtggtgacaacacctgcaaagtgtgggacctccgacagcggcgttgcgtctacaccatccctgctcatcagaacttagtgactggtgtcaagtttgagcctatccatgggaacttcttgcttactggtgcctatgataacacagccaagatctggacgcacccaggctggtccccgctgaagactctggctggccacgaaggcaaagtgatgggcctagatatttcttccgatgggcagctcatagccacttgctcatatgacaggaccttcaagctgtggatggctgaatagatgacaatgggaaaaggacttgaacctcaagctctctctaaggagctgttttcctcaaacgagaagaattgaagtgtttagttctatcatgttttctgccaattaccatgcatagaccctcagtagaattggatttccatgtcagcccccactccaggaaggcagcccaatccctaggtgatggggaacccctctcacggttgaaaatttattacctttttacgccctgccacgaactgtgtagacattgtttttattaatcttttgtttggccgggcgtggtggctcacgcctgtaatcctagcactttgggaggccgaggtgggtagatcgcttgagctcaggagttcaagacgagcctgggcaacatggcaaatgccgtctctgcaaaaaaatactaaaattagctggtcgcggtggcttctgcctgtgattccggctacttgggaggctgaggtgggagggattgcttaagcctgggaggcagaggttgcagtgagccgagattgcgccattgcactctagcctgtgtgacagagcaagaccctgtctcaaaaaaaaaaaaaatttgttcgaatgccttatagccttcctcacagcacccaggattgtgactgactctgcatttttaattcttgaaacttggctttccataacatggtacatgcttcaggactacatatgacccagagagcaaggtggctgaactatagtctggaagccctcaggtaaagaggcacatctcaccactcattggttaaacaatgcatcatagcgagcacttttcctttccctggagaatgggatgtgaagcagtagaccgcagccacgccgatggttatacagtgaagaagacttcacctcttcctattgagtttgcttggaatgctgacagcatcaggcaactctgaactgaacatttgctttgtcagaaaatatctttttttttactttgaagtttggcaaccttcatgttaccccaaagcaaaaccattgtgtcaggagtcaaacaaatgtttagaaagcaaacatgacgtctctattgtacaacctcctttctcttggctgtttaaaggatgtacttcgtgtattaaagggtactttatgttgaagtaaaaaaaaaaaaaaaaaaaaaaa

SEQ ID NO: 25260 - DNA, 1874 bp, Homo Sapiens
gccttgtcgagctgagtccgcgctcccgcccaggcggcggccgacgcgacgccccgagcgcccggccccgccgccgcggcccggcagactgcctctgtcaccgggtccctccacccttgtctcctgtgcggccagcatcagagccatggcgacggaggagaagaagcccgagaccgaggccgccagagcacagccaaccccttcgtcatccgccactcagagcaagcctacacctgtgaagccaaactatgctctaaagttcacccttgctggccacaccaaagcagtgtcctccgtgaaattcagcccgaatggagagtggctggcaagttcatctgctgataaacttattaaaatttggggcgcgtatgatgggaaatttgagaaaaccatatctggtcacaagctgggaatatccgatgtagcctggtcgtcagattctaaccttcttgtttctgcctcagatgacaaaaccttgaagatatgggacgtgagctcgggcaagtgtctgaaaaccctgaagggacacagtaattatgtcttttgctgcaacttcaatccccagtccaaccttattgtctcaggatcctttgacgaaagcgtgaggatatgggatgtgaaaacagggaagtgcctcaagactttgccagctcactcggatccagtctcggccgttcattttaatcgtgatggatccttgatagtttcaagtagctatgatggtctctgtcgcatctgggacaccgcctcgggccagtgcctgaagacgctcatcgatgacgacaacccccccgtgtcttttgtgaagttctccccgaacggcaaatacatcctggccgccacgctggacaacactctgaagctctgggactacagcaaggggaagtgcctgaagacgtacactggccacaagaatgagaaatactgcatatttgccaatttctctgttactggtgggaagtggattgtgtctggctcagaggataaccttgtttacatctggaaccttcagacgaaagagattgtacagaaactacaaggccacacagatgtcgtgatctcaacagcttgtcacccaacagaaaacatcatcgcctctgctgcgctagaaaatgacaaaacaattaaactgtggaagagtgactgctaagtccctttgctcctgcccgcaagagactgtcgggaagttgacccggattggcaagaaacagggtgtcttggaggtggtcccccagatctgcgcctgggggtcaggacagggcctgatttgagcctcctctctgaagatgatttggccgagcggaaggtgtggaccaccagaaagttcttaaaagttgctggtgacatttcttgccaattctaacactgtctagggaagagttcctagtctattgtgttcaaacagagtcaacaaaagtttttaattttttattacagaagggtgaagttcaatttaacatgcgttgtgttttttcagtaaacgttctgtatctttttgatattccatgacccagtgcacgctgtggcctgtcaccgccaccgtggccccgccagctggcctcccctttggcccacgccggccgcccccattctctgctgcgtagatgccctggcccagggccctgactcctccattcccgccagtagctgttcctagtgtattttcgtctttctggaaaacagcattgagtggttgttttctgtgtaaagagccgtttgtgtcttgggagtttgtggcccacatgccgatagcacggtcatcgcacatgactctcccgtttgtctcagtgtccctgcaacaagcagcaccgcagactgtaataaaaggtggggttttgtgaaaaaaaaaaaaaaaaaaaaaaaaaaaaaaaaaa

SEQ ID NO: 25261 - DNA, 2106 bp, Homo Sapiens
cctgtttgcggtgatctccaggcacagcctcagtgctggcttggtgggcctctcagtgtcttactcattgcaggtcaccacgtacttgaactggctggttcggatgtcatctgaaatggaaaccaacatcgtggccgtggagaggctcaaggagtattcagagactgagaaggaggcgccctggcaaatccaggagacagctccgcccagcagctggccccaggtgggccgagtggaattccggaactactgcctgcgctaccgagaggacctggacttcgttctcaggcacatcaatgtcacgatcaatgggggagaaaaggtcggcatcgtggggcggacgggagctgggaagtcgtccctgaccctgggcttatttcggatcaacgagtctgccgaaggagagatcatcatcgatggcatcaacatcgccaagatcggcctgcacgacctccgcttcaagatcaccatcatcccccaggaccctgttttgttttcgggttccctccgaatgaacctggacccattcagccagtactcggatgaagaagtctggacgtccctggagctggcccacctgaaggacttcgtgtcagcccttcctgacaagctagaccatgaatgtgcagaaggcggggagaacctcagtgtcgggcagcgccagcttgtgtgcctagcccgggccctgctgaggaagacgaagatccttgtgttggatgaggccacggcagccgtggacctggaaacggacgacctcatccagtccaccatccggacacagttcgaggactgcaccgtcctcaccatcgcccaccggctcaacaccatcatggactacacaagggtgatcgtcttggacaaaggagaaatccaggagtacggcgccccatcggacctcctgcagcagagaggtcttttctacagcatggccaaagacgccggcttggtgtgagccccagagctggcatatctggtcagaactgcagggcctatatgccagcgcccagggaggagtcagtacccctggtaaaccaagcctcccacactgaaaccaaaacataaaaaccaaacccagacaaccaaaacatattcaaagcagcagccaccgccatccggtcccctgcctggaactggctgtgaagacccaggagagacagagatgcgaaccacccaaaacacgcacaccctgcccctggtgccctgagacagacacacagcctcacgcccccaggaatgcaagtggtttcctggtgcttcccacggaggagttttggcagccagacttctggaggaattggttgtatagaagatcctagtgaccaaattcagcctactgcctcggatctctccagccgaagtctgtggactgcaagtctttgagatgcttctggctcccatcacctctaacatccttgtctgggtctaccaggaacgcttcatttccttggggctgcagttttgtggttgaggggcctggagaaaatcattttctccccttggcagtgtcccagggccctggatggtcctcttaccaacatctggtcttccaggcactcaaaagctgggaaccagcatctcagcgccagctctaccagttctcgttttgggccagaggcagcctctgcactcccacgcctgtcctcctggaagggacctggttggactaacggctaacctggacctggaactgtagggccaggggattgtctcagggccgacgttccacctggggcttccctccccacccacccccactccaggctttcccttttttcttttgttcaacattgtaagaacaatcaatgctgttattactgttcccaccatgattgatgtggggtaaatattaaggagatggcctcatgggaatttgaccttgactagaaatagagactgagagtgagcaaccagctggaaggtactatgccagtcctagcagaaaaatgtgttaggggcctggcccaaagcagtgttggttgcttacagtgttgattgattttgttcttttttcttaccacctcttttctttccctctcatggtacctgctcatggttatgaagctttcaaagtaaagaacacgaaataccaaaaaaaaaaaaaaaaaa

SEQ ID NO: 25262 - DNA, 1620 bp, Homo Sapiens
gagcagtggcgtttggaggagactcggatataccttctcagaagctgcacaggaggaaagcagtgacaaagaaagaagttgtcattctttgcacgaaactggatggcttctacagggagccaggcctctgatatagacgagatttttggattcttcaacgatggcgaacctcccaccaaaaagcccaggaagctgcttccaagcttaaaaactaagaagcctcgagaacttgtgctagtgattggaacaggcattagtgctgcagttgcgccccaagttccagccctcaaatcctggaaggggttaattcaggccttactggatgctgccattgattttgatcttttagaagatgaggagagcaaaaagtttcagaaatgtctccatgaagacaagaacctggtccatgttgcccatgaccttatccagaaactctctcctcgtaccagtaatgttcgatccacatttttcaaggactgtttatatgaagtatttgatgacttggagtcaaagatggaagattctggaaaacagctacttcagtcagttctccacctgatggaaaatggagccctcgtattaactacaaattttgataatctcttggaactgtatgcagcagatcaggggaaacagcttgaatcccttgaccttactgatgagaaaaaggtcctcgagtgggctcaggagaagcgtaagctgagcgtgttgcatattcacggagtctacaccaaccctagtggcattgtccttcatccggctggatatcagaacgtgctcaggaacactgaagtcatgagagaaattcagaaactctacgaaaacaagtcatttcttttcctgggctgtggctggactgtggatgacaccactttccaggcccttttcttggaggctgtcaagcataaatctgacctagaacatttcatgctggttcggagaggagacgtagatgagttcaaaaagcttcgagaaaacatgctggacaaggggattaaagtcatctcctatggagatgactatgccgatcttccagaatatttcaagcgactgacatgtgagatctccacaaggggtacatcagcagggatggtgagagaaggtcagctaaatggctcatctgcagcacacagtgaaataagaggctgtagtacatgagcgagctagagaaatcaccaccgtttagaccaagctgtaaggccctactacagacagtgtttaacaagtaaacttacaagaacccaacacaattcccagaaagtaacaatagccagaggttgaagggcggggtagaagaggggggaatgttgcagcgtaatccttcataccacctggttcttgatattctgccgcctgttcaagttcaagaataaaagcgacagcaggacccaaatgcagctcccaacccactccccaggctagacatgcttgtgtccacacagcacaccaatgtgatacttccactgaccggctgcagctctgcatgaaggactcggggtctggatgccatggaatcactgtggctcttgttgcagttttgtactctatacttggtttttcaattaagcttaatggcttttttaaaacatgaaaaaaaaaaaaaaaaaaaaaaaaaaaaaa

SEQ ID NO: 25263 - DNA, 2403 bp, Homo Sapiens
agccgctctgcgccccgcgccctgcttgcccccattatccagccttgccccggcgccctgacctgacgccctggcctgacgccctgcttcgtcgcctcctttctctcccaggtgctggaccagggactgagcgtcccccggagagggtccggtgtgaccccgacaagaagcagaaatggggaagaaactggatctttccaagctcactgatgaagaggcccagcatgtcttggaagttgttcaacgagattttgacctccgaaggaaagaagaggaacggctagaggcgttgaagggcaagattaagaaggaaagctccaagagggagctgctttccgacactgcccatctgaacgagacccactgcgcccgctgcctgcagccctaccagctgcttgtgaatagcaaaaggcagtgcctggaatgtggcctcttcacctgcaaaagctgtggccgcgtccacccggaggagcagggctggatctgtgacccctgccatctggccagagtcgtgaagatcggctcactggagtggtactatgagcatgtgaaagcccgcttcaagaggttcggaagtgccaaggtcatccggtccctccacgggcggctgcagggtggagctgggcctgaactgatatctgaagagagaagtggagacagcgaccagacagatgaggatggagaacctggctcagaggcccaggcccaggcccagccctttggcagcaaaaaaaagcgcctcctctccgtccacgacttcgacttcgagggagactcagatgactccactcagcctcaaggtcactccctgcacctgtcctcagtccctgaggccagggacagcccacagtccctcacagatgagtcctgctcagagaaggcagcccctcacaaggctgagggcctggaggaggctgatactggggcctctgggtgccactcccatccggaagagcagccgaccagcatctcaccttccagacacggcgccctggctgagctctgcccgcctggaggctcccacaggatggccctggggactgctgctgcactcgggtcgaatgtcatcaggaatgagcagctgcccctgcagtacttggccgatgtggacacctctgatgaggaaagcatccgggctcacgtgatggcctcccaccattccaagcggagaggccgggcgtcttctgagagtcagatctttgagctgaataagcatatttcagctgtggaatgcctgctgacctacctggagaacacagttgtgcctcccttggccaagggtctaggtgctggagtgcgcacggaggccgatgtagaggaggaggccctgaggaggaagctggaggagctgaccagcaacgtcagtgaccaggagacctcgtccgaggaggaggaagccaaggacgaaaaggcagagcccaacagggacaaatcagttgggcctctcccccaggcggacccggaggtgggcacggctgcccatcaaaccaacagacaggaaaaaagcccccaggaccctggggaccccgtccagtacaacaggaccacagatgaggagctgtcagagctggaggacagagtggcagtgacggcctcagaagtccagcaggcagagagcgaggtttcagacattgaatccaggattgcagccctgagggccgcagggctcacggtgaagccctcgggaaagccccggaggaagtcaaacctcccgatatttctccctcgagtggctgggaaacttggcaagagaccagaggacccaaatgcagacccttcaagtgaggccaaggcaatggctgtgccctatcttctgagaagaaagttcagtaattccctgaaaagtcaaggtaaagatgatgattcttttgatcggaaatcagtgtaccgaggctcgctgacacagagaaaccccaacgcgaggaaaggaatggccagccacaccttcgcgaaacctgtggtggcccaccagtcctaacgggacaggacagagagacagagcagccctgcactgttttccctccaccacagccatcctgtccctcattggctctgtgctttccactatacacagtcaccgtcccaatgagaaacaagaaggagcaccctccacatggactcccacctgcaagtggacagcgacattcagtcctgcactgctcacctgggtttactgatgactcctggctgccccaccatcctctctgatctgtgagaaacagctaagctgctgtgacttccctttaggacaatgttgtgtaaatctttgaaggacacaccgaagacctttatactgtgatcttttacccctttcactcttggctttcttatgttgctttcatgaatggaatggaaaaaagatgactcagttaaggcaccaaaaaaaaaaaaaaaaaaaaaaaa

SEQ ID NO: 25264 - DNA, 2793 bp, Homo Sapiens
caatctgaggagcaggaggaccggggcgccggtgtcctgccgcctccttctccttgctctcacctgcgcctattagtccacgcgccttcaaggccaggggctacagcccagacagagaggggacagcagagggagagagagcacctgaggatacagagctggcactggactgccttttcaccccccaggtgatgagtgaggttcgaagaacggaagatttaaaaagcagccggggcctccgtattgaatgaaagacccagtgcaaagacatcaccatgaacactagcattccttatcagcagaatccttacaatccacggggcagctccaatgtcatccagtgctaccgctgtggagacacctgcaaaggggaagtggtccgcgtgcacaacaaccacttccacatcagatgcttcacctgtcaagtatgtggctgtggcctggcccagtcaggcttcttcttcaagaaccaggagtacatctgcacccaggactaccagcaactctatggcacccgctgtgacagctgccgggacttcatcacaggcgaagtcatctcggccctgggccgcacttaccaccccaagtgcttcgtgtgcagcttgtgcaggaagcctttccccattggagacaaggtgaccttcagcggtaaagaatgtgtgtgccaaacgtgctcccagtccatggccagcagtaagcccatcaagattcgtggaccaagccactgtgccgggtgcaaggaggagatcaagcacggccagtcactcctggctctggacaagcagtggcacgtcagctgcttcaagtgccagacctgcagcgtcatcctcaccggggagtatatcagcaaggatggtgttccatactgtgagtccgactaccatgcccagtttggcattaaatgtgagacttgtgaccgatacatcagtggcagagtcttggaggcaggagggaagcactaccacccaacctgtgccaggtgtgtacgctgccaccagatgttcaccgaaggagaggaaatgtacctcacaggttccgaggtttggcaccccatctgcaaacaggcagcccgggcagagaagaagttaaagcatagacggacatctgaaacctccatctcaccccctggatccagcattgggtcacccaaccgagtcatctgcgacatctacgagaacctggacctccggcagagacgggcctccagcccggggtacatagactcccccacctacagccggcagggcatgtcccccaccttctcccgctcacctcaccactactaccgctctggtgatttgtctacagcaaccaagagcaaaacaagtgaagacatcagccagacctccaagtacagtcccatctactcgccagacccctactatgcttcggagtctgagtactggacctaccatgggtcccccaaagtgccccgagccagaaggttctcgtctggaggagaggaggatgattttgaccgcagcatgcacaagctccaaagtggaattggccggctgattctgaaggaagaaatgaaggcccggtcgagctcctatgcagatccctggacccctccccggagctccaccagcagccgggaagccctgcacacagctggctatgagatgtccctcaatggctcccctcggtcgcactacctggctgacagtgatcctctcatctccaaatctgcctccctgcctgcctaccgaagaaatgggctgcacaggacacccagcgcagacctcttccactacgacagcatgaacgcagtcaactggggcatgcgagagtacaagatctacccttatgaactgctgctggtgactacaagaggaagaaaccgactgcccaaggatgtagacaggacccgtttagagggaaacttttggaagagtggctgcttatgagattccaaaatgaagtgttggccaacaccgctcatggccatcctggattttcccagtggcttcccttcctgctcgcctccctgaacaggggagaaagcttaacctctcttctcctctccaaacctttcaccttgaatgggtaatgtttggtgggggctgttccttcttggagaagccttgagtcggaccattttgagatcatggaggaaggatgaagaagtgaaaatgacaataatgactctcaagaggctggcgatgtgacatggcaaatgtagaactgacttaaattgaacaaaccctcactgagcacctctgatgttgagcacctgctgaatactgagcactgaatgggggagggggaggggagcacggggtgagtcaacctgggactcggtctcagggatatgcctaccaatagcgggtatcgtaaggcatgtacccaaacataacggatgtaaggcagaaagtgatcggagaaggaatgagaaagtgtgcgtgatgttaatgaaaagtcatatgcagctagagcagacccaggaaagctttctggaagagattgcatctgaggaaattcaggaaggatctttgtagattggggggagattctaaattgaaggggtgatggggtgaggggccagagggaagtctgctgtgttctcatgtaggatgtcagccctccctgcaacttctctttttggccaatgtcttttcactttcctgaccctttagaatcatccccagccagacgcaatcatggaagttgccttattgtcactggttaagaacttggcgagattgaagggcttttgttattgttgttggatatttttgtttcccataaaagcacatcatttcaaccctaaaaaaaaaaaaaaaaaaaaaa

SEQ ID NO: 25265 - DNA, 2206 bp, Homo Sapiens
ggcgacggagcctggctgtgggcccatctttggaaaaaagatctgggaatgattgtctagcctccagcctcaacttacttgatgcttgagagactcaaagccccgtggtcagctgccctgcaaagaaagtattttgaccttggcatttggacagctcccatctctcccatggccctgacaatgctgaatgggctcctgattaaggactcaagcccacctatgctgctgcaccaggttaacaagactgcccagttagataccttcaactaccagagctgctttatgcaaagtgtctttgaccatttccctgagatcttatttatccaccggacctataacccaaggggtaaggtcttatataccttcctggtggatggacctcgggtgcagctggagggtcatcttgcccgagcagtctactttgccatccctgccaaggaggacactgaaggcctggcccagatgttccaagtattcaagaagtttaatccagcatgggagagagtctgtaccatcctggtggatcctcatttccttccactgcctatcctagctatggagttccccacagctgaggtccttctctcagccttccacatttgtaagttcctccaggccaagttctatcagctgtcccttgaacggcccgtggaaaggctgctcctgacctccctgcagagcacaatgtgctcagccacagcaggcaacctgagaaagttgtatacactcctgagcaactgcatccctccagccaagctgcccgagcttcactcacactggctgctcaacgaccgcatctggctggctcaccgctggagaagccgagctgagagcagccactacttccagagcctcgaggtcaccacccacatcctcagccagttctttggtaccaccccatctgagaaacaaggtatggcttctctgttccgttacatgcagcagaactctgcagacaaggcaaacttcaaccagggcctgtgtgcccagaacaatcatgctccctcagacaccatccccgaaagccccaaactggagcagctggtagaatcccacatccagcactccctcaatgccatctgcacagggccagcagcccaactgtgcctgggcgagcttgctgtggtccagaaatccacacacctcattggctctggctcagaaaagatgaacatacagatcctggaagatacccataaggtgcagccccagccccctgccagctgcagctgctactttaaccaggccttccacctgccctgccgccacatcctagccatgctcagtgcccgccgccaggtgctccagcccgacatgctgccggctcagtggacggcaggctgtgctaccagtctagacagcatcctgggcagcaagtggagtgagaccctggataagcacctggcagtgactcacctcaccgaggaggtgggtcagctgttgcagcactgcaccaaggaggagtttgagcggaggtatagcaccctgcgggaactggccgacagctggattgggccttatgagcaggtccaactctgattattctcgatgcccagagatgctcatgcacctgtgcacactcacatccacccatacacacacacacacacacacacacacacacacacacactcccttacactgttgtacttccgtgggccctccttccagaacaaggacaacaaggacaaggttgaagggtcttctcatctaccatggcctgctacctagcatgtgtctagctcaatgagacaggagtcagcaaatcttaatctgtttagtttactcaggtggccacatacagtctctgttgtatattcttggttttgttttaatattttttttctttttttttttttttttttttttgagagggagtctgtctccagcctgggagggtgagactccatctaaaaaaaataaaataaatggcaacccctggtctaagataagagataaaacatcaggtggtgaggttgaggtttggggcttggtagcagttgccccagtcatgagatgactcacttaacccgtctcctttaagtgagctgggctgggaggcttcctacaggggaagaggcccctctggggagctgactcagccaggctccctgaacttttttccttgtcccatcctggggtcaataaaactgaatgttgcatattctaaaaaaaaaaaaaaaaaaaaaaaaaaaaaaaaaaaaaa

SEQ ID NO: 25266 - DNA, 3949 bp, Homo Sapiens
gtggagggtcccggccgggagccgcggaaagagtagggctccccagacaacggggtccgacgagcagttgggcacgggctgagtccgcctgccggcagaatgtccctggctgcttattgcgtcatctgttgcagaagaataggaacctctacttccccaccaaaaagtggcacacactggagagatatcagaaatataataaagtttactggatcacttattttaggaggttctttatttcttacatatgaagttctggccctgaagaaggctgtgacattagatactcaagtggtagaacgagaaaaaatgaagtcatatatatatgtgcacacagtttctttagataaaggagaaaatcatggtattgcctggcaggcaagaaaagaacttcacaaagcagtaagaaaagtattggcaacatcagccaagatactgcggaatccatttgctgatccttttagtacagttgatatagaagatcatgagtgtgctgtgtggctgctcctacggaagagcaagtcagatgacaaaaccacgcgactcgaggctgtgcgggaaatgtcggagacccatcactggcatgattaccagtataggataattgctcaagcctgtgatccgaaaactcttattggtttggcacgaagcgaagagagtgatcttcgcttttttctcctaccacctcctttgccatctttaaaagaagattcttccactgaagaagagctcagacagttgctggcttccttacctcaaacagagctagatgagtgtatccagtattttacatctttggctcttagtgaaagcagtcagagtctagctgctcagaagggtggtttatggtgttttggaggaaatggacttccttatgctgaaagttttggagaagttccttcagcaacagtggaaatgttctgtttagaagctatagtaaaacattctgagatatccacacattgtgataaaatcgaagcaaatggaggcctgcagctacttcagaggctgtaccgacttcacaaggactgccctaaagtacagagaaatataatgcgtgtcattggaaatatggctttgaatgaacatcttcattcttctatagttcgctcaggctgggtttccatcatggcagaagcaatgaaatctccccacattatggagtcctcacacgctgccagaatcctggcaaatctagaccgagaaactgtgcaagaaaaatatcaggatggcgtatatgtgctgcatccccaatatcgaacaagtcagcccattaaagcagatgtcctttttattcatggccttatgggagcagcattcaaaacatggcgccagcaggacagtgagcaggctgtaattgaaaaacctatggaggatgaagacagatatacgacgtgctggcccaagacatggttagcaaaagactgtcctgctctccgaattatatctgtggagtatgacaccagcctcagcgactggagagcaaggtgccctatggaaagaaagtccattgcattcagaagcaacgaacttcttaggaagctcagagctgctggtgttggggataggccagtggtttggatatcacatagcatgggaggtcttcttgtcaaaaagatgctgttggaagcctctacgaagccagaaatgagtactgttatcaacaataccagaggaataattttttatagtgtccctcatcatggatcacgtttggctgaatacactgttaatattcgctatcttctcttcccctcgttggaagtcaaagaactcagcaaggattctcctgcacttaaaacactacaagatgactttctggagtttgctaaagacaaaaacttccaggtgctgaattttgtggaaacactaccaacctacattggcagcatgattaagctccatgtggtacctgtggaatcagcagatttaggcattggagatctaattcctgtggatgttaaccatttgaacatttgtaagccaaagaaaaaggatgcttttttgtaccagcgtactttacaattcattcgtgaagctttagccaaagaccttgaaaactaacagttgtgctcttccagttttcatatgtgaattcagtgcaagaaacttggtgttctgtttcttcttttaagctctatgcaatcatgcaaacatagtgatcatagcgtcaacatggtctggagtgtgttgcagactacagaacattgttctcccttcaagcgctgtaaagcaccaacccggaagtggcaggcacagaaggaagggctggattgggcccctttggtgtaaagaagtccctgtgtgctgctttatggttcgcagtgttgggcttggtgactggagcaaagctgctgtgagagagtgtcctttcccatctgtgactttcctggtgcatccaggaggggcacggcaggttctgaggtaactcaacttaccataaaaatgccattaagagagtacctaaaatggagagaagaatgaactagaacattcaagactcttttacttctgggtattgatttgctgtacatttttaaagtttgagtttttagctcagttctaccttttatctgacacattattactagtgttaactttgttagacttattgtcatgtctgggtcagttccttgtatctattttcgtattcctgagaacaaatctttttcttagaaaaattctagcttataataattcttttcagactgtagctgcctatgcttggaatttgtcctagataaggataaagtagctaatccattattgatcacagtatgaagtaaaactattctaagccattatatgaattagcaattcttagtatcaagattctcagattctctttggctaaataaacctttcttcttccttgctcatttgcaagtggtattaattgacctctatagcatgtgagtagtagataatcatgtcgatgacctttttttctttagagtaacagcattattgagatataatttacataccataagattcacccttttaaattatacaattcatttttgttttgttttgtttgtttagagacagggtctgactctgttgcccaagctggagtgcagtggcatgatcatagctcattgtaacctcaaactcctgggctcaagagatccttttgcttcagcctcccaagcagctaggactacaggcacatgccaccacacttgggtaattaaaaaataaataaatacttttttgtagagacagggtctcactgtgttgcccaggtctcaaactcccgatctcaagccaccctcccaaaatgctgtgattataggccagagccattgttcccaggctcaattcattggtttttagtatagttcactgagttgtgcaacatcattgctatttaatttcaggctatttcatcatccccaaaagaaccccatacccatgagcagtcagttcccacctctgctttcccaagcctgcggtaaacactaatctgttttctgtctctatggatttgggaattttatgtaaatggaatcatacaatatgtggccctctctgccttcttccttctattagcatgttttcaaggttcattcatgatatagcatgtatcagtactacttcatttctttttatggccgaaattactccattgtatgatatgccatgtttctttatccattcatcagctgatggacatctaggttctgttcatttttgtctatgataaataatgctaccatgatcatttgtgtacaaatttatgtgtggatagatgtttttgattctcttgggtggaattgctggtcaaatggtaagtctatgtttaaattttgaagatggtgaacttttgtagaatgagatagtcgaagctaaaactggagtatggcatctgaaggtaaatggctcatcaataaactcgatatcaacaattaaaaaaaaaaaaaaaaaaaaaaaaaaaaaaaaaaaa

SEQ ID NO: 25267 - DNA, 3140 bp, Homo Sapiens
gtagacgtggcgggcggacccgggggcgccctccggacgcggcaggcatcagtgtttttctgaccgaagttctcatttcctgacaatggaaatggaacaagaaaaaatgaccatgaataaggaattgagtccagacgcggctgcttactgctgctcggcctgccacggcgatgagacctggagttacaaccaccccatccggggccgggccaagtctcgcagcctgtctgcctcgcccgccctggggagcaccaaggagttcaggaggacacgctctcttcatgggccatgcccggtgaccacttttggaccaaaggcctgtgtgctgcagaacccccagaccatcatgcacattcaggaccccgcgagccagcggctgacgtggaacaagtccccaaagagcgtccttgtcatcaagaagatgagagatgccagcctactgcagccgttcaaggagctctgcacgcacctcatggaggagaacatgatcgtgtatgtggaaaagaaagtgctagaagaccctgccatcgccagcgatgaaagctttggggcagtgaagaagaaattctgtacctttcgagaagattatgatgacatttccaatcagatagacttcatcatctgcctggggggagacgggacgctgctgtacgcttcctcgcttttccagggcagcgtccctccggtcatggccttccacctgggctccctgggcttcctgaccccattcagctttgagaactttcagtcccaagttactcaggtgatagaggggaacgcagctgttgttctccggagtcggctgaaggtcagggtggtgaaggagctccgggggaagaagacggccgtgcacaatgggctgggtgagaaaggctcgcaggctgcaggcctggacatggatgtcgggaagcaggccatgcagtaccaggtcctgaatgaggtggtgattgacagaggcccctcctcctacctgtccaatgtggatgtctacctggacggacacctcatcaccacggtgcagggcgacggagtgatcgtgtccaccccgacgggcagcacggcgtatgcggccgcggccggggcctccatgatccaccccaacgtgccggccatcatgatcacgcccatctgcccccactcgctgtccttccggcccatcgtggtccccgcaggggtcgagctgaagatcatgctgtcacctgaagcaaggaacacagcatgggtgtcctttgatggacggaagagacaagagatccgccatggagacagcatcagcatcactacctcatgctacccgctcccctccatctgtgtgcgggaccccgtgagcgactggtttgagagcctcgcccagtgcctgcattggaacgtccggaagaagcaagcccacttcgaggaggaggaggaggaggaggaggagggctaggtcaagcccctatccaggcccgaatccttccgctgccctccaagcgccctctggggacagaccaatctgcgtgtgtctgtgaccgcctgtctcagtggcacggccacttcctttctgtagctgggttagagcctgggtctgccttttgtccagatcagctgtttttttaaaatgtctgactttttttgcatttctaaagaagcgtgagaaatgggctgggagtgcttctgtcctgctgacaccccgcggtgggtccctggagcgcggcctccagctgccgcaatttccatgccaggatatttttccgcaaatcagtcggttgaaattcagaggagtcagaatgactcgacctgtccttcaatgttgataataaatgtctcagccaaaaaccttccttgagctgccatgcttttccccttgacctgcacctcttcccctaaaacttctgcagggaagcccctggcggaggcgccattgaaagcatggtcttgccagtggctggcaaggcggttttgttctgctcagtttctggagagggttggatgcgtcccctgccatccagccctccccgcttgaggccagcactgagtctgggacactcagcgggaagggggctggcatcgccagcgacccacacattcctcacgtagcttctgctcccaggaaggtagtttaaatcctgtatatactttttagagactcttttaaactttctgaagtgctgatgtacatactttctcgtacacacttttgtgaagatttcaaggggaagggagttgtctgccattcaatgtttacatttatgttctgcaagacgctgtcctcagggaccattaggggaccattctgttcagtgcgaccctgatggtccgggagatgagggtttccggggctagtgatcgtgatcccttttatttgcaactgtaatgagaatttttcacactaacacagcgagggactcaacacgctgattctcctcctgcctctcccgtgagtctccagcctgcccagcaccagcagctgtggagcacgtggatgctgcctaccccggcgcccgcgtcttccacgggcacaggtgtgtggaggccgtggtcggaccctggtgtcctggttactgctgcccgggtgtcttttttttgagtaactgctctctgagttttgcacacgaagttgccctcatctgctggagatcgataaggaaggcacaagacgttctcctctgcccgtgaggagcttcccgcagccgcctggcccagcctgggcacgttctccgaggcatgtgtctccctgctcaccctcgtctgggcacctcagcatctgtggacttgagcgtccaaaaaccctgagtgtgattctgggcagccggcctggcttgaagtccgccatgaccctgggcacaggggaagcccagccgtgggcttaggagagagggaccagcgcccagcgttagggctggaagacggcagtgttcagaattccagccgctcatctgaacacagaaggtgtgaactgacctctaaagcagcgtgagatgggaatgatctagaaaactttggatttttgaagtaaattttaatgtttcatattaatttcttgaaaatgtattaaatgtcattgaaagccttattacgcttttcagatcctttcaataaacaagacttgtagaaaaaaaaaaaaaaaaaaaaaaaaaaaaaaaaaaaaaaaaaaaaaaaaa

SEQ ID NO: 25268 - DNA, 2196 bp, Homo Sapiens
ccgggcgcaggggctggactggcggagcaggtggggtccgcggccgccggagcgttccggtcggcgtctgggcatctcggcctcggcagaaagcgcgaccgccctgctgcgcggggcccgcggcgatgccgttcctgcacggcttccggaggatcatcttcgagtaccagccgctggtggatgcgattctgggctccctggggatccaggaccccgagcggcaggagtctctggaccggcccagttatgtcgccagcgaggagagccgaatccttgttctcactgagctgctggagaggaaagcccactctcccttttaccaggaaggcgtcagcaacgccctgctcaagatggctgagctggggctgacgcgggcggccgacgttctcttgcggcatggggccaatctcaactttgaagacccagtcacctactacacggccttgcacatcgccgtcctgcggaaccagccggacatggtggagctgctggtgcatcacggggccgacgttaatcggagggaccgggaaaaactgctctgctccatgctctggccagcagcgacggggtgcagatccacaatactgagaacattcgtctcttactggaaggaggggcagacgtcaaggccaccaccaaagatggggacacagtgttcacctgcatcatcttcctgcttggtgagaccgtgggaggggacaaagaggaggcccagatgatcaaccgcttctgcttccaagtcacacggctgctgctggcacacggggccgaccccagcgagtgcccagcccacgagtccctcacccacatctgcctgaagagctttaaactgcacttccctctcctgcgcttcctcctggagtccggagccgcctacaactgctccctgcacggtgcgtcctgctggtctggctttcacatcatctttgagaggctctgttcccacccaggctgcacggaagacgagagccatgcggacctcctgcgcaaagctgagactgtcctggatctcatggtgaccaactctcagaaactccagctgcccgaaaacttcgatatccaccctgtgggcagcctggcggaaaagatccaggccctccacttctccttgaggcagctggagagctatcccccgcccctcaagcacctgtgccgtgtggccatccggctctaccttcagccgtggcctgtggatgtgaaggtcaaagccctgcctctgcccgacaggctgaagtggtacctccttagcgagcacagtggctccgtggaagatgacatctgataggtctcaggctacaggaacgggggacacgggcagctcaggtcagcctgttggtagatgctgggacagcattagaagagggtctttttgatctgggagatgagacgggatccttcatgagaaaagccagccaggtagagcctgaagctgtgatcactccagtggtgaagggtgcagctctggttcttccagagagactgcccccttccctccagtggcactccaagtcccccccatgttggaaagaggaacagggcttggattgatgtttataccctctgaattggagggcagtgccagggcatttgcagaagctgggaaggaccaagcctcagcaccccagggctgcggggctcttgttggccgcacgtggcagtgcagctggagaggaagcctggggcacgtcctgtgcggtgccaccaaggccccacccctgccccttttccttccaggttctgttactcacagaagtgtttctggtgggctctgcgggagaagacactaagggccccacaggcttgtttcatggtgttgcaagccaagctggcccctgcctgttcctgtagctctggggccaggtcagccgtggccccacctaccagaactgtgctctgctggcagctgtgcttttgccaaacccagggcctcagcgaccatgacttctgctaaaaagcaatcatgagtgcgtggctggggacagacctctctgaagtgtctcctgttgtgaggggctcactttggagccactgaagagccgactgtgccacccacttgcgagcctcagtcccttccaagctgcactggtcattgggaattgtgtaaacacctctggggataagctgaggtgactaaatgatatatttatattataagattaaactgactttcttggccttaaaaaaaaaaaaaaaaaa

SEQ ID NO: 25269 - DNA, 1476 bp, Homo Sapiens
ctgaggggcgggcagatgaggcctaggggtgccgatccctagtgtcgactatgcgagatctgattccggagctgccatgattgaagtggtagcagagctcagccggggtcctgtatttttggctggggaggcgctggagtgtgtagtgaccgtcaccaacccccttccgcccacggccacttctgcatccagtgaggccctggcctgggccagtgcccaaatccactgccagttccatgccagtgagagtcgagtagcactgcctcctcctgactctagtcagccagatgtccagcccgacagccagactgtctttctgccacaccgaggtgagaggggccagtgtatcctttctactccaccgaaaattctattctgtgacctgaggcttgatcctggagagtccaaatcatactcctacagtgaagtgctgcccatagagggaccaccctcctttcggggtcagtcagtcaagtacgtctacaaactgaccattggctgccagcgtgtcaactcccctatcactttactcagagtccctctgagggttcttgtgctgactggccttcaggatgtccggtttccccaggatgaggctgtagccccatccagtccattcttggaggaggatgaaggtgggaagaaagattcatggctagctgagctggctggggaacgcctaatggctgccacatcctgccgcagcctccatctatacaatatcagtgatggccgagggaaagttgggacgtttggcatcttcaaatctgtgtacagacttggcgaggacgtggtggggaccttaaacttaggggaaggaaccgtagcttgtttgcagttttcagtcagcttacagaccgaggagcgtgtacagcctgagtaccagcggcgacgtggggcagggggtgtcccctctgtgtcacatgtgactcacgcccggcaccaggaatcctgcctacatacaactagaaccagcttctccctcccaatccctctcagctccaccccaggcttctgtacagccattgtgtccttgaagtggagattgcattttgaatttgtaacgtcccgagaaccaggattggtactcctaccccctgtggaacagcccgaacctaccacctggacaggacctgagcaagtacctgtagacaccttcagctgggacctgcccatcaaggtgctgcctactagccccaccctggcctcatatgctgccccaggccccagcaccagcaccataaccatctgaaactggcccaccctggtgctagttccttccggatactgagaactcagcacctggactctaatgggacccactttttccacctggggtccaatgtcgtggacagtgagagtcgggctttcagctatagcattaatttatttgttcagaatacattggcagctgctagtggtttccctggaagtggcagcagcagtgagcagtcaaaaaaaaaaaaaaaaaaaaaa

SEQ ID NO: 25270 - DNA, 2555 bp, Homo Sapiens
ggcacgcgcgcggctgaggcgaggtcgctcggcgcagctgttgcggggccatggcggggaccgcgctcaagaggctgatggccgagtacaaacaattaacactgaatcctccggaaggaattgtagcaggccccatgaatgaagagaacttttttgaatgggaggcattgatcatgggcccagaagacacctgctttgagtttggtgtttttcctgccatcctgagtttcccacttgattacccgttaagtcccccaaagatgagatttacctgtgagatgtttcatcccaacatctaccctgatgggagagtctgcatttccatcctccacgcgccaggcgatgaccccatgggctacgagagcagcgcggagcggtggagtcctgtgcagagtgtggagaagatcctgctgtcggtggtgagcatgctggcagagcccaatgacgaaagtggagctaacgtggatgcgtccaaaatgtggcgcgatgaccgggagcagttctataagattgccaagcagatcgtccagaagtctctgggactgtgagacctggcctcgcacaggcgcacacacaccgccaatcagctcagcattctcccccggcacacttagtgacagtgatgctctgtgctggtaccaaacaaggcagacttgcaagaaccacggcatctttttttttttttcaaacctttcctacttcaaacaggcttctcttctgaaatgatgacttaatgtcgaatattgacagcttactgcagttttacagtattcctcacaaagggcttcaggtagattatcagagctgtcagcactacctctccccgctgaaaccagcagttcatggcttcctgtggattccctccctccctggagtgttgagggggttgtacctgccagacttccaggggacgatggaatacccagaacgctccttctgaagaaatggggccctgtagctgcagcacaggggaagggcccggcaccctttctgggtccctcctggttccctgtgggccccatgaggagtccattacttcctttcttccttcatattttacaggcagatgcttttcttataatctaattacatcttttcatttgttatatattacaaaccatcacacttagaaatacttccaggaaatgcttttttgaagtgtgaattaataagaaatggggtaaatagaaaagaaatttattgctgattggccaggtgcggtggttcgtgcctgtaatcccagctctttgggaggccaaggcaggtagatcacaaggtcaggaaattgagaccatcctggctaatacagtgaaaccccatgtctgctaaaattacaaaaaattagctgggcgtggtggtgcacgcctgtagtctcagctactcaggaggctgaggcaggagaatcgcttgaacccgggaggcagaggtagtagtgagctgaagtcccgccactgcactccagcctgggcaacagagcgagactcagtctcaaaaagaaaaaagaaatttattgctgatcacaaggacagacagttttttcccgaccatactcatcaaagatttacgtttgtatattagtaactagtgcattactagagcaggtgcaggtgaggtctttaaagtttcaatgaaagtttcttctggatctacagaaaaaaattttttttttcaatctaaaaactggaaattctagggtttttgtacattttggatgcactgggaatttattagcacaaaatcattctttgcaactcaaaattcagaagggactctaccatatcttagctcagagcacagaggagtgccttatccccacacttgactgggctgtggaggtgggcatgtgggcccctgggcccaggctggggacagagcccttgttttgtgacttaggattttgatgtggttcccatgttctctaacagggccagctgagcagcacaggccaggaggccacagtgtaagcaataacagatctgccacatgcagaagcaaatatcaggcctgtcgcacacgggcggcatttaaataggaatttctatttttgaaataagggatggtctatgaggcatacagtagatttgatgtgatccttttctccctcccttccataatggatcgtggtctgtgtgactgaacccacacagagtgtcatgggtgacagtttctggttgaagtagctccacgctgggcttctgtggacagcagattcttttccttctcacaaggggctcatttaaaatttggaggctgggtgctgtggctcacgcctgcaatcccagcactttgggagactgaggcgggcggatcatgaggtcaggagatcgcgaccatcctggctaacagtgaaaccctgtctccactaaaaatacaaaaaattagccgggcgtggtggcgggcgcctgtagtcccagctactctgaagactgaggcaggagaatggcgtgaacccaggaggcggagcttgcagtgagctgagatcgcgccactgcactccagcctgggcaacagagtgagactctgtctcaaaaaaaaaaaaaaaaaaaaaaaaaaaa

SEQ ID NO: 25271 - DNA, 759 bp, Homo Sapiens
gacccgcagcagagacgacgcctgcagcaaggagaccaggaaggggtgagacaaggaagaggatgtctgagctggagaaggccatggtggccctcatcgacgttttccaccaatattctggaagggagggagacaagcacaagctgaagaaatccgaactcaaggagctcatcaacaatgagctttcccatttcttagaggaaatcaaagagcaggaggttgtggacaaagtcatggaaacactggacaatgatggagacggcgaatgtgacttccaggaattcatggcctttgttgccatggttactactgcctgccacgagttctttgaacatgagtgagattagaaagcagccaaacctttcctgtaacagagacggtcatgcaagaaagcagacagcaagggcttgcagcctagtaggagctgagctttccagccgtgttgtagctaattaggaagcttgatttgctttgtgattgaaaaattgaaaacctctttccaaaggctgttttaacggcctgcatcattctttctgctatattaggcctgtgtgtaagctgactggccccagggactcttgttaacagtaacttaggagtcaggtctcagtgataaagcgtgcaccgtgcagcccgccatggccgtgtagaccctaacccggagggaaccctgactacagaaattaccccggggcacccttaaaacttccactacctttaaaaaacaaagccttatccagcaaaaaaaaaaaaaaaaaa

SEQ ID NO: 25272 - DNA, 2492 bp, Homo Sapiens
gagatatgatgctcaggagaagcgctttctttcgcgagcaccctgaaccagaccatgacccagaccctcaagtacgcctccagagtgttccatcgcgtccgctgggcgcccgagttgggcgcctccctaggctaccgagagtaccactcagcacgccggagcttggcagacatcccaggcccctctacgcccagctttctggccgaacttttctgcaagggggggctgtcgaggctacacgagctgcaggtgcagggcgccgcgcacttcgggccggtgtggctagccagctttgggacagtgcgcaccgtgtacgtggctgcccctgcactcgtcgaggagctgctgcgacaggagggaccccggcccgagcgctgcagcttctcgccctggacggagcaccgccgctgccgccagcgggcttgcggactgctcactgcggaaggcgaagaatggcaaaggctccgcagtctcctggccccgctcctcctccggcctcaagcggccgcccgctacgccggaaccctgaacaacgtagtctgcgaccttgtgcggcgtctgaggcgccagcggggacgtggcacggggccgcccgccctggttcgggacgtggcgggggaattttacaagttcggactggaaggtgagtcccaggacagagctgggcaggcgtcgggggcgccctaccagagcctcccggaaccctgacggcgccccctcccgacaaggcatcgccgcggttctgctcggctcgcgcttgggctgcctggaggctcaagtgccacccgacacggagaccttcatccgcgctgtgggctcggtgtttgtgtccacgctgttgaccatggcgatgccccactggctgcgccaccttgtgcctgggccctggggccgcctctgccgagactgggaccagatgtttgcatttgctcagaggcacgtggagcggcgagaggcagaggcagccatgaggaacggaggacagcccgagaaggacctggagtctggggcgcacctgacccacttcctgttccgggaagagttgcctgcccagtccatcctgggaaatgtgacagagttgctattggcgggagtggacacggtgtccaacacgctctcttgggctctgtatgagctctcccggcaccccgaagtccagacagcactccactcagagatcacagctgccctgagccctggctccagtgcctacccctcagccactgttctgtcccagctgcccctgctgaaggcggtggtcaaggaagtgctaagactgtaccctgtggtacctggaaattctcgtgtcccagacaaagacattcatgtgggtgactatattatccccaaaaatacgctggtcactctgtgtcactatgccacttcaagggaccctgcccagttcccagagccaaattcttttcgtccagctcgctggctgggggagggtcccaccccccacccatttgcatctcttccctttggctttggcaagcgcagctgtatggggagacgcctggcagagcttgaattgcaaatggctttggcccagatcctaacacattttgaggtgcagcctgagccaggtgcggccccagttagacccaagacccggactgtcctggtacctgaaaggagcatcaacctacagtttttggacagatagtcccatggaaagagactgtcatcatcaccctttcattcatcatagggataagattttttgtaggcacaagaccaaggtatacatcttcccctaatgcctatctgaccaaactggatagaaccaccatagtgaagtgtgaggcggccctgaccaatgtgtgaagtatgcacttggcctgactcaggaagccaggtgagaaaaccatggtctctctgcttgcttggcccttctgatcatgtatgcatcccccaaggatgaaatcagattttaactaataatgctggatggcctgaggaaagattcaactgcctctctttttgggctttcatagtgttcattgatgctgctggctaagcatttatcaaagcataagctcagtaactgtgcatctggtctgtacctggttggtccttcgtctttgcatgtaagctctttgagaggaagggtgaagccttatttgttttttatgtcccctgccagggcctgtctctgactaggtgtcaccatacacattcttagattgaatctgaaccatgtggcagaagggataagcagcttacttagtaggctctgtctacccccttccttctttgtcttgcccctaggaaggtgaatctgccctagcctggtttacggtttcttataactctcctttgctctctggccactattaagtgggtttgccccatcacttagttctcaggcagagacatctttgggcctgtccctgcccaggcctctggctttttatattgaaaatttttaaatattcacaaattttagaataaatcaaatattccattcttgaaaaaaaaaaaaaaaaaaa

SEQ ID NO: 25273 - DNA, 2492 bp, Homo Sapiens; identical to SEQ ID NO: 25272

SEQ ID NO: 25274 - DNA, 1930 bp, Homo Sapiens
gggcaccggccgacatggcggcagcggtggcggctgcgctggcgcggcttttggcggcctttctgctcctcgcggcccaggtggcctgtgagtacggcatggtgcacgtggtctcccaggccgggggccccgaaggcaaagactactgcatcctctacaacccgcagtgggcccatcttccgcacgacctcagcaaggcatctttcctgcagctgcgcaactggacggcctccctgctctgctccgcagccgacctccccgcccgtggcttcagcaaccagatcccgctggtggcgcgggggaactgcaccttctatgagaaagtgaggctggcccagggcagcggagcacgcgggctgctcatcgtcagcagggagaggctggtccccccggggggtaataagacgcagtatgatgagattggcattcccgtggccctgctcagctacaaagacatgctggacatcttcacgcgtttcggccgcacggtgagggcggcgctgtatgcgcctaaggagccggtgctggactacaacatggtcatcatcttcatcatggctgtgggcaccgtcgccatcggcggctactgggccgggagtcgggacgtgaagaaaaggtacatgaagcacaagcgcgacgatgggcccgagaagcaggaggacgaggcggtggacgtgacgccggtgatgacctgcgtgtttgtggtgatgtgctgctccatgctggtgctgctctactacttctacgacctcctcgtgtacgtggtcatcgggatcttctgcctggcctccgccaccggcctctacagctgcctggcgccctgtgtgcggcggctgcccttcggcaagtgcaggatccccaacaacagcctgccctacttccacaagcgcccgcaggcccgtatgctgctcctggcgctcttctgcgtggccgtcagcgtggtgtggggcgtcttccgcaacgaggaccagtaagtgctgcttcccccgggccccggcgggcagtggagtcctcgggcgcaccagggctcctggggccctgactccctgccctccctggaggccgccccagcctggagctgcttcagcaccgcgtgatgaagagccctggccccgggctgctctgacagggctgcgagggcgtttcacctgggtttgtccgggtgccatgggaaccctgactggaatccgggaggagaggccggagcccctgtggccaggagccacgtcctccagcctggatgggactcctttgtggggcatcgctgcccagggccacagtctgtcccccgctgtccctttcctggcacccacgtgcacgccgcaggttcgaggcccagggtgtgggcaccagggcacccggtcctcttggtcatgactgctgcggcttctgagcagtggtggaggtggggcaggcactgctccccccacgctcacctcccacgaggcctggacttgtggctgcctcccgctggccgggcctcccccatgaggccgagtgcctggtgccgtgttgggaggacagagctggcccgtccccgcccggtccccaccgctgtcgctgataccatctggcacttcctcccagccttcctgaggcagccaagtacgcttggctttggtgtgtattgcagccacggcacgtttaactggcagaaggaagatgtgaaaatattttgaatcctttgtacacaaagagaaaatgaatcttttcagttatttccaagccaggaaactcgctccgtcacatgaagttagagcaggcctcagtcagctgggcgcaggggctcacgcctgggatcccagcatttggtaggccaaggcaggacgatcactttgcccaggagttcaagaccagcctgggcaacaagcgagacgccctatttaagaaataatataaaatcagaaaaaataaaaaaaaaaaaaaaaaa

SEQ ID NO: 25275 - DNA, 2153 bp, Homo Sapiens
cctgactccccacagcctggcctcccccctgagcagcaggccctgctaggaagtggcggaagccgtaccaagtggctgaagcccccagcagagaacaaggccgaggagaaccgctatgtggtccggctaagtgagagcaacctggtcatctgaggggcggtctagtctaaggacactgcggccctgccctgggaggttccgaaggcttcctggaggaggtggagctgcagctgggactgtgaggaccgagaagcaatggcccagcagacgagacagcaaagaccaaggcctggaggtgggagcgtccgccccagtgaggaggcaggtggccggcgggcactgtgtacaggagcaggctgagccccgcccctggccctgctgccatgttgctcccctgaaggatgccccgacccccgtgcctgccctggctggatcctaggagcccacgggattctctgtatcatcagaggctgggcttggcagaggggaggggcctgtgcccgtcacccctggccccattccttggtaattagccacacccttgcctctgtacagggccctagagcagatgtgcgtccccctcctcttccagcaggtctataaagggaaggggtagcagaaagtcctgggctaggagagtgagtccctgggttctaatcttgggcacatctgtggccatcgctgggtccatttttctgactgtgaagtaaggagagacgtctcagtacccagggcctcttcagctctttgtaggttctgggctgggttgtgggggactggggagctgggctctaccatccctcccattagtagctttatccagccccgtttttgctgcttccagggcctctgccttcaaggcccccatggggctgtccatccatggctctgcctacggaaggggcttaatgcatgtgcctgcccctcccccagctgtttttaatgaaactgaaaaaatagacttgatcccggcaggactgtgatacagagccctagcctgcccagccagccccaagatctcaggagctttagggagaagacttggtggggctggagcacaccttgggcctcagtggtttctgtgtccctgtggtgccagtgcttctgggcagtgcaggcggctgccaggcccagccctgacttccactctggctcagcaacctggttatttatgtggggccgtgcaggcatgggcccactgcctgtccgtcctgtttctcttatttattgaaactcaccattgccctatccttgtgtctccacccccttccatgtgttgaataataaaaggtgggaaagtgctgtcacgaggagctccttttctctgtgcccttcccagcttatccgcctgttccacttgtacctgtccagccctgccctgtgttgggcaccgtgacaggctgccctcccctcacagttcctgcacctcagcagccagggaagcagggcccagaggagacccatcaactcatctggttctcaccaaagcccctagctagaggcagggctgtcccacagaaatagtgtgagccacatatgttactttaaattttctgacagtcacatttcaaaaagtaaaaagaagcaggtgaacttaatttttttttaacccagtctatccaaaatattttcatttcaatataaaatcagtataaaaagtgtgaatgagctgtttttgcttttgctttgaaatctggagtgtatcttacacatcttgattggaactcaaatatttcaagggctccatagccacgtggccagcagctaccacactggtcagcgcagcacctgaggaaatgcactgtgtggagcccgggaggtaattgggggtgaggaagatgtgcgggccagggaatgtgttccacagagagggacagcatgtgcaaaggctgggcaccaacacatagtggtcacctgggccttatgcccagggagcctccaaagcattcagctcctgcttggccagtgtggagaggaaaggagccacaggagcgggtgctacacccggcaagacagagcgtctccatctaaaattcctagggcaagcttccaacccggcccaagggccgcatgtggcccaggatatggctttgaatggggcctaacacaaattcataaactttcttaaaacattgaaaaaaaaaaaaaaaaaa

SEQ ID NO: 25276 - DNA, 3113 bp, Homo Sapiens
gcccttggctacatcggacccagatgactgcctcctcacttcctccctcccgattccgccgcggcccccaaagactctcggggtggccccttgtccgcaccgcttggagggagtgtgctctgagttaagctggtctcttctggtcctggaaaaaaatgagtattgacaaggttgctggatctgcgtagaaaagaaagtgccacttaataaaaaatttagcccggcagtggtaccgtctgcagagcttgctgcccttggacgttagcaggaagccttcggggtgctgtaatcggcgggcagaggagagggaggccgcggaattaaaaggaacaaaagctagagcgccatgccaaacgtccccggcaagacccagttaggcaggagccgggagtgatgggaaaatgaactagaatacgatgagctgccccattacggcgggatggacggagtaggggttcccgcttccatgtacggagaccctcacgcgccgcggccgatccccccggttcaccacctgaaccacgggccgccgctccacgccacacagcactacggcgcgcacgccccgcaccccaatgtcatgccggccagtatgggatccgctgtcaacgacgccttgaagcgggacaaggacgcgatctatgggcacccgttgtttcctctgttagctctggtctttgagaagtgcgagctggcgacctgcactccccgggaacctggagtggctggcggagacgtctgctcctccgactccttcaacgaggacatcgcggtcttcgccaagcaggttcgcgccgaaaagccacttttttcctcaaatccagagctggacaatttgatgatacaagcaatacaagtactaaggtttcatcttttggagttagaaaaggtccacgaactgtgcgataacttctgccaccgatacattagctgtttgaaggggaaaatgcccatcgacctcgtcattgatgaaagagacggcagctccaagtcagatcatgaagaactttcaggctcctccacaaatctcgctgaccataacccttcttcttggcgagaccacgatgatgcaacctcaacccactcagcaggcaccccagggccctccagtgggggccatgcttcccagagcggagacaacagcagtgagcaaggggatggtttagacaacagtgtagcttcacctggtacaggtgacgatgatgatccggataaggacaaaaaacgccagaagaaaagaggcattttccccaaagtagcaacaaatatcatgagagcatggctcttccagcatctcacacatccgtacccttccgaagagcagaagaaacagttagcgcaagacacaggacttacaattctccaagtaaacaactggtttattaatgccagaagaagaatagtacagcccatgattgaccagtcaaatcgagcagtgagccaaggagcagcatatagtccagagggtcagcccatggggagctttgtgttggatggtcagcaacacatggggatccggcctgcaggacctatgagtggaatgggcatgaatatgggcatggatgggcaatggcactacatgtaaccttcatcatgtaaagcaatcgcaaagcaagggggaagtttgcagagcatgccaggggactacgtttctcagggtggtcctatgggaatgagtatggcacagccaagttacactcctccccagatgaccccacaccctactcaattaagacatggacccccaatgcattcatatttgccaagccatccccaccacccagccatgatgatgcacggaggaccccctacccaccctggaatgactatgtcagcacagagccccacaatgttaaattctgtagatcccaatgttggcggacaggttatggacattcatgcccaatagtataagggaactcaagggaaaaggaaacacacgcaaaaactattttaagactttctgaactttgaccagatgttgacacttaatatgaaattccagacagctgtgattattttttacttttgtcatttttcatcaagcaacagaggaccaatgcaacaagaacacaaatgtgaaatcatgggctgactgagacaattctgtccatgtaaagatcctctggaaaaagactccgagagttataactactgtagtataaatataggaactaagttaaacttgtacatttctgttgatcacgccgttatgttgcctcaaatagttttagaagagaaaaaaaaatatatccttgttttccacactatgtgtgttgttcccaaaagaatgactgttttggttcatcagtgaattcaccatccaggagagactgtggtatatattttaaacctgttgggccaatgagaaaagaaccacactggagatcatgatgaacttttggctgaacctcatcactcgaactccagcttcaagaatgtgttttcatgcccggcctttgttcctccataaatgtgtcctttagtttcaaacagatctttatagttcgtgcttcataagccaattcttattattatttttgggggactcttcttcaaagagcttgccaatgaagatttaaagacagagcaggagcttcttccaggagttctgagccttggttgtggacaaaacaatcttaagttgggcagctttcctcaacacaaaaaaagttattaatggtcattgaaccataactaggactttatcagaaactcaaagcttgggggataaaaaggagcaagagaatactgtaacaaacttcgtacagagttcggtctattaattgtttcatgttagatattctatgtgtttacctcaattgaaaaaaaaaagaatgtttttgctagtatcagatctgctgtggaattggtattgtatgtccatgaattcttcttttctcagcacgtgttcctcactagaagaaaatgctgttacctttaagctttgtcaaatttacattaaaatacttgtatgaggactgtgacgttatgttaaaaaaaaaaggtgttaagtcacaaaaagcggtaataaatatttcatttttgaaaaaaaaaaaaaaaaaaaaaaaaaaaaaaaaaaaaaaaaaaaaaaaaaaaaaaaaaaaaaaaaa

SEQ ID NO: 25277 - DNA, 957 bp, Homo Sapiens
gcctgaggagctgctgcgagggtccgcttcgtctttcgagagtgactcccgcggtcccaaggctttccagagcgaacctgtgcggctgcaggcaccggcgtgttgagtttccggcgttccgaaggactgagctcttgtcgcggatcccgtccgccgtttccagcccccagtctcagagcggagcccacagagcagggcaccggcatggccaaagccgcggcaatcggcatcgacctgggcaccacctactcctgcgtgggggtgttccaacacggcaaggtggagatcatcgccaacgaccagggcaaccgcaccacccccagctacgtggccttcacggacaccgagcggctcatcggggatgcggccaagaaccaggtggcgctgaacccgcagaacaccgtgtttgacgcgaagcggctgatcggccgcaagttcggcgacccggtggtgcagtcggacatgaagcactggcctttccaggtgatcaacgacggagacaagcccaaggtgcaggtgagctacaagggggagaccaaggcattctaccccgaggagatctcgtccatggtgctgaccaagatgaaggagatcgccgaggcgtacctgggctacccggtgaccaacgcggtgatcaccgtgccggcctacttcaacgactcgcagcgccaggccaccaaggatgcgggtgtgatcgcggggctcaacgtgctgcggatcatcaacgagcccacggccgccgccatcgcctacggcctggacagaacgggcaagggggagcgcaacgtgctcatctttgacctgggcgggggcaccttcgacgtgtccatcctgacgatcgacgacggcatcttcgaggtgaaggccacggccggggacacccacctgggtggggaggactttgacaacaggctggtgaaccacttcgtggaggagttcaaaaaaaaaaaaaaaaaa

SEQ ID NO: 25278 - DNA, 1326 bp, Homo Sapiens
cggatgccggcggtctctgctgaagagagaagatggcgcttgacggaccagagcagatggagctggaggaggggaaggcaggcagcggactccgccaatattatctgtccaagattgaagaactccagctgattgtgaatgataagagccaaaacctccggaggctgcaggcacagaggaacgaactaaatgctaaagttcgcctattgcgggaggagctacagctgctgcaggagcagggctcctatgtgggggaagtagtccgggccatggataagaagaaagtgttggtcaaggtacatcctgaaggtaaatttgttgtagacgtggacaaaaacattgacatcaatgatgtgacacccaattgccgggtggctctaaggaatgacagctacactctgcacaagatcctgcccaacaaggtagacccattagtgtcactgatgatggtggagaaagtaccagattcaacttatgagatgattggtggactggacaaacagatcaaggagatcaaagaagtgatcgagctgcctgttaagcatcctgagctcttcgaagcactgggcattgctcagcccaagggagtgctgctgtatggacctccaggcactgggaagacactgttggcccgggctgtggctcatcatacggactgtacctttattcgtgtctctggctctgaactggtacagaaattcataggggaaggggcaagaatggtgagggagctgtttgtcatggcacgggaacatgctccatctatcatcttcatggacgaaatcgactccatcggctcctcgcggctggaggggggttctggaggggacagtgaagtgcagcgcacgatgctggagttgctcaaccagctcgacggctttgaggccaccaagaacatcaaggttatcatggctactaataggattgatatcctggactcggcactgcttcgcccagggcgcattgacagaaaaattgaattcccaccccccaatgaggaggcccggctggacattttgaagattcattctcggaagatgaacctgacccgggggatcaacctgagaaaaattgctgagctcatgccaggagcatcaggggctgaagtgaagggcgtgtgcacagaagctggcatgtatgccctgcgagaacggcgagtccatgtcactcaggaggactttgagatggcagtagccaaggtcatgcagaaggacagtgagaaaaacatgtccatcaagaaattatggaagtgagtggacagcctttgtgtgtatctctccaataaagctctgtgggccaagtcaaaaaaaaaaaaaaaaaaaaaaa

SEQ ID NO: 25279 - DNA, 2461 bp, Homo Sapiens
atgctgggtacgctgcgcgccatggagggcgaggacgtggaagacgaccagctgctgcagaagctcagggccagtcgccgccgcttccagaggcgcatgcagcggctgatagagaagtacaaccagcccttcgaggacaccccggtggtgcaaatggccacgctgacctacgagacgccacagggattgagaatttggggtggaagactaataaaggaaagaaacaaaggagagatccaggactcctccatgaagcccgcggacaggacagatggctccgtgcaagctgcagcctggggtcctgagcttccctcgcaccgcacagtcctgggagccgattcaaaaagcggtgaggtcgatgccacgtcagaccaggaagagtcagttgcttgggccttagcacctgcagtgcctcaaagccctttgaaaaatgaattaagaaggaaatacttgacccaagtggatatactgctacaaggtgcagagtattttgagtgtgcaggtaacagagctggaagggatgtacgtgtgactccgctgccttcactggcctcacctgccgtgcctgcccccggatactgcagtcgtatctccggaaagagtcctggtgacccagcgaaaccagcttcatctcccagagaatgggatcctttgcatccttcctccacagacatggccttagtacctagaaatgacagcctctccctacaagagaccagtagcagcagcttcttaagcagccagccctttgaagatgatgacatttgcaatgtgaccatcagtgacctgtacgcagggatgctgcactccatgagccggctgttgagcacaaagccatcaagcatcatctccaccaaaacgttcatcatgcaaaactggaactgcaggaggaggcacagatataagagcaggatgaacaaaacatattgcaaaggagccagacgttctcagaggagctccaaggagaacttcataccctgctctgagcctgtgaaagggacaggggcattaagagattgcaagaacgtattagatgtttcttgccgtaagacaggtttaaaattggaaaaagcttttcttgaagtcaacagaccccaaatccataagttagatccaagttggaaggagcgcaaagtgacaccctcgaagtattcttccttgatttacttcgactccagtgcaacatataatcttgatgaggaaaatagatttaggacattaaaatggttaatttctcctgtaaaaatagtttccagaccaacaatacgacagggccatggagagaaccgtcagagggagattgaaatccgatttgatcagcttcatcgggaatattgcctgagtcccaggaaccagcctcgccggatgtgcctcccggactcctgggccatgaacatgtacagagggggtcctgcgagtcctggtggccttcagggcttagaaacccgcaggctgagtttaccttccagcaaagcaaaagcaaaaagtttaagtgaggcttttgaaaacctaggcaaaagatctctggaagcaggtaggtgcctgcccaagagcgattcatcttcatcacttccaaagaccaaccccacacacagcgcaactcgcccgcagcagacatctgaccttcacgttcagggaaatagttctggaatatttagaaagtcagtgtcacccagcaaaactctttcagtcccagataaagaagtgccaggccacggaaggaatcgttacgatgaaattaaagaagaatttgacaagcttcatcaaaagtattgcctcaaatctcctgggcagatgacagtgcctttatgtattggagtgtctacagataaagcaagtatggaagttcgatatcaaacagaaggcttcttaggaaaattaaatccagaccctcacttccagggtttccagaagttgccatcatcacccctggggtgcagaaaaagtctactgggctcaactgcaattgaggctccttcatctacatgtgttgctcgtgccatcacgagggatggcacgagggaccatcagttccctgcaaaaagacccaggctatcagaaccccagggctccggacgccagggcaattccctgggtgcctcagatggggtggacaacaccgtcagaccgggagaccagggcagctcttcacagcccaactcagaagagagaggagagaacacgtcttacaggatggaagagaaaagtgatttcatgctagaaaaattggaaactaaaagtgtgtagctaggttatttcggagtgttatttatcttcccacttgctctctgtttgtatttttgttttgtttttgattcttgagactgtgaggacttggttgacttctctgcccttaaagtaaatattagtgaaattggttccatcagagataacctcgagttcttggtgtagaaattatgtgaataaagttgctcaattagaaaaaaaaaaaaaaaaaaaa

SEQ ID NO: 25280 - DNA, 1315 bp, Homo Sapiens
ccgcgccctgggccctggatgctccgtgcaactgacatgggtgaaccccagggatccatgcggattctagtgacagggggctctgggctggtaggcaaagccatccagaaggtggtagcagatggagctggacttcctggagaggactgggtgtttgtctcctctaaagacgccgatctcacggatacagcacagacccgcgccctgtttgagaaggtccaacccacacacgtcatccatcttgctgcaatggtggggggcctgttccggaatatcaaatacaatttggacttctggaggaaaaacgtgcacatgaacgacaacgtcctgcactcggcctttgaggtgggcgcccgcaaggtggtgtcctgcctgtccacctgtatcttccctgacaagacgacctacccgatagatgagaccatgatccacaatgggcctccccacaacagcaattttgggtactcgtatgccaagaggatgatcgacgtgcagaacagggcctacttccagcagtacggctgcaccttcaccgctgtcatccccaccaacgtcttcgggccccacgacaacttcaacatcgaggatggccacgtgctgcctggcctcatccacaaggtgcacctggccaagagcagcggctcggccctgacggtgtggggtacagggaatccgcggaggcagttcatatactcgctggacctggcccagctctttatctgggtcctgcgggagtacaatgaagtggagcccatcatcctctccgtgggcgaggaagatgaggtctccatcaaggaggcagccgaggcggtggtggaggccatggacttccatggggaagtcacctttgatacaaccaagtcggatgggcagtttaagaagacagccagtaacagcaagctgaggacctacctgcccgacttccggttcacacccttcaagcaggcggtgaaggagacctgtgcttggttcactgacaactacgagcaggcccggaagtgaagctggaagacaggatcaggtgccagcggaccatcggctggcagagcccagcggccaccacccgtcaaccctgccaggagctgagggcaccacccagcaacctgggcctgcattccatccgctctgcagccccaagcatctttccagtggggcccccattcacgttggtcctcagggaaaccagggtcccgggcaggcccggcgctttgctccccacaccagccccctgcgcgtgtccactctgatcctgcatcccactccctgggagccaataaagtgcattttcacaggaaaaaaaaaaaaaaaaaaaaaa

SEQ ID NO: 25281 - DNA, 2693 bp, Homo Sapiens
cctcgtgccgggaaagctcttttaacgagctgaggcttcgaagacctcagaggacttctctcagcactcacagaaacctcctacaccctcggatggcacaaagggactgttttcttactcttagtctgagtgactgccaaggaaggcaaaggtagagcaactggatctctggctctccacatagcttctgatctcagaccttactaaaatgctttctgggcccaaggacaaagctcacatgaacaaatgattttgagtcatgaatgaaaaatcttgctctttccatagtaaagaagaattaagagatggacagggtgaaagattgtctgctggatattctccatcatatgacaaggacaagagtgttctggctttcagaggaatccctatctcagagttgaagaaccatggcattctccaggctctgaccacagaagcttatgaatgggagccacgtgttgtgagtacagaggtggtcagagcccaagaagaatgggaagctgtggacaccatccagccagagacagggagccaagctagctcagagcagcctgggcagctaatctccttcagtgaggccctgcagcacttccagactgtggacctttcccccttcaagaaaagaatccagccaactattcgaaggactgggctcgccgccctccgacactacctcttcgggcctccaaagctccaccagcgccttcgggaagaaagggacttggtcctgaccattgctcagtgtggcctggatagccaagacccagtgcatggccgagtcctccagaccatctataagaagctgaccggctccaagtttgactgtgcccttcatggaaaccactgggaggacctgggctttcagggagcgaatccagccacagacctgagaggcgcaggcttccttgccctcctgcatctgctctacctggtgatggactcaaagaccttgccgatggcgcaggagattttccgcctgtctcgtcaccacatccagcaattccctttctgtttgatgtccgtgaacatcacccacattgccatccaggccttgagagaggagtgtctctccagagagtgtaatcggcagcagaaggtcatccccgtggtgaacagcttctatgccgccacattcctccatctcgcacatgtctggaggacacagcggaagaccatctcagactcgggctttgtcctcaaaggtgtgctctttcttctggggaggcctaggctgaatgcacagtgtcccaggtccagagagcccaaggtggttgctagactggttttggctgcagttcttccccatccacactttctcaaattccagcttaccaaaatctccatcacccaccccctggagtctgctagttctcctttctctgccctgactgttgcccttttctggtcttatacttatgacaagcatatattctgatcaaaaattgggagccagggtccaatagttggactattcaaagttgcaattgtgcagacaaggtagagtgtgtggtccctgtggctgtagctggctccctagcctacctctctggtgatctctccatctgaggctccttcactttctctccatgggataggggttgggggtactccctagagctgctaggcttgaggccttgactgttgtgtcacccagagccccctcaagccttctgctccccaattctctctgttgcagagttggaagtattggccaagaagagcccactgcggctgctcaagaccctggagctgtacttggccagggtgtcaaagggacaggcctccttgttgggagcacagaagtgctatgggccagaagcccctcccttcaaggatctcaccttcacaggtgagagtgacctgcagtctcactcatccgaaggcgtatggctgatctgacctccgagatgaatggaggcttaaaggctgagctgcaggggctttcagggggtcatgtcaggagcctggccaggccacaccccttgctgtctcagcagatgggatataggaagctcctgggcttagctgtgggaagccaagtaccctcaccggcatgggacatgaggggcagctagacttcacccccttcccgcagacctgcctccagagcaaggagaattctgccttaatctgttgggctccagtctccgggttgaattccagtgtatcccactgggagtgaatggatcatgaggtgggatggccccatctggatgttctgcagatccccacatgggaggagattcccaagtagaggcagccagaattctgactccctggcagcagcagggctttcaggcaccagtgtctgtgttgttagaactcagaggaagaggcaggggcagcagccgacagggggcagcatgacccaagcaaggggcctgaggcctcagtgggggtagggcaaggaggtacctcacaggtgggtgtgaggccccctctggagtttctggccattcacttacccactctcttctccccctgacccccgctccattgtttatgatggaaaaacggacatttggctaggtgtctctcacggctgctccatcctagcccccacaagctggggcttcctcctgtagatgctgtgcatgccccatgatgagtttctggcctaattgagggaaggaggaaattcataccagcagttttcaaataaaagaattgttctaaaaaaaaaaaaaaaaaaa

SEQ ID NO: 25282 - DNA, 1582 bp, Homo Sapiens
ctttcgctcgccctctcctcgaggatcgaggggactctgaccacagcctgtggctgggaagggagacagaggcggcggcggctcaggggaaacgaggctgcagtggtggtagtaggaagatgtcgggcgaggacgagcaacaggagcaaactatcgctgaggacctggtcgtgaccaagtataagatggggggcgacatcgccaacagggtacttcggtccttggtggaagcatctagctcaggtgtgtcggtactgagcctgtgtgagaaaggtgatgccatgattatggaagaaacagggaaaatcttcaagaaagaaaaggaaatgaagaaaggtattgcttttcccaccagcatttcggtaaataactgtgtatgtcacttctcccctttgaagagcgaccaggattatattctcaaggaaggtgacttggtaaaaattgaccttggggtccatgtggatggcttcatcgctaatgtagctcacacttttgtggttgatgtagctcaggggacccaagtaacagggaggaaagcagatgttattaaggcagctcacctttgtgctgaagctgccctacgcctggtcaaacctggaaatcagaacacacaagtgacagaagcctggaacaaagttgcccactcatttaactgcacgccaatagaaggtatgctgtcacaccagttgaagcagcatgtcatcgatggagaaaaaaccattatccagaatcccacagaccagcagaagaaggaccatgaaaaagctgaatttgaggtacatgaagtatatgctgtggatgttctcgtcagctcaggagagggcaaggccaaggatgcaggacagagaaccactatttacaaacgagacccctctaaacagtatggactgaaaatgaaaacttcacgtgccttcttcagtgaggtggaaaggcgttttgatgccatgccgtttactttaagagcatttgaagatgagaagaaggctcggatgggtgtggtggagtgcgccaaacatgaactgctgcaaccatttaatgttctctatgagaaggagggtgaatttgttgcccagtttaaatttacagttctgctcatgcccaatggccccatgcggataaccagtggtcccttcgagcctgacctctacaagtctgagatggaggtccaggatgcagagctaaaggccctcctccagagttctgcaagtcgaaaaacccagaaaaagaaaaaaaagaaggcctccaagactgcagagaatgccaccagtggggaaacattagaagaaaatgaagctggggactgaggtgggtcccatctccccagcttgctgctcctgcctcatccccttcccaccaaaccccagactctgtgaagtgcagttcttctccacctaggaccgccagcagagcggggggatctccctgcccccaccccagttccccaacccactcccttccaacaacaaccagctccaactgactctggtcttgggaggtgaggcttcccaaccacggaagactactttaaatgaaaaaaagaaattgaataataaaatcaggagtcaaaaaaaaaaaaaaaaaa

SEQ ID NO: 25283 - DNA, 2250 bp, Homo Sapiens
cacgcgggaggagactcgggacacccactcgctggctgccaccgggagcagaggggggctcggccgccccctcccacatcagtctccagacccttggggcttcagaggccgctcctaggctcctcggaggaggcgcgggttccttcttttccggagagcaaactttcctcggagatgcctggcaggatgagccgcggcccccggagaggacgggacagcctctgatcgccgcctgcgtgccccgccactgcccatggccaggaggccccagggaacggacagcccgacctcttaggcgccgggaccctcaggctcagatcagtggccgaggccccagagtttgcaaactcagctctggagttcagcagcaacagcagcaggaaaaacctgcccctgctcccccctcccgccacctcccctctcctcttctcccctcacccagcaggcacccccggttcccgccaggccctcctgccatgtcggacccagacgtccccaggggctcggatgtccccgccatgtggcccccttgttccaggggtgcctgagccccttcaaggagccccaacccacccccaaccttggcccagccctgagccccagggaccatgagcgggggcaagaagaagagtagtttccaaatcaccagcgtcaccacggactatgagggccctgggagcccaggggcttcggatccccctaccccacagcccccaaccgggcccccgccccgcctgcccaatggggagcccagccccgatccggggggcaagggcaccccccggaatggctccccaccacctggggccccttcctcccgtttccgggtggtgaagctgccccacggcctgggagagccttatcgccgcggtcgctggacgtgtgtggatgtttatgagcgagacctggagccccacagcttcggcggactcctggagggaattcgaggggcctcagggggcgccgggggcagatctttggattccaggttggagctggccagcctcggcctgggcgcccccaccccaccgtcaggcctgtctcagggccccacctcctggctccgtccaccccccacctctcctggacctcaggcccgctccttcactgggggactgggccagctggtggtgcccagcaaagccaaggcagagaaacccccactgtcggcctcctcaccccagcagcgccccccagagcctgagaccggtgagagtgcgggcacatcccgggctgccacgcccctgccctctctgagggtggaagcggaggctgggggctcaggggccaggacccctccactgtcccggaggaaagctgtagacatgcggctgcggatggagttgggtgctccagaagagatggggcaggtgcccccacttgactctcgccccagctccccggccctctacttcacccacgatgccagcctggttcacaaatctccagaccccttcggagcagtagcagctcagaagttcagcctggcccactccatgttggccatcagtggtcacctagacagcgacgatgatagtggctccggaagcctggttggcattgacaacaaaatcgagcaagccatggacttggtgaagtcccacctcatgtttgcggtccgggaggaggtggaggtgctgaaggagcagatccgggaactggcggagcggaacgctgcgctggagcaggagaatgggctgctgcgcgccctggccagcccggagcagctggctcagctgccctcctcgggggtcccacggcttgggccccctgcgcccaatgggccctccgtctgagcctcccttcccttacaatgtgcctttggggctgcccggccttgcgtcagccgcctgccccctcttcctatgcagctttaatgtccccgtgtccccggggtgggagttcaaggctcagtaatggcctggtcccccggcccctgccccatctcctcatcatccccagccttgatggaggagggagggcttcaggacggggcgtcagagggagccccctctgggagggaaccaacccccaccctccctcctgggaccccccagcagtagacggcttgggggagtcggaggctccccggcagacaccccacccccatcttgttcccttgaggtgcctcctctcctctgcccaggggagggagtgtggacagtatctggaagttctgggattcaggttgttattaaaataataataataattaaaaactctgaagaaacttgaaaaaaaaaaaaaaaa

SEQ ID NO: 25284 - DNA, 1646 bp, Homo Sapiens
ggtcggctggttatcgggagttggagggctgaggtcgggagggtggtgtgtacagagctctaggactcacgcaccaggccagtcgcgggttttgggccgaggcctgggttacaagcagcaagtgcgcggttggggccactgcgaggccgttttagaaaactgtttaaaacaaagagcaattgatggataaatcaggaatagattctcttgaccatgtgacatctgatgctgtggaacttgcaaatcgaagtgataactcttctgatagcagcttatttaaaactcagtgtatcccttactcacctaaaggggagaaaagaaaccccattcgaaaatttgttcgtacacctgaaagtgttcacgcaagtgattcatcaagtgactcatcttttgaaccaataccattgactataaaagctatttttgaaagattcaagaacaggaaaaagagatataaaaaaaagaaaaagaggaggtaccagccaacaggaagaccacggggaagaccagaaggaaggagaaatcctatatactcactaatagataagaagaaacaatttagaagcagaggatctggcttcccatttttagaatcagagaatgaaaaaaacgcaccttggagaaaaattttaacgtttgagcaagctgttgcaagaggattttttaactatattgaaaaactgaagtatgaacaccacctgaaagaatcattgaagcaaatgaatgttggtgaagatttagaaaatgaagattttgacagtcgtagatacaaatttttggatgatgatggatccatttctcctattgaggagtcaacagcagaggatgaggatgcaacacatcttgaagataacgaatgtgatatcaaattggcaggggatagtttcatagtaagttctgaattccctgtaagactgagtgtatacttagaagaagaggatattactgaagaagctgctttgtctaaaaagagagctacaaaagccaaaaatactggacagagaggcctgaaaatgtgacaggatcatgaatgtcaaaggcttttatcttgagaacatggtgtctggagttaaaggactattgttagatctgtgggaaggaattacaagacagttgctaaaagtttgaaaaagacggttgctaaacgttatgaaaaaccagataatctacttttttaccttaggtattggcatactccacacatctgtaccattcttgagtgatcgcttaggaatgaatgtgatttgaactcattcatgttgagagggtgtcaaattgagaaccaggtagatccccaccacctacagtaaaaaggaccctaaagtaaattggttgaagaaattagatcccaaagattcttggtgaattttgaagtcttcatcagtatatccatattaaaacgagatgacagaagccaaagtaattatgggctgacaggacaactggatcagtttcattaaaaagggcaaacttgaagataaatcttttgactccagctctttagaggatctaaagtgaccttgatggacagtggaagaaatcacaacatggaattcctcgaataacaatttattgactttaaataattttgtctaatgctacatatacacaattaaaaaacctttacactaaaaaaaaaaaaaaaa

SEQ ID NO: 25285 - DNA, 2910 bp, Homo Sapiens
tgcgagctcgtcgtactgaccgagcggggaggctgtcttgaggcggcaccgctcaccgacaccgaggcggactggcagccctgagcgtcgcagtcatgccggccggacccgtgcaggcggtgcccccgccgccgcccgtgcccacggagcccaaacagcccacagaagaagaagcatcttcaaaggaggattctgcaccttctaagccagttgtggggattatttaccctcctccagaggtcagaaatattgttgacaagactgccagctttgtggccagaaacgggcctgaatttgaagctaggatccgacagaacgagatcaacaaccccaagttcaactttctgaaccccaatgacccttaccatgcctactaccgccacaaggtcagcgagttcaaggaagggaaggctcaggagccgtccgccgccatccccaaggtcatgcagcagcagcagcagaccacccagcagcagctgccccagaaggtccaagcccaagtaatccaagagaccatcgtgcccaaagagcctcctcctgagtttgagttcattgctgatcctccctctatctcagccttcgacttggatgtggtgaagctgacggctcagtttgtggccaggaatgggcgccagtttctgacccagctgatgcagaaagagcagcgcaactaccagtttgactttctccgcccacagcacagcctcttcaactacttcacgaagctagtggaacagtacaccaagatcttgattccacccaaaggtttattttcaaagctcaagaaagaggctgaaaacccccgagaagttttggatcaggtgtgttaccgagtggaatgggccaaattccaggaacgtgagaggaagaaggaagaagaggagaaggagaaggagcgggtggcctatgctcagatcgactggcatgattttgtggtggtggaaacagtggacttccaacccaatgagcaagggaacttccctccccccaccacgccagaggagctgggggcccgaatcctcattcaggagcgctatgaaaagtttggggagagtgaggaagttgagatggaggtcgagtctgatgaggaggatgacaaacaggagaaggcggaggagcctccttcccagctggaccaggacacccaagtacaagatatggatgagggttcagatgatgaagaagaagggcagaaagtgcccccacccccagagacacccatgcctccacctctgcccccaactccagaccaagtcattgtccgcaaggattatgatcccaaagcctccaagcccttgcctccagcccctgctccagatgagtatcttgtgtcccccattactggggagaagatccccgccagcaaaatgcaggaacacatgcgcattggacttcttgaccctcgctggctggagcagcgggatcgctccatccgtgagaagcagagcgatgatgaggtgtacgcaccaggtctggatattgagagcagcttgaagcagttggctgagcggcgtactgacatcttcggtgtagaggaaacagccattggtaagaagatcggtgaggaggagatccagaagccagaggaaaaggtgacctgggatggccactcaggcagcatggcccggacccagcaggctgcccaggccaacatcaccctccaggagcagattgaggccattcacaaggccaaaggcctggtgccagaggatgacactaaagagaagattggccccagcaagcccaatgaaatccctcaacagccaccgccaccatcttcagccaccaacatccccagctcggctccacccatcacttcagtgccccgaccacccacaatgccacctccagttcgtactacagttgtctccgcagtacccgtcatgccccggcccccaatggcatctgtggtccggctgcccccaggctcagtgatcgcccccatgccgcccatcatccacgcgcccagaatcaacgtggtgcccatgcctccctcggcccctcctattatggccccccgcccaccccccatgattgtgccaacagcctttgtgcctgctccacctgtggcacctgtcccagctccagccccaatgccccctgtgcatcccccacctcccatggaagatgagcccacctccaaaaaactgaagacagaggacagcctcatgccagaggaggagttcctgcgcagaaacaagggtccagtgtccatcaaagtccaggtgcccaacatgcaggataagacggaatggaaactgaatgggcaggtgctggtcttcaccctcccactcacggaccaggtctctgtcattaaggtgaagattcatgaagccacaggcatgcctgcagggaaacagaagctacagtatgagggtatcttcatcaaagattccaactcactggcttactacaacatggccaatggcgcagtcatccacctggccctcaaggagagaggcgggaggaagaagtagacaagaggaacctgctgtcaagtccctgccattttgcctctcctgtctcccaccccctgccccagacccaggagcccccctgaggctttgccttgcctgcatatttgtttcgctcttactcagtttgggaattcaaattgtcctgcagaggttcattcccctgaccctttccccacattggtaagagtagctgggttttctaagccactctctggaatctctttgtgttagggtctcgatttgaggacattcatttcttcagcagcccattagcaactgagagcccagggatgtcctacaggatagtttcatagtgacaggtggcacttggctaatagaatatggctgatattgtcattaatcattttgtaccttgacatgggttgtctaataaaactcggacccttcttgtgaaaaaaaaaaaaaaaaaaaa

SEQ ID NO: 25286 - DNA, 2781 bp, Homo Sapiens
gtttgcgtttggagaatttcacctttggtaccaggtggccctctccatggtggcttgtgggaagtcagcctacgctgtgtccctgctgcgggagtgtgtgaagttgcggccctcggaccccaccgtgcccctgatggccgcgaaggtctgcatcgggtcccttcgctggctagaggaagcagagcactttgccatgatggtgatcagcctcggagaggaagccggggagttcctccccaagggctacctggctctgggtctcacctatagcctgcaggccaccgacgccaccctgaagtccaagcaagatgaattgcaccggaaggcactgcagacgctggagagggctcagcagctggcgcccagtgacccccaggtcatcctctatgtctcgctgcagctggccctcgtccgacagatctccagtgccatggagcagctgcaggaggccctgaaggtacgcaaggatgatgcccacgccctccacctgctggcactgctcttctctgcccagaagcaccaccagcatgccctggatgttgtcaacatggccatcaccgagcaccctgagaacttcaacctgatgttcaccaaggtgaagctggagcaggtgctgaaaggcccagaggaagccctcgtgacctgcagacaagtgctgaggctgtggcagaccctgtacagcttctcccagctgggaggcctagaaaaggatggcagcttcggtgagggcctcaccatgaagaagcagagtggcatgcacctgactttgcctgatgcccatgatgcagactctggctcccggcgggcttcgtccatcgccgcctcccggctggaggaggccatgtcagagctgactatgccctcttcggtcctgaagcagggccccatgcagctgtggaccacgctggaacagatctggctgcaggctgctgagctgttcatggagcagcagcacctcaaggaagcaggtttctgcatccaggaggcggcgggcctcttccccacttctcactcagtactctatatgcggggccggctggctgaggtgaagggcaacctggaggaggccaagcagctgtacaaggaggcgctcacggtgaacccagatggcgtgcgcatcatgcatagcctgggtctgatgctgagtcggctgggccacaagagcttggcccagaaggtgcttcgtgatgccgtggagaggcagagtacgtgccacgaggcgtggcagggcctgggcgaggtgctgcaggcccagggccagaacgaggctgccgttgactgcttcctcaccgcccttgagctggaggccagcagccctgtactgcccttctccatcatccccagagagctctgacgacgctgcagccgcagggagggaggggctggccagagggagaggcagcagggaacgtgggtcagggtggggcaacagtggcatcaggtgcggggcctcagggaaatacatctttagtgaacgcctctgcagctgcagccctcgttctcttggctgggccaagagggccttcctggatttctttgttggtgccttgggaaacagtctgacttgaaccctaagtgcctttggagagttttgtggtgaccagacttgctccccaagagctgggcagcggggagcctcacagctgtccttcaccctcacccatgcctctggcttggggtctgggtggggggttctcactccccactctcagcacagtacagacttctggatctctctcaggtcttgcccagggcggtcacaatgtgaagaaactgcgggcaagtgggaagactatgagatttctgggttcccttctcagacttggagttagtagatgattcctgcattgcccctgcttgccctctgagaccagctgggccccaccttgctctttccccctgctaccaagtgcctttggggcctctggggtctgaccaggggtactgagcaccggccctaacacttccatctccacccaccccatctccctggcgatgtgctccagcccaagcagcctccgtaggctttagatcctgtggttgccagatccagtcctttctaataccctgagtcaacacattactcctgcaggtcttaggctacaatgcaggtcccttgagggccaccaacatggaggtaggcagtttctaggactgtccccagtacatctcaccacccacagccctttttttgccttgattcgagcctcaccctggccttttggcttcccctgcctgagagagacctgaggaggggacagagcccagcccctctcctgtggctgagcaggcctctgtgtccatgacacctgtcttccgggcctgggggctgtgggtgtatgtcctccctactggcttccccggcccctgctgcatgatgctcttggaactcttccccaaggagtcagtcccccaggcctatcaggggatccttttgtatctgcactttgggttttagtttcaaagctccatcaggtacagcttgcatttcaggatgtgtggaaagctcgggtgagggctgccctggttcatcatagctccaccttcctcggaaggagtgggctgttggagaccccccatccatggcacactagctcagcactgcatttcccgagatgattcccaagacagctggtgcctcctggctttcctgtgccaggccaaggggcaccacagaggaccctggatcctttgcctcttcttggttgaaggatctctatgtatgtgtgtatataaatatagttttttatctatataaaaaaaaaaaaaaaaaaaaaaaaa

SEQ ID NO: 25287 - DNA, 1518 bp, Homo Sapiens
gtggcagctgtgggaggaggcggcgtggaaggccgaggagctcaagcccggaccaatccccacgttccgggccgcgaccctgaccctgcagcgtaccgggaagcgaaaccggccggatgggccgctgagcccgaatcgggcactgtgtggagccccctggagctgagatcaggatgttccgcttcatgagggacgtggagcctgaggatcccatgttcctgatggatccctttgctattcaccgtcagcatatgagccgtatgttgtcaggtggctttggatatagccccttcctcagcatcacagatggcaacatgccagggaccaggcctgccagccgccggatgcagcaggctggagctgtctccccctttgggatgctgggaatgtcgggtggtttcatggacatgtttgggatgatgaatgacatgattggaaacatggaacacatgacagctggaggcaattgccagaccttctcatcttccactgtcatctcctactccaatacgggtgatggtgcccccaaggtctaccaagagacatcagagatgcgctcggcaccaggcgggatccgggagacacggaggactgttcgggattcagacagtggactggagcagatgtccattgggcatcacatccgggacagggctcacatcctccagcgctcccgaaaccatcgcacgggggaccaggaggagcggcaggactatatcaacctggatgagagtgaggccgcagcgtttgatgacgagtggcggcgggagacctcccgattccggcagcagcgtcccctggagtttcggcggcttgagtcctcaggggctgggggacgaagggcggaggggcctccccgcctggccatccagggacctgaggactccccttcccgacagtcccgccgctatgactggtgagggccccgggccctcagcctctcttgtacaggctgagaggctgagaaatcatcccctgaataactttttcctctcgattcccatccccaatttaatattaaattaacaggcaagccggcccccacctctccctgggggtctcagggagaacctttcacggcaccctttccctaccttttccttctttaatctcctggtttaccattgatgacttcgcctctgcatctactgacttgatttttcattctgccactccatcttcaaaccccctcacctttcccatcctactcctgccatgcattgaagggtcaatgcattttggggtgagctctgggtttaggggccccctccatccctcagctaccctggatctttgcccacctcttcctcagagcccccactgaggggccgtagccctatctagggctgtggaaggagcagactggttcctaactctctccctcctcctgcccacacacatcaaaagaatcttccctacacccttctctgcctttattttttgatttgtgcaacttgtaactaggtgtttatggaataaaggagaatggaaaaaagaccaaaaaaaaaaaaaaaaaaa

SEQ ID NO: 25288 - DNA, 2568 bp, Homo Sapiens
gccccgggagcgcgggcggcgggccccttggtcctcaggcggccgtggcggcggtggcggcggttgggccgaggcaggcggcctcagtggccgaggtggctggacgcgtagcaggtggaaggagggagggagccgcaggcgcagacccacccgccatgaagccccccgcagcctgtgcaggagacatggcggacgcagcatctccgtgctctgtggtaaacgacctgcggtgggacctgagtgcccagcagatagaggagcgcaccagggagctcatcgagcagaccaagcgcgtgtatgaccaggttggcacccaggagtttgaggacgtgtcctacgagagcacgctcaaggcgctggccgatgtggaggtcacctacacagttcagaggaatatccttgacttcccccagcatgtttccccctccaaggacatccggacagccagcacagaggccgacaagaagctctctgagttcgacgtggagatgagcatgagggaggacgtgtaccagaggatcgtgtggctccaggagaaagttcagaaggactcactgaggcccgaggctgcgcggtacctggagcggctaatcaagctgggccggagaaatgggcttcacctccccagagagactcaggaaaacatcaaacgcatcaagaagaagctgagccttctgtgcatcgacttcaacaagaacctgaacgaggacacgaccttcctgcccttcacgctccaggagctaggagggctccccgaggactttctgaactccctggagaagatggaggacggcaagttgaaggtcaccctcaagtacccccattacttccccctcctgaagaaatgccacgtgcctgagaccaggaggaaagtggaggaggccttcaactgccggtgcaaggaggagaactgcgctatcctcaaggagctggtgacgctgcgggcccagaagtcccgcctgctggggttccacacgcacgccgactatgtcctggagatgaacatggccaagaccagccagaccgtggccaccttcctagatgagctggcgcagaagctgaagcccctgggggagcaggagcgtgcggtgattctggagctgaagcgtgcggagtgcgagcgccggggcctgcccttcgacggccgcatccgtgcctgggacatgcgctactacatgaaccaggtggaggagacgcgctactgcgtggaccagaacctgctcaaggagtacttccccgtgcaggtggtcacgcacgggctgctgggcatctaccaggagctcctggggctggccttccaccacgaggagggcgccagtgcctggcatgaggacgtgcggctctacaccgcgagggacgcggcctcgggggaggtggtcggcaagttctacctggacctgtacccgcgggaaggaaagtacgggcacgcggcctgctttggcctgcagcccggctgcctgcggcaggatgggagccgccagatcgccatcgcggccatggtggccaacttcaccaagcccacagccgacgcgccctcgctgctgcagcatgacgaggtggagacctacttccatgagtttggccacgtgatgcaccagctctgctcccaggcggagttcgccatgttcagcgggacccacgtggagcgggactttgtggaggcgccgtcgcagatgctggagaactgggtgtgggagcaggagccgctgctgcggatgtcgcggcactaccgcacaggcagcgccgtgccccgggagctcctggagaagctcattgagtcccggcaggccaacacaggcctcttcaacctgcgccagatcgtcctcgccaaggtggaccaggccctgcacacgcagacggacgcagaccccgccgaggagtatgcgcggctctgccaggagatcctcggggtcccggccacgccaggaaccaacatgcctgcaaccttcggccatctggcaggtggctacgacgcccagtactacgggtacctgtggagcgaggtgtattccatggacatgttccacacgcgcttcaagcaggagggtgtcctgaacagcaaggttggcatggattacagaagctgcatcctgagacccggcggttccgaggatgccagcgccatgctgaggcgcttcctgggccgtgaccccaagcaggacgccttcctcctgagcaaggggctgcaggtcgggggctgcgagcccgagccgcaggtctgctgaggcctggcactgcgactgcccagtctggcctgcgctcccgccgccctggtgccttagcccccggcacaggatggggcaggctctggcacagtgcctgggactggcagggtggctgagcggctgtcttgcctcttgtcattgtctgtccccacccggtcgtggcccacccggctagagacggcgtcctcaaggcatctggagggctttcgtggctgccagggcctggtctttgttgcactaacacgtctcctctctgggaaacgtcccttgtcaggagacggctcttctttgaaatgaggtcattaaaaggaaacagaaaaagagaaaaaaaaaaaaaaaaaaa

SEQ ID NO: 25289 - DNA, 2279 bp, Homo Sapiens
ttcggagagaagcctgatatgtaacccaggcaggtgggagcctcagtctgtcgggctgaggtctggcatctacaaagcctcttggccgtgttctgaacttgaagcctggaggagttctctgctcagcacagccaaggaacagaattagaagaaaaggaaccctggcctgaggcaggtgacaaacattaccaccccagctgtgcacgatgcagcagatgcaaccagatgttcacagaaggagaggaaatgtatcttcaaggctccaccgtttggcatcccgactgtaagcaatctacgaagaccgaggaaaagctgcgggcaaaagtagacaatgagatcctggattacaaggatttagcagccattccgaaggtcaaggcaatttatgacattgaacgtccagatcttattacctatgagcctttctacacttcgggctatgatgacaaacaggagagacagagccttggagagtctccgaggactttgtctcctactccatcagcagaagggtaccaggatgttcgggatcggatgatccatcggtccacgagccagggctccatcaactcccctgtgtacagccgccacagctacactccaaccacgtcccgctctccccagcatttccacagacctgatcaaggaatcaacatttaccgaaagccacccatctacaaacagcatgctgccttggcagcccagagcaagtcctcagaagatatcatcaagttttccaagttcccagcagcccaggcaccagaccccagcgagacaccaaagattgagacggaccactggcctggtcccccctcatttgctgtcgtaggacctgacatgaaacgcagatctagtggcagagaggaagatgatgaggaacttctgagacgtcggcagcttcaagaagagcaattaatgaagcttaactcaggcctgggacagttgatcttgaaagaagagatggagaaagagagccgggaaaggtcatctctgttagccagtcgctacgattctcccatcaactcagcttcacatattccatcatctaaaactgcatctctccctggctatggaagaaatgggcttcaccggcctgtttctaccgacttcgctcagtataacagctatggggatgtcagcgggggagtgcgagattaccagacactcccagatggccacatgcctgcaatgagaatggaccgaggagtgtctatgcccaacatgttggaaccaaagatatttccatatgaaatgctcatggtgaccaacagagggcgaaacaaaatcctcagagaggtggacagaaccaggctggagcgccacttagcccctgaagtgtttcgggaaatctttggaatgtccatacaggagtttgacaggttacctctttggagacgcaacgacatgaagaaaaaagcaaaactcttctaagtcccactcgtgaatggcaattagagaaaggactgacagtggcggtgccccataggatgtcatattgaggcccaaacttgattggagaatttgcaaactaccgtcgctcagcaacaccaaaaagagaaagtctggttaaaacaccatgagtcaaatgtcgggccagccaacagtaacacttgccaagaagcatggcgtagaaatttctatgttccgaaacacagagtagtgtccacatgtgagcttttcacattaccttatgtatacaacaggagctgcgttgttttcttctttttcttttcctttatctgttgtccaacaacagtgctgactgtccggataagagctggcaagtgcccttaggatgccgcatgggaaaaatcggttatcataatttcaaagtataaatatatttattaagtagcgctgcggctaagaaggaagagtgaggggtctgtccatggggtggcagtgatttcacacccgcctttcttgaatggcttcgtgttactcagccgtgccctggcaggaatggaactccatcagggaacagggcagctctgtttgaatggggtgaaaaacagcaaaattaattcttagcaagctccttgttctctactgttcaccgggacctggctggcaaatgacttagctattagtatatttaaaaactgttcaaaagcaaaagagaaggaacaggaatgaaaggaaaccttcccttaactctttctgcttcccatagcaggtctggttcctgctccccgcctaggacaggagctgtctggagctccacctttgcaaaaaaaaaaaaaaaaaaaaaaaaaaaaaaaaaaaaaaaaaaaaaaaaa

SEQ ID NO: 25290 - DNA, 1194 bp, Homo Sapiens
ccgccttctgcatcgcggcttcggcggcttccacctagacacctaacagtcgcggagccggccgcgtcgtgagggggtcggcacggggagtcgggcggtcttgtgcatcttggctacctgtgggtcgaagatgtcggacatcggagactggttcaggagcatcccggcgatcacgcgctattggttcgccgccaccgtcgccgtgcccttggtcggcaaactcggcctcatcagcccggcctacctcttcctctggcccgaagccttcctttatcgctttcagatttggaggccaatcactgccaccttttatttccctgtgggtccaggaactggatttctttatttggtcaatttatatttcttatatcagtattctacgcgacttgaaacaggagcttttgatgggaggccagcagactatttattcatgctcctctttaactggatttgcatcgtgattactggcttagcaatggatatgcagttgctgatgattcctctgatcatgtcagtactttatgtctgggcccagctgaacagagacatgattgtatcattttggtttggaacacgatttaaggcctgctatttaccctgggttatccttggattcaactatatcatcggaggctcggtaatcaatgagcttattggaaatctggttggacatctttattttttcctaatgttcagatacccaatggacttgggaggaagaaattttctatccacacctcagtttttgtaccgctggctgcccagtaggagaggaggagtatcaggatttggtgtgccccctgctagcatgaggcgagctgctgatcagaatggcggaggcgggagacacaactggggccagggctttcgacttggagaccagtgaaggggcggcctcgggcagccgctcctctcaagccacatttcctcccagtgctgggtgcgcttaacaactgcgttctggctaacactgttggacctgacccacactgaatgtagtctttcagtacgagacaaagtttcttaaatcccgaagaaaaatataagtgttccacaagtttcacgattctcattcaagtccttactgctgtgaagaacaaataccaactgtgcaaattgcaaaactgaaaaaaaaaaaaaaaaaaaaaaaaaaaaaaaaaaaaaaaaaaaaaaaaaaaaaaaaaaaaaaaaaaa

SEQ ID NO: 25291 - DNA, 2299 bp, Homo Sapiens
gctgcttgcactctgaatttgggctattcaggtagtgtgctcaaagttgaaaccgcatacagcacaactcaagtttgcatcagactgggaagcgaacttaagccagcggtgcgtggcccaggagtgggaaaggaaatggatgcctgaagtggaagaggtggtgcagagggggcaccgcccatgctgccctgcttccaactgctgcgcatagggggcggcaggggcggtgatctctacaccttccacccccccgccggggctggctgcacctatcgcttgggccacagggccgacctgtgtgatgtggccctgcggccccagcaggagcctggcctcatctctgggatccacgccgaactgcatgccgagccccggggtgatgactggagggtcagcctggaagaccacagcagccaaggtactttggtcaataatgtccgactcccaagaggtcacaggctggaattgagtgatggagacctcctgacctttggccctgaagggcccccaggaaccagcccctcggagttctacttcatgttccaacaagtacgagtcaagcctcaggactttgctgccattaccatcccacggtctaggggagaagcccgggttggggctggtttccggcctatgctgccctcccagggggctccacagcggcctctcagcaccttctcccctgcccccaaggccacactgatcctaaactccataggcagcctcagcaagctccggccccagcccctcaccttctcccctagttggggtggaccaaagagcctgcctgttcccgccccacctggggaagtggggaccacgccttctgctccaccccaacgcaatcggaggaaatctgttcaccgagtgttggcggaactggatgatgagagtgagcctcttgagaacccgccaccggtccttatggagcccaggaagaaactccgtgtagacaaagccccactgactcccactggaaatcgacgtggccgtcctcggaagtacccagtgagcgctcccatggctccccctgcagttgggggcggggagccctgtgcagctccttgttgctgcctgccccaggaagagacagtggcctgggttcagtgtgatggctgtgacgtctggttccatgtggcctgtgttggctgcagcatccaggctgccagggaggccgacttccgatgcccagggtgccgggctggcattcagacctaaggtccaccgccaaggcaccatcggacacacctgcccatgagtagacacagcagcgagcaaataggtctgataaataccccccttcccttccctccccaggagggaatgactacagggaagaaggatggattgatgtggactcattcagggcctggagcagaccctggtggccaagacagaagagatggtttcctgccaaagatattgccacctccaggaaattgccagtgagctggaagttcccactattacaagccataaggccatgttgccatggacaccagaatatctgtagtcagagcacctatcagttgcaaaagccatgcctgcaaccgatggaaaatgtaagagggagttcttaaggttcttgatggcatcacccaaggcattctgggaaaacctagggcctggccccaaaacttccctactctgtggctagtcctgctgccaacaaaatcgtagcgacctggcttttcacagctttgcttttatttccaagtcaaggacaagccgcttcattcactcctgggcatttactcttcttgtgggtctgtgatattccttgctttccagggagaatgtgcttggcaaggtctggagaactaattcagaatcttaggggaaggggagagatggaaatacaaacctgcttactggaaaggtgcaaatatatgggttgagctggaggtaggaatacaggtaattaaggtttctggtttaagggaaaacagatctattgccatttaaataaggtaactgggatttggttaagttcacaaagttagcagaagatttatttacaggcttcacctgtactgtcagggcaagagaaagcctggtaaaccagctacagcagtttaccagtgtgatggctgtgacacagctccactccacgggtggacacagcagagggcaactgggctggcctggttcagtgtgaatcaaaccgcttaacccacacatggtacatgtgattttcttttgtgagccttacaccaagccaaactattgtcaaagcatcatttctatagaaataaagccttatcttgacctgttctattaaaaaaaaaaaaaaaaaaaa

SEQ ID NO: 25292 - DNA, 1627 bp, Homo Sapiens
ggaccggaagtgctccagaactcaagcctgaagcaggccacactccccagaaatgagggacccaatcacacaaggatgcaaatcctgactccacccctccaatcctcagtggagctggtcgcagatcctgagacccggacagtggcagtgaaacagctgggagttaacccctcaactaccgggacccaggagttgaagccggggttggagggctctctgggggtgggggacacactgtatttggtcaatggcctccacccactgaccctgcgctgggaagagacccgcacaccagaatcccagccagatactccgcctggcacccctctggtgtcccaagatgagaagagagatgctgagctgccgaagaagcgtatgcggaagtcaaaccccggctgggagaacttggagaagttgctagtgttcaccgcagctggggtgaaaccccagggcaaggtggctggctttgatctggacgggacgctcatcaccacacgctctgggaaggtctttcccactggccccagtgactggaggatcttgtacccagagattccccgtaagctccgagagctggaagccgagggctacaagctggtgatcttcaccaaccagatgagcatcgggcgcgggaagctgccagccgaggagttcaaggccaaggtggaggctgtggtggagaagctgggggtccccttccaggtgctggtggccacgcacgcaggcttgtaccggaagccggtgacgggcatgtgggaccatctgcaggagcaggccaacgacggcacgcccatatccatcggggacagcatctttgtgggagacgcagccggacgcccggccaactgggccccggggcggaagaagaaagacttctcctgcgccgatcgcctgtttgccctcaaccttggcctgcccttcgccacgcctgaggagttctttctcaagtggccagcagccggcttcgagctcccagcctttgatccgaggactgtctcccgctcagggcctctctgcctccccgagtccagggccctcctgagcgccagcccggaggtggttgtcgcagtgggattccctggggccgggaagtccacctttctcaagaagcacctcgtgtcggccggatatgtccacgtgaacagggacacgctaggctcctggcagcgctgtgtgaccacgtgtgagacagccctgaagcaagggaaacgggtcgccatcgacaacacaaacccagacgccgcgagccgcgccaggtacgtccagtgtgcccgagccgcgggcgtcccctgccgctgcttcctcttcaccgccactctggagcaggcgcgccacaacaaccggtttcgagagatgacggactcctctcatatccccgtgtcagacatggtcatgtatggctacaggaagcagttcgaggccccaacgctggctgaaggcttctctgccatcctggagatcccgttccggctatgggtggagccgaggctggggcggctgtactgccagttctccgagggctgagccccgcccagctcccctccacaataaacgctgtttctccttgaaaaaaaaaaaaaaaaaaaaaaaaaaaaaaaaaaaaaaaaaaaaaaaaaaaaaaaaaaaa

SEQ ID NO: 25293 - DNA, 2658 bp, Homo Sapiens
attatttttggtgattaattttctgggggggactgggacgcggggcccggcggcgcggccccgcatcgcagcggccgggcagcggggcctgggacgcgccccgaggaggagcggggcggcgcaggcggagagaacattgaaagtattctctaagctatttgaagagagtgactaaatgcacctgggtcaggctgtctgtgggtatgaagtggttgggagaatccaagaacatggtggtgaatggcaggagaaatggaggcaagttgtctaatgaccatcagcagaatcaatcaaaattacagcacacggggaaggacaccctgaaggctggcaaaaatgcagtcgagaggaggtcgaacagatgtaatggtaactcgggatttgaaggacagagtcgctatgtaccatcctctggaatgtccgccaaggaactctgtgaaaatgatgacctagcaaccagtttggttcttgatccctatttaggttttcaaacacacaaaatgaatactagcgcctttccttcgaggagctcaaggcatttttcaaaatctgacagtttttctcacaacaaccctgtgagatttaggcctattaaaggaaggcaggaagaactaaaggaagtaattgaacgttttaagaaagatgaacacttggagaaagccttcaaatgtttgacttcaggcgaatgggcacggcactattttctcaacaagaataaaatgcaggagaaattattcaaagaacatgtatttatttatttgcgaatgtttgcaactgacagtggatttgaaatattgccatgtaatagatactcatcagaacaaaatggagccaaaatagttgcaacaaaagagtggaaacgaaatgacaaaatagaattactggtgggttgtattgccgaactttcagaaattgaggagaacatgctacttagacatggagaaaacgacttcagtgtcatgtactccacaaggaaaaactgtgctcaactctggctgggtcctgctgcgtttataaaccatgattgcagacctaattgtaagtttgtgtcaactggtcgagatacagcatgtgtgaaggctctaagagacattgaacctggagaagaaatttcttgttattatggagatgggttctttggagaaaataatgagttctgcgagtgttacacttgcgaaagacggggcactggtgcttttaaatccagagtgggactgcctgcgcctgctcctgttatcaatagcaaatatggactcagagaaacagataaacgtttaaataggcttaaaaagttaggtgacagcagcaaaaattcagacagtcaatctgtcagctctaacactgatgcagataccactcaggaaaaaaacaatgcaagtaagtaagggagatttgataagcatatcttttaaaagtattttcacacaatttgctttataaagtgtgcttcagtagttttaaacttttaaatactcagagagactgggacttgtgagctttggctgcacttcaaggctctagacgtgatttgagtagaggcacagtctgtatcccatctctaacttcagtaccgtcctctagactatttttcttgaataccttggtaactggatatgagttcttcatcatatgttccaaggtcatcatatgttttaaacattttcaaggtgttagagactgtgatgatgtcgctaagtcctgcaagaagacaaaaggactgagtagaattaaattagactctatacattccagtgcctagccagtttgttagaaaagatgatggacttggggaattcatagcttctggccttaaggcttccaccttttcattgcttgctgacctttttcaaaacgaactgactcagttcagcagaccaccagtaccagactcagaattgtgatagaggagcattttgaacagtgccgtattgtgacatgctgtattggctactccagaaagtaggagtaaagatggaaaggagaaagaagcaacctctgagattccagtggtgtgtgggggcaagatctgatggaaactgaaaaagagaacgaagactaaacaaagagaaaggaaagagaagaaaccctaaatgggcaaaggaaagcacatcctgtttgcggagctttgaaatattggaaccatttctaattgctcctgtttttctgggtaacaccagttttctgtagttgccactaaagcagtagactcttgagtctcacttgtctctgagagagacagaagttagaaagttttgacttggcgattccgaaagtatgcctttgttggcacttaaatgtccagtgagacttcttggcaccttagagccctctgagatactgattattttaggttcttctccctactttcagatgttttcagcccaacactgggtgctctcttccactacagagaatcctgaagaaaagggaaggtgtttcccatgatggtgaatgtcactgccatgaattcctgaatctacctgctgctgggagtcagagtccaagcataacccgtgtagcataaaagcagcgctgtagccctattccagtctttttcgttaatgtccagagtgaacaacaagagttagtcaatcattaactgttgactgttgattctcataataaatgcagcataacgacaaaaaaaaaaaaaaaaaa

SEQ ID NO: 25294 - DNA, 956 bp, Homo Sapiens
ggcggccgggagggggctccggggaccatggggctcctgaccattctgaagaagatgaagcagaaagagcgggagctgcgactgctcatgcttggcctggacaatgctggaaagacaaccatcctgaagaagttcaatggggaggacatcgacaccatctccccaacgctgggcttcaacatcaagaccctggagcaccgaggattcaagctgaacatctgggatgtgggtggccagaagtccctgcggtcctactggcggaactactttgagagcaccgatggcctcatctgggtagtggacagcgcagaccgccagcgcatgcaggactgccagcgggagctccagagcctgctggtggaggagcgcctggccggagcaaccctcctcatctttgctaataagcaggacctgcctggagcactgtcctctaacgccatccgcgaggtcctggagctggactccatccgcagccaccactggtgcatccagggctgcagcgccgtcaccggggagaacctgctgccgggcatcgactggctcctggatgacatttccagccgcattttcacagctgactgaaccactccagatgccccccacctagcagtccaggtccctcaaccttcaccaaacactacccatggggggttgggagtcagccggccaaactaacactccccctcctccaccccagcctgctgctgctactgctgcccgctgctgctctgtggccacccggctcccatggcgggagggctgtgccctggctgtctctctggctcctgacctggcctttggctaccataccaagaagagagggctgggcggggaggagctgctactgctgctaccgaggctgtgggcctcatccttcactcagttgtgaaataaaccgctccttgccccgaaaaaaaaaaaaaaaaaaaaaaaaaaaaaaaaaaaaaaaaaaaaaa

SEQ ID NO: 25295 - DNA, 794 bp, Homo Sapiens
ctctgtcgtggcgcggcttcccgcggtcttctctgcaaatgggctccgtggcctagcgcccccgtccccgccacccgtgatcgtgcgccgaggcccgcgaggggtcgccgcccagatcccaccagccagcaagctaaagcatggcggccatcccctccagcggctcgctcgtggccacccacgactactaccggcgccgcctgggttccacttccagcaacagctcctgcagcagtaccgagtgccccggggaagccattccccaccccccaggtctccccaaggctgacccgggtcattggtgggccagcttctttttcgggaagtccaccctcccgttcatggccacggtgttggagtccgcagagcactcggaacctccccaggcctccagcagcatgaccgcctgtggcctggctcgggacgccccgaggaagcagcccggcggtcagtccagcacagccagcgctgggcccccgtcctgacctgagcggttaccaccagccccaggcctgcggaggcgctagtccaccagagcccctccccgcccctctccccactccgcatccctcgcccccctccccacctcccaccccccaccctgtaaactaggcggctgcagcaagcagaccttcgcatcaacacagcagacaccaaaaaccagtgagagccccgctctctaccgcccggccccagcactcgctagctttcctgacacctggaactgtgcacctggcaccaagcggaaaataaactccaagcagccagtagccccgaaaaaaaaaaaaaaaaaa

SEQ ID NO: 25296 - DNA, 1764 bp, Homo Sapiens
acaaagaaggtaagggcagtgagaatgatgcatcttgcattccttgtgctgttgtgtctgccagtctgctctgcctatcctctgagtggggcagcaaaagaggaggactccaacaaggatcttgcccagcaatacctagaaaagtactacaacctcgaaaaggatgtgaaacagtttagaagaaaggacagtaatctcattgttaaaaaaatccaaggaatgcagaagttccttgggttggaggtgacagggaagctagacactgacactctggaggtgatgcgcaagcccaggtgtggagttcctgacgttggtcacttcagctcctttcctggcatgccgaagtggaggaaaacccaccttacatacaggattgtgaattatacaccagatttgccaagagatgctgttgattctgccattgagaaagctctgaaagtctgggaagaggtgactccactcacattctccaggctgtatgaaggagaggctgatataatgatctcttttgcagttaaagaacatggagacttttactcttttgatggcccaggacacagtttggctcatgcctacccacctggacctgggctttatggagatattcactttgatgatgatgaaaaatggacagaagatgcatcaggcaccaatttattcctcgttgctgctcatgaacttggccactccctggggctctttcactcagccaacactgaagctttgatgtacccactctacaactcattcacagagctcgcccagttccgcctttcgcaagatgatgtgaatggcattcagtctctctacggacctccccctgcctctactgaggaacccctggtgcccacaaaatctgttccttcgggatctgagatgccagccaagtgtgatcctgctttgtccttcgatgccatcagcactctgaggggagaatatctgttctttaaagacagatatttttggcgaagatcccactggaaccctgaacctgaatttcatttgatttctgcattttggccctctcttccatcatatttggatgctgcatatgaagttaacagcagggacaccgtttttatttttaaaggaaatgagttctgggccatcagaggaaatgaggtacaagcaggttatccaagaggcatccataccctgggttttcctccaaccataaggaaaattgatgcagctgtttctgacaaggaaaagaagaaaacatacttctttgcagcggacaaatactggagatttgatgaaaatagccagtccatggagcaaggcttccctagactaatagctgatgactttccaggagttgagcctaaggttgatgctgtattacaggcatttggatttttctacttcttcagtggatcatcacagtttgagtttgaccccaatgccaggatggtgacacacatattaaagagtaacagctggttacattgctaggcgagatagggggaagacagatatgggtgtttttaataaatctaataattattcatctaatgtattatgagccaaaatggttaatttttcctgcatgttctgtgactgaagaagatgagccttgcagatatctgcatgtgtcatgaagaatgtttctggaattcttcacttgcttttgaattgcactgaacagaattaagaaatactcatgtgcaataggtgagagaatgtattttcatagatgtgttattacttcctcaataaaaagttttattttgggcctgttccttaaaaaaaaaaaaaaaaaaa

SEQ ID NO: 25297 - DNA, 2177 bp, Homo Sapiens
tttgttcggctgaggggagggccgttggccggggcctgcggtacgccgcttcagtgagggacgccactgcggccacccggcttgctgccttcctgggcgccactcccccaggcgacccgacgcgacgcgccagtagcgcagcaccgattcctctcgggctcttgggcgctgctctgagcagcgtcaccctttacaccagaaagctggcgggcactatggggaaaaaacaaaacaagaagaaagtggaggaggtgctagaagaggaggaagaggaatatgtggtggaaaaagttctcgaccgtcgagtggtaaagggcaaagtggagtacctcctaaagtggaagggattctcagatgaggacaacacatgggagccagaagagaacctggattgccccgacctcattgctgagtttctgcagtcacagaaaacagcacatgagacagataaatcagagggaggcaagcgcaaagctgattctgattctgaagataagggagaggagagcaaaccaaagaagaagaaagaagagtcagaaaagccacgaggctttgctcgaggtttggagccggagcggattattggagctacagactccagtggagagctcatgttcctgatgaaatggaaaaactctgatgaggctgacctggtccctgccaaggaagccaatgtcaagtgcccacaggttgtcatatccttctatgaggaaaggctgacgtggcattcctacccctcggaggatgatgacaaaaaagatgacaagaactaacgctcctgagtaccagcccctgtcacatctgactgtgggtttcaagtgggaagggaaggagttctacttgtcttgacaccatagaggtggcttgagaagatgtcctttgaagagccagtatagtttctgtgccctgcagcagcccaagtgctttaaagccgtttcaagctgtatagtttgcacacccatcccagtggaggggaaaggggataagtgtttcaaggcaaccttttctgcactttgctgcgaaaagcaaagggccttctatgaaggacaaaacttgcagaattgggtgtgtgggagagcaaaaaaatactgtagatcttcaaagagcatctccacaacccacagccttcttcccaatagtgttaactctgcatttttacagcgtagcatgtgtgtagtttttggctattactggtgtattatttgggggagggagggatggggaggggagaaagggagatgggtagcatcattttgattaacatttggggcctgataggggaaatggtgaagcaatggaaaagaacagacaactaatgatttgcttctatgtccagaatattttacctttaaaaaaatgtcattggcaccataaataaggactgtgagagactgtttaaaagctgtgaaagtctaaaacctataagccaaggtgttccctgcctaaacttattgctgttcccacaaaggactaagcctgttcataagttaccaaagttgccattttggagatggaaattgacgaggagggaaggtcttttattggagagtatacagtacaagcagatcattctgccttagaggtgctaattcccgaaattagaagaccctttcttttccagtaacgaagttataaatatcagcttgttcatccaagccactggctgaggtgttaggaagaggaagagggtggtagaggaggtaagacagtagggaaagacaagggcccatgctcttagtggggaaaactcttggagccgtttactttgagctttgaacactgaaaccattgttggcagggttcagtcactgacagcacaagtttcactgaattgatccaagagtttagtgatttcaaaagccttggtctcaggagaagattaaactttcatattgggcagtggttcactttaaaacacacacatacacacacaaaacaattttttaagaaatcctaataagtaacatacccaaaatgctctgtcttgagtcatgagaaccatcagttcttgatattgtctagacttgcatctagagctacgttgtaaaattcttttaggcatgtgttagatttctgtgtaaactttgtttaaatgtaaacttcatactacattgtcagtttttgtcttaataaaactatagatttataatccctgaaaaaaaaaaaaaaaaaaaaaa

SEQ ID NO: 25298 - DNA, 2066 bp, Homo Sapiens
ggcacgaggtcggctgttgcagcctgctgcgcgcccaggggtcccgcgggttttcgggcgcagggtggcgcccgcggcaggcggcggccatgaacttctccgaggtattcaagctctccagcttactctgcaagttctccccggacggcaagtacctggcttcctgtgtccagtaccggttagtggtccgggatgtgaacacccttcagatccttcagctgtacacgtgcctagaccagatccagcacatcgagtggtcggcagactcgctcttcatcctgtgcgccatgtacaagcgagggctggtgcaggtctggtctttagagcagcccgaatggcactgcaaaatagacgagggctcagccgggctggtggcctcgtgctggagcccggacgggcgccacattctcaacaccacggaattccatctgcggataaccgtctggtccttgtgcacaaaatccgtgtcttacatcaaatacccgaaagcttgtctgcagggaatcaccttcaccagggacggccgctacatggcgctggcagaacggcgcgactgcaaagattacgtgagcatcttcgtctgcagtgattggcagctcctgcggcattttgatacggacacccaggatctcacagggattgagtgggccccaaacggctgtgtgctggcagtgtgggacacctgcttggagtacaagattctgctgtactcattggatggccggttgttgtccacgtacagcgcttacgagtggtccctgggcatcaagtctgtggcctggagccccagcagtcagttcctggcagttgggagctatgatggaaaggtgcgcatccttaatcacgtgacttggaaaatgatcacggagtttgggcatcctgcagccattaatgatcccaagatagtggtgtataaggaggccgagaagagcccacagctgggactgggctgcctctccttcccgccgccccgggccggggccggccctctcccgagctcagagagtaaatatgagatcgcctctgtcccagtctccttacagacactgaaacctgttaccgacagagcaaacccgaaaatcggcataggaatgctggcatttagtcctgacagctacttcctggcgacaaggaacgacaacattcccaatgccgtctgggtctgggacattcagaagctgaggctgttcgcggtgctcgagcagctgtccccagtgcgcgcatttcagtgggacccgcagcagccgcggctggccatctgcacgggaggcagcaggctctacctgtggtccccagcgggctgcatgtcggtgcaggtgcctggggaaggtaagcacatccccgaggccacggacgtggcagccttgctgtgtgcagtctggcatcacacgggctgaactgttgaagcccagctgctgtctccggcagcactccagggaaactgccctcagagtctttgcgtaaacctcaagacggacacacaggggacccgctgccctcagctttatgggctagaagcagcctctccctgacttgaggcagctctggggctccaccctggctctgcctatgtgggtcactccaggcactgtgctggcctgcaggacaagggggtgcccatcccccagaatctgggcctcccctgctgtaatcctctggccacctgtctctctctaggcgactttgcagtgctctctctgtgctggcatttaagcggagactcgatggccctcctcagcaaggatcacttctgcctctgcttcctggagacagaggcagtggtcggcacagcctgcagacagctgggcggccacacgtagcagcggtgcactaacgtgtgcagaaacagggctactctgtgtttccagtgtgggaaaaaacacagcttcaccaggaggttctccactgtggtggtctggattcagtgattgattctatttttctatagcaaagcatttttgtaaatatgtatggtataaaactgtagttttattatttaaaataaatacttgctgatttataaaaaaaaaaaaaaaaaaaaaaaaaaaaaaaaaaaaaaaaaaaaa

SEQ ID NO: 25299 - DNA, 972 bp, Homo Sapiens
gcgagccggagcgacggcggggctggggccggagccgagccggggtcgggcagcagcagggaccccccagaggcggggcctgtgggaccgctatgggcgtggagatcgagaccatctcccccggagacggaaggacattccccaagaagggccaaacgtgtgtggtgcactacacaggaatgctccaaaatgggaagaagtttgattcatccagagacagaaacaaacctttcaagttcagaattggcaaacaggaagtcatcaaaggttttgaagagggtgcagcccagctgggtcctctttctcctctccccatctgcccccatccctgctagatgagcttggggcagagggcgaagctgacctgcacccctgatgtggcatatggagccacgggccaccccggtgtcatccctcccaatgccaccctcatctttgacgtggagctgctcaacttagagtgaaggcaggaaggaactcaaggtggctggagatggctgctgctcaccctcctagcctgctctgccactgggacggctcctgcttttggggctcttgatcagtgtgctaacctcactgcctcatggcatcatccattctctctgcccaagttgctctgtatgtgttcgtcagtgttcatgcgaattcttgcttgaggaaacttcggttgcagattgaagcatttcaggttgtgcattttgtgtgatgcatgtagtagcctttcctgatgacagaacacagatctcttgttcgcacaatctacactgccttaccttcacttaaaccacacacacaaggtgctcagacatgaaatgtacatggcgtaccgtacacagagggacttgagccagttacctttgctgtcactttctctcttataaattctgttagctgctcacttaaacaatgtcctctttgagaaaatgtaaaataaaggctctgtgcttgacaaaaaaaaaaaaaaaaaaaaaa

SEQ ID NO: 25300 - DNA, 3574 bp, Homo Sapiens
cttctgcctaggtcccaacgcttcggggcaggggtgcggtcttgcaataggaagccgagcgtcttgcaagcttcccgtcgggcaccagctactcggccccgcaccctacctggtgcattccctagacacctccggggtccctacctggagatccccggagccccccttcctgcgccagccatgcctttaaaccgcactttgtccatgtcctcactgccaggactggaggactgggaggatgaattcgacctggagaacgcagtgctcttcgaagtggcctgggaggtggctaacaaggtgggtggcatctacacggtgctgcagacgaaggcgaaggtgacaggggacgaatggggcgacaactacttcctggtggggccgtacacggagcagggcgtgaggacccaggtggaactgctggaggcccccaccccggccctgaagaggacactggattccatgaacagcaagggctgcaaggtgtatttcgggcgctggctgatcgagggaggccctctggtggtgctcctggacgtgggtgcctcagcttgggccctggagcgctggaagggagagctctgggatacctgcaacatcggagtgccgtggtacgaccgcgaggccaacgacgctgtcctctttggctttctgaccacctggttcctgggtgagttcctggcacagagtgaggagaagccacatgtggttgctcacttccatgagtggttggcaggcgttggactctgcctgtgtcgtgcccggcgactgcctgtagcaaccatcttcaccacccatgccacgctgctggggcgctacctgtgtgccggtgccgtggacttctacaacaacctggagaacttcaacgtggacaaggaagcaggggagaggcagatctaccaccgatactgcatggaaagggcggcagcccactgcgctcacgtcttcactactgtgtcccagatcaccgccatcgaggcacagcacttgctcaagaggaaaccagatattgtgacccccaatgggctgaatgtgaagaagttttctgccatgcatgagttccagaacctccatgctcagagcaaggctcgaatccaggagtttgtgcggggccatttttatgggcatctggacttcaacttggacaagaccttatacttctttatcgccggccgctatgagttctccaacaagggtgctgacgtcttcctggaggcattggctcggctcaactatctgctcagagtgaacggcagcgagcagacagtggttgccttcttcatcatgccagcgcggaccaacaatttcaacgtggaaaccctcaaaggccaagctgtgcgcaaacagctttgggacacggccaacacggtgaaggaaaagttcgggaggaagctttatgaatccttactggttgggagccttcccgacatgaacaagatgctggataaggaagacttcactatgatgaagagagccatctttgcaacgcagcggcagtctttcccccctgtgtgcacccacaatatgctggatgactcctcagaccccatcctgaccaccatccgccgaatcggcctcttcaatagcagtgccgacagggtgaaggtgattttccacccggagttcctctcctccacaagccccctgctccctgtggactatgaggagtttgtccgtggctgtcaccttggagtcttcccctcctactatgagccttggggctacacaccggctgagtgcacggttatgggaatccccagtatctccaccaatctctccggcttcggctgcttcatggaggaacacatcgcagacccctcagcttacggtatctacattcttgaccggcggttccgcagcctggatgattcctgctcgcagctcacctccttcctctacagtttctgtcagcagagccggcggcagcgtatcatccagcggaaccgcacggagcgcctctccgaccttctggactggaaatacctaggccggtactatatgtctgcgcgccacatggcgctgtccaaggcctttccagagcacttcacctacgagcccaacgaggcggatgcggcccaggggtaccgctacccacggccagcctcggtgccaccgtcgccctcgctgtcacgacactccagcccgcaccagagtgaggacgaggaggatccccggaacgggccgctggaggaagacggcgagcgctacgatgaggacgaggaggccgccaaggaccggcgcaacatccgtgcaccagagtggccgcgccgagcgtcctgcacctcctccaccagcggcagcaagcgcaactctgtggacacggccacctccagctcactcagcaccccgagcgagcccctcagccccaccagctccctgggcgaggagcgtaactaagtccgccccaccacactccccgcctgtcctgcctctctgctccagagagaggatgcagaggggtgctgctcctaaacccccgctccagatctgcactgggtgtggccccgcagtgcccccacccagtccgccaaacactccaccccctccagctccagtttccaagttcctgcactccagaatccacaaagccgtgcctttctctggctccagaatatgcataatcagcgccctggagtcccctgggcctggaccgcttcccagaggccaggaatctgccattactctgcggtggtgccagaggttttaggaaacctggcatggtgctttcaggtctggggcttttagagccccccgtgtggcttacaaattctacagcatacagagcaggccacgctcaggcccggcatgcgggccaccaagttctggaaaccacgtggtgtccctgcgaatggggcgatcaagtccagagccggggcactttcagagtttgaaggtaactgagagcagatggtcctccatttcaactccagaagtggggctctgggagggatgttctagccctccctggcatgtcagagccaggctctgcctggaggatccctccatccggctcctgtcatcccctacactttggccaagcaagaggtggtagaaccacttggctgctcattccttctggaggacacacagtctcagtccagatgccttcctgtctttctggccctttctggaccagatcctactcttcctttctaaatctgagatctccctccagggaatccgcctgcagaggacagagctggctgtcttcccccacccctaacctggcttattcccaactgctctgcccactgtgaaaccactaggttctaggtcctggcttctagatctggaaccttaccacgttactgcatactgatccctttcccatgatccagaactgaggtcactgggttctagaacccccacatttacctcgaggctcttccatccccaaactgtgccctgccttcagctttggtgaaagggagggcccctcatgtgtgctgtgctgtgtctgcaccgcttggtttgcagttgagaggggagggcaggaggggtgtgattggagtgtgtccggagatgagatgaaaaaaatacatctatatttaagaatcccaaaaaaaaaaaaaaaaaa

SEQ ID NO: 25301 - DNA, 1201 bp, Homo Sapiens
gtcgtcgccgccgccaccactgtcgccatgaacagtgtgggggaggcatgcacggacatgaagcgcgagtacgaccagtgcttcaatcgctggttcgccgagaaatttctcaagggggacagctccggggacccgtgcaccgacctcttcaagcgctaccagcagtgtgttcagaaagcaataaaggagaaagagattcctattgaaggactggagttcatgggccatggcaaagaaaagcctgaaaattcttcttgaccttgacagtcaccttgaaggatttcgcaagtccagaaattgaggactctggatttttgtcaactaactctgtgaacatagccatcagatttgatgaggaacttaggagagaggagttttatttcctccttcgatgttttcctctcagttgtaaaagatgaactctttgagatgatttctcacctgctgtggtatcttgcaggaactgtgtgctaaaattgaacaatttttttgagattatggttgcaatacttggcgtggaatcagctttacataaatataccttgtatgcaaacgatgataaactagtcaggatgagcagagctgcctgacctcttgatttctgctgcaaaagacatatacactgtactggggtcactatttatgaaagcaattggttaggacctctttttttcctctcagggaactaatgctctgaaaagggatctgggcacaacagtttcagtgagtgcttttgagcacacttttatttttatatagtaactaatggttaagattgatggtggcctggattagcaaagaggaagacagcttttaacacagttccctgccttcacaagaggtgtcagattaagatgtgaaagctgcaagaatgttgcagtgaacaccatttcagagctctcagtgtgcagttcaggaattaagatacttggaatagctgtggaggaagaacctaaattgcaaagatctgctattgccagctctcaacccaagtcagtgaattgtcaacctgcatatcctaaaaatgtcaaaatgctgcatctggttaaatgtcggggtaggggggaagctgaaggtgctcgcttcatttgccttgtttactcatcctgccctgtaatgtctgtaatcctgaagatggaataaattgtaacatttagtttctatcaaaaaaaaaaaaaaaaaaaaaaaaaaaaaaaaaaaa

SEQ ID NO: 25302 - DNA, 1722 bp, Homo Sapiens
ctcctgccagcatctcttgggtttgctgagaactcacgggctccagctacctggccatgaccaccacatttctgcaaacttcttcctccacctttgggggtggctcaacccgagggggttccctcctggctgggggaggtggctttggtggggggagtctctctgggggaggtggaagccgaagtatctcagcttcttctgctaggtttgtctcttcagggtcaggaggaggatatgggggtggcatgagggtctgtggctttggtggaggggctggtagtgttttcggtggaggctttggagggggcgttggtgggggttttggtggtggctttggtggtggcgatggtggtctcctctctggcaatgagaaaattaccatgcagaacctcaatgaccgcctggcctcctacctggacaaggtacgtgccctggaggaggccaatgctgacctggaggtgaagatccatgactggtaccagaagcagaccccaaccagcccagaatgcgactacagccaatacttcaagaccattgaagagctccgggacaagatcatggccaccaccatcgacaactcccgggtcatcctggagatcgacaatgccaggctggctgcggacgacttcaggctcaagtatgagaatgagctggccctgcgccagggcgttgaggctgacatcaacggcttgcgccgagtcctggatgagctgaccctggccaggactgacctggagatgcagatcgagggcctgaatgaggagctagcctacctgaagaagaaccacgaagaggagatgaaggagttcagcagccagctggccggccaggtcaatgtggagatggacgcagcaccgggtgtggacctgacccgtgtgctggcagagatgagggagcagtacgaggccatggcggagaagaaccgccgggatgtcgaggcctggttcttcagcaagactgaggagctgaacaaagaggtggcctccaacacagaaatgatccagaccagcaagacggagatcacagacctgagacgcacgatgcaggagctggagatcgagctgcagtcccagctcagcatgaaagctgggctggagaactcactggccgagacagagtgccgctatgccacgcagctgcagcagatccaggggctcattggtggcctggaggcccagctgagtgagctccgatgcgagatggaggctcagaaccaggagtacaagatgctgcttgacataaagacacggctggagcaggagatcgctacttaccgcagcctgctcgagggccaggatgccaagatggctggcattggcatcagggaagcctcttcaggaggtggtggtagcagcagcaatttccacatcaatgtagaagagtcagtggatggacaggtggtttcttcccacaagagagaaatctaagtgtctattgcaggagaaacgtcccttgccactccccactctcatcaggccaagtggaggactggccagagggcctgcacatgcaaactccagtccctgccttcagagagctgaaaagggtccctcggtcttttatttcagggctttgcatgcgctctattccccctctgcctctcaccaccttctttggagcaaggagatgcagctgtattgtgtaacaagctcatttgtacagtgtctgttcatgtaataaagaattacttttccttttgcaaataaaaaaaaaaaaaaaaaa

SEQ ID NO: 25303 - DNA, 1716 bp, Homo Sapiens
ggccaagcaagcttctatctgcacctgctctcaatcctgctctcaccatgagcctccgcctgcagagctcctctgccagctatggaggtggtttcgggggtggctcttgccagctgggaggaggccgtggtgtctctacctgttcaactcggtttgtgtctgggggatcagctgggggctatggaggcggcgtgagctgtggttttggtggaggggctggtagtggctttggaggtggctatggaggtggccttggaggtggctatggaggtggccttggaggtggctttggtgggggttttgctggtggctttgttgactttggtgcttgtgatggcggcctcctcactggcaatgagaagatcaccatgcagaacctcaacgaccgcctggcttcctacctggagaaggtgcgcgccctggaggaggccaacgctgacctggaggtgaagatccgtgactggcacctgaagcagagcccagctagccctgagcgggactacagcccctactacaagaccattgaagagctccgggacaagatcctgaccgccaccattgaaaacaaccgggtcatcctggagattgacaatgccaggctggctgtggacgacttcaggctcaagtatgagaatgagctggccctgcgccagagcgtggaggccgacatcaacggcctgcgccgggtgctggatgagctcactctgtctaagactgacctggagatgcagatcgagagcctgaatgaagagctagcctacatgaagaagaaccatgaagaggagatgaaggaatttagcaaccaggtggtcggccaggtcaacgtggagatggatgccaccccaggcattgacctgacccgcgtgctggcagagatgagggagcagtacgaggccatggcagagaggaaccgccgggatgctgaggaatggttccacgccaagagtgcagagctgaacaaggaggtgtctaccaacactgccatgattcagaccagcaagacagagatcacggagctcaggcgcacgctccaaggcctggagattgagctgcagtcccagctgagcatgaaagcggggctggagaacacggtggcagagacggagtgccgctatgccctgcagctgcagcagatccagggactcatcagcagcatcgaggcccagctgagcgagctccgcagtgagatggagtgccagaaccaagagtacaagatgctgctggacatcaagacacgtctggagcaggagatcgccacctaccgcagcctgctcgagggccaggacgccaagatgattggtttcccttcctcagcaggaagcgtcagcccccgtagcacctctgttaccacgacttctagtgcctctgttaccaccacctctaatgcctctggtcgccgcacttctgatgtccgtaggccttaaatctgcctggcgtcccctccctctgtcttcagcacccagaggaggagagagccggcagttccctgcaggagagaggaggggctgctggacccaaggctcagtccctctgctctcaggaccccctgtcctgactctctcctgatggtgggccctctgtgctcttctcttcctgtcggatctctctcctctctgacctggatacgctttggtttctcaacttctctaccccaaagaaaagattattcaataaagtttcctgcctttctgcaaacataaaaaaaaaaaaaaaaaa

SEQ ID NO: 25304 - DNA, 1126 bp, Homo Sapiens
ccgatctgggggcttcccgggctcgggtaaccggagtgctggtatctaatcgtcgctcaaaagctcctaggtgcgcgggtggatataattcccggcttctcgagaagacactacagcctcaaggaggtatatcccgtgccttacctgactgggggctctgagtccagttgtgttgtcttcaacttagacaccatggaggcacctccagtcaccatgatgcctgtcactgggggcaccattaacatgatggagtacctgttgcagggaagtgttttagatcacagtttggaaagcctcatccaccgccttcgtggtttgtgtgacaacatggaacctgagactttccttgaccatgagatggtattcctccttaagggccagcaagccagcccatttgttctcagggcccgacgctctatggacagggcaggggcaccctggcatctgcgctacctgggacagccagaaatgggagacaagaaccgccatgccctggtgcgaaactgcgtggacattgccacatctgagaacctcaccgacttcttgatggaaatgggcttccgcatggaccatgagtttgttgctaagggacatttgttccgtaagggcatcatgaagattatggtgtacaagattttccgcatcctggtgccagggaacacagacagcactgaggccttgtcactctcctatctcgtggaattaagtgtggtagcacccgctgggcaggacatggtctctgatgacatgaagaacttcgcagaacagctaaaacctctggttcacctagagaaaatagaccccaagaggctcatgtgactaagaggatctgtccacatttggggcctatccttacttgtttgaaaaaatatgtttgctttttttggtttttgttttgttttgtttttgagacggagtctcgctttgcactccagcctgggtgagaagagcgaaactccgtctcaaaaaaaaataaaaatgaagaggggaaaccagaataaattatcttttggaaaggacaatttcttgtttggccatttgtgtataaggttggtaacattagaggctgtgagcttgtgttacatggtaataaagccaatgaagagacaaaaaaaaaaaaaaaaaa

SEQ ID NO: 25305 - DNA, 1792 bp, Homo Sapiens
ctccgccgtgctaactcctcgctagctctccctctcacacacgctcacacccggctcgagatggcggcggcggcggcggcggcgggggactcggactcctgggacgccgacgctttctccgtggaagacccagtgcggaaggtggggggcggcggcactgccggcggggaccgctgggaaggcgaggacgaggacgaggacgtcaaggataactgggatgacgatgatgatgaaaaaaaagaggaagcagaagtaaaaccagaggtaaaaatttcagaaaagaaaaaaatagcagagaagataaaagagaaagaacggcaacagaagaaaaggcaagaagaaattaaaaagaggttagaagaacccgaagaacctaaagtgctaacaccagaagaacaattagcagataaactgcggctaaagaaattacaggaagagtcagacctcgaattagcaaaggaaacttttggtgttaataatgcagtttatggaatagatgctatgaacccatcttcaagagatgactttacagagtttggaaagttactaaaagataaaattacacaatatgaaaagtcactatattatgccagttttttggaagtcttagttcgagatgtgtgtatttcattggaaattgatgacttgaaaaaaattaccaattcactgactgtgctttgcagtgaaaaacagaagcaagaaaagcaaagcaaagccaaaaagaagaagaaaggtgtggttcctggagggggattaaaagccaccatgaaagatgatctggcagattatggtggttatgatggaggatatgtacaagactatgaagacttcatgtgacattttatcttttcttggtgtcatctttatgttgcccacaatcccttgaacatgtagcacaacttcctttcctttcagttctgccaaatgctacaatcagaagtgcagtatcttttgtgctggttatttaaccccttgacacttaggtgctaatgtgcaaatgagggaacttggatcttgctgccaaggggttaaaattgggaacctaagttgctactaaatcatagttcaaaacctaataatgttgtcgttgttgctatctgatttcatagcagcagtcactaaattggaaacaaaaggttgcaacgtgacaaaaaaaattgtgtagtatttaccagcaccattcagtaatacagccttaaccatacctccttgaactacttcataacttgtcaagaaaagcagtttgcagcaagggcatgtggtgtgcacctagtattaaaattgctttgtcttaaaattgaacatgaggatattaaaaatacattgtgaagaagactgcttatctcagagtgaagatactgcggctgaaaagcactagtttgatataaaattaaaatgaccaaaaccctccaactttgaagctaaagaaggtaaacctttccattattgcattacatgttgtggaatctctcgagtgcaaagactgtctagttatttatcaggctatttctactgatgaactgcttcaggtgggggagggaaacttatttttatttgcctgatttaagtgtctgagaaacaaatctttgttctcttaggctgcaatggaacaactttaccagggttttggcatttcctttcctttcctttataaaacatgctcagcaaactgcaccagttaactacagtttggtaaattgttatgttaacaattatgacatctgcaatgttttataaagcaactaatttaataaaatcactgttgtgaggacttaaaaaaaaaaaaaaaaaa

SEQ ID NO: 25306 - DNA, 1435 bp, Homo Sapiens
ctgatgcaggatggctgagcgcgcaggagcccgggaggtctgagccgggcgaggctcgctccctgcgcatcgcctcctccgcccgccgcgtggtcgcgggcaggtgggccggggggcgctgggcaggggcggggcagggccagggcaggccggtctgcagccggaggggccggagcggagaagctgcccaccttcccgggctcggagcggccggggctgctcagccggccgggctcgcgatgacctgctgagaagcgtcgtcggaggctgcaggaggcggcctagctgtgggcggtgcagctcgcggcctcctccctcgtcgttcccggccccggccccccacccatccccgtgccccctccctaccgccggccgagatggcggatccagccgaatgcagcatcaaagtgatgtgccggttccggcccctcaacgaagcggagatcctccgcggggacaaattcatccccaaatttaaaggcgatgagaccgtggtgatcgggcaagggaagccatatgtcttcgacagagtgctacctcccaacacgacccaagagcaggtttacaatgcatgtgcgaagcaaattgtcaaagatgtccttgaaggttataacgggacgatttttgcgtatgggcagacttcatcaggaaaaacccacaccatggaggggaagctgcatgacccccagctcatggggatcatcccacgaattgcccatgatatctttgaccatatctactccatggatgagaacctggagtttcacataaaggtttcctattttgagatctacttggacaaaataagggacttacttgatgtatccaagaccaacttggctgttcatgaagataaaaacagagtcccgtatgtaaaggggtgcactgagcggtttgtgtcgagccctgaggaagtcatggatgtaatagatgaaggcaaagcaaaccgacacgtggctgtgacaaacatgaatgaacacagctctagaagtcacagtatcttcctgataaatattaaacaagagaatgtagagactgaaaaaaaactcagtgggaaactttatttggttgatttggctgggagcgaaaaggtcagcaaaactggtgccgagggagctgttcttgacgaagctaaaaatatcaataagtctttgtctgctcttggaaatgtgatctctgctttggcagaagggacaaaaacacatgtgccataccgggacagcaagatgactcggattcttcaggactctttgggtgggaactgcagaaccaccatcgtcatttgctgttctccttctgtcttcaatgaggctgagaccaagtccacactgatgttcggacagagagctaagaccatcaagaatacagtctctgtgaacctagaactgacagcagaagaatggaagaagaaatatgaaaaaaaaaaaaaaaaaaa

SEQ ID NO: 25307 - DNA, 1106 bp, Homo Sapiens
ctgggagagtgtccgttgcttcccgtccgtgtcgcggccctgcggttggcggcctcctcgtggagcggagcaagggtaggccccacgtggcgtctttgcccggctccaagatggacggcagcggggactgggaggctgctctgggggagcacgtggcgccctgctcgcctgctcccggggcagctgggatggtggcggagtccggaggcctcctgccgccgtcgggcagggaggccggcggaggcggggctgtggccgcccccgagaggcgcccaggcggcggcggcggcggcccagcttcttctttcctcgcacagccaggcggcccctgctcgagtcccgcgtcgccatggccgcggttcccgagttgctgcagcagcaggaggaggaccgcagcaaggtgaggtcctcccagcctcagactcctgggcgggcggccctgcgagctccggggtcgctgcattctttcccttgcgcgtccataggccgtggctgctcgccgccatccccagcgcgggaagcacccgtgagacccgggcggcccctctccctggtcttcactgaaggctgccccggggaatccctgtggatgtcccggattctattaggacagaaccagagacgcgggaccttagccccagctcaggcgccggtgccgagcggacttggagagatgatctctggagaccccggaatgttctttttaaaactttcctcggcttcgtggtgaccagtaggtgaacgtgaaattgacttaacatgcgacagaccagtttggtttgttgcccccaaaataccctccttccccccaccttttactgagaagacttttttggggggggggcccaaacaacttgggaaattgcatcaagcgtccgaacatgctgcttacaactttagaaacgcaaaatgcgttgttgtgggagttgtgtaatttttagtaggtgctcaaatacttgctgaacttggtgtctatttttaagtcttgcccattgatgtaaactgtccctaggtcacgtgtatcttgaggtctaaaagattatttatgcaataaattgaaattcccatagccaattaaagattcaaaaaaaaaaaaaaaaaaaaaa

SEQ ID NO: 25308 - DNA, 2493 bp, Homo Sapiens
ccgggatgaaaggagggaacgcaggtgagaaagctagacaggcaggtagggaaatcgtgaggtgagcgtgatcctagctccttgtggcagagcctagagagaaggcgaggacgctgaagaaccagacagctggcagagagagaagttggctagcatggaatcaccagaggagcctggagcatccatggatgagaactactttgtgaactacactttcaaagatcggtcacattcaggccgtgtggctcaaggcatcatgaaactgtgtctagaggaggagctctttgctgatgtcaccatttcggtggaaggccgggagtttcagctccatcggctggtcctctcagctcagagctgcttcttccgatccatgttcacttccaacctgaaggaggcccacaaccgggtgattgtgctgcaggatgtcagcgagtctgttttccagctcctggttgattatatctaccatgggactgtgaaacttcgagctgaggagttgcaggaaatttatgaggtgtcagacatgtatcagctgacatctctctttgaggaatgctctcggtttttggcccgcacagtgcaagtgggaaactgccttcaggtgatgtggctggcagatcggcacagtgatcctgagctctatacggctgccaagcactgtgccaagacccacctggcccagctgcagaatacagaggaatttctccacttgccccaccgcttactcacagatatcatctcggatggagttccgtgttctcagaacccaacagaggcaatagaagcctggatcaactttaataaagaggaaagagaggcttttgcagagtcactcaggacaagcttgaaggaaattggggagaatgtgcacatttacctgattgggaaagagtcatctcgtacccactcgttggctgtgtccttgcactgtgcagaagatgactccatcagtgtaagtggccaaaacagtttgtgccaccagatcactgcggcctgcaagcatggtggagacttgtatgtggtgggagggtccatcccacggcgcatgtggaagtgcaacaatgccaccgttgactgggagtggtgtgctcctttgcctcgggaccggctccagcacaccctggtgtctgtgcccgggaaagatgccatatattcactgggtggcaagacactgcaagataccctctccaacgcagtcatttattatcgcgtaggtgataatgtgtggacagagacaactcagctagaggtggctgtgtcaggggctgctggtgccaacctcaacgggatcatctacttactagggggggaggagaatgatctggacttctttaccaaaccttcccgactcatccagtgctttgacacagagacagacaaatgccatgtgaagccctatgtgctgccctttgcaggccgcatgcacgcagctgtgcataaagatctggtgttcatcgtggctgaaggggactccctggtgtgctacaatcccttgctagacagcttcacccggctttgccttcctgaggcctggagctctgccccatccctctggaagattgccagctgtaacgggagcatctatgtcttccgggaccgatataaaaagggggatgccaacacctacaagcttgaccctgccacttcagccgtaactgtcacaagaggtattaaggtgctgcttaccaatttgcagtttgtgttggcctaaggctgtggggaggggaggagaactgctcactccttttccctccccatacaaactcaaagtcccctgggccccaattcagagttatgttttttttggcacatactagaaaggcagtgcctcagcccttccctgaatccatggaggtgttctgtttggggctttttagactgctgctgctcagctggttgcttgaactgacagtaggccagcctgttctctgccattccctagtcatcctgtgcctcaccacagcttgcttagagcaagccttttctcagaccttaggcacagcctctcctctttacctgatcaatgttaaatgtaagcacccctgatcccaggacataaggaaagatgcccaattgtacttttgttctatagcctgtgaaatggctagttgatcatttttccacaaagaattaggtgttaagagttttccttcaggctttacttaggagaatggactaagctgaaggtgtacttcaccagcaagagtcaactctagaattcaggatgttccttctattgttttcttagccatctgtcaggaaatgtaactttggttttatttttggcttattccaaggggtaagccagaaaatagaaatgattatttctgattaatagcagaaactttttcaatctcaaatatataaggtgtctgctcttttaaaagctctaagctaagtcaagagctaggaactgttgatacaaataaaagtttttgaagggaaaaaaaaaaaaaaaaaaaaaaaaaaaaaaaaaaaaaaaaaaaaaaaaaa

SEQ ID NO: 25309 - DNA, 1727 bp, Homo Sapiens
ggtgtggactcgagggctgggcgcggggccggcgcagaagccgccagctggagacgatggtggaccacttggccaacacggagatcaacagccagcgcatcgcggcagtggagagctgcttcggggcctcggggcagccgctggcgctgccaggccgagtgctgctgggcgagggcgtgctgaccaaagagtgccgcaagaaggccaagccgcgcatcttcttcctctttaacgacatcctggtgtatggcagcatcgtgctcaacaagcgcaagtaccgcagccagcacatcatccccctggaggaggtcacactggagctgttgccggagacgctgcaggccaagaaccgctggatgatcaagacggccaagaagtcctttgtggtgtcggccgcctccgctacggagcgccaggaatggattagccacatcgaggagtgcgtgcggcggcaactgagggccacgggccgcccgcccagcacggagcacgcggcaccctggatccccgacaaggccacggacatctgcatgcgctgcacgcagacgcgcttctctgccctcacgaggcgccaccactgccgcaagtgcggcttcgtggtctgcgctgagtgctcgcgccagcgcttcctgctcccgcgcctgtcccccaagcccgtgcgcgtctgcagcctctgctaccgcgaactggccgcccagcagcggcaggaggaggcggaggagcagggcgcggggtccccagggcagccagcccacctggcccggcccatctgcggagcgtccagtggagatgacgatgactccgacgaggacaaggagggcagcagggacggcgactggcccagcagcgtggagttctacgcctcgggggtggcctggtctgccttccacagctgacccccggcctgcagaacatctgtccccaagccagctccactgcccaggcccccaagagggcagctccagaagctgcccagggctccgggaccccatcccatggtggcaggtgcagcggtggggagtggctctttctggactcccagtgcctttttgctggacactgtgtccttatggcttcactgcaggtaatgcctttcccttcaggaagccccagaacacccacaggtcttggtaacaaacgccaccttacactctgcaggctgcagcggcagctccagatggcctcctgagctggacgaccccaggtctccagacatctagggaccagagcaggtttgggaacacagagggaagacaggatgggagtgtagccacagaacccacctgcaccctgacaggcacaccccactgaagagcctgagtcccaggaggcctcctggaagcccaggactgcccacccaccacgctggtgcccaccgcctggccagccaagccctgccgatcagacatgtgggctccccgaagcccagccagagactgccgtgctgtgggtgccaccaggcccagggactgcagcctgagctccccgaggcccagggcagccgggtgaggactctgtcctgtgtcacctctctccaggtgtccagctgtctcatgcctttttgtcctgtcctcagctctccgtgtggtcagcgaaaccattgttttctgttaggactcagttgcaagaacagaaaccctgcccccacttaataataaaaaagaaagtttattgatgggtggttgcaaaacaaaaaaaaaaaaaaaaaaaaaaaaaaaaaaaaaaaa

SEQ ID NO: 25310 - DNA, 3139 bp, Homo Sapiens
gtggcgccgggcggcggggtcctgcgtggagagtgggacgcaacgccgagaccgcgagcagaggctgcgcacagccggatccggcactcagcgaccggacccaaggatccgccggggaacaagccacaggagagcgactcaggaacaagtgtgggagaggaagcggcggcggcggcgccgggcccgggggtggtgacagcaggtctgaggttgcatcataaatacaaaggactgaagttataaaagagaaaagagaagtttgctgctaaaatgaatctgagcaatatggaatattttgtgccacacacaaaaaggtactgaagatttaccccccaaaaaaaattgtcaatgagaaataaagctaactgatatcaaaaagcagagcctgctctactggccatcatgcgtaaaggggtgctgaaggacccagagattgccgatctattctacaaagatgatcctgaggaactttttattggtttgcatgaaattggacatggaagttttggagcagtttattttgctacaaatgctcacaccagtgaggtggtggcaattaagaagatgtcctatagtgggaagcagacccatgagaaatggcaagatattcttaaggaagttaaatttttacgacaattgaagcatcctaatactattgagtacaaaggctgttacttgaaagaacacactgcttggttggtgatggaatattgcttaggctcagcctctgatttattagaagttcataaaaaaccacttcaggaagtggagatcgctgccattactcatggagccttgcatggactagcctacctacattctcatgcattgattcatagggatattaaagcaggaaatattcttctaacagagccaggtcaggtaaaactagctgattttggatctgcttcaatggcttctcctgccaactccttcgtgggcacaccttactggatggctccagaggtgatcttagctatggatgaaggacagtatgatgggaaagttgatatttggtcacttggcatcacttgtattgaattggcggaacggaagccgccccttttcaacatgaatgcaatgagtgccttatatcacattgcccagaatgactccccaacgttacagtctaatgaatggacagactcctttaggagatttgttgattactgcttgcagaaaatacctcaggaaaggccaacatcagcagaactattaaggcatgactttgttcgacgagaccggccactacgtgtcctcattgacctcatacagaggacaaaagatgcagttcgtgagctagataacctacagtaccgaaaaatgaaaaaaatacttttccaagagacacggaatggacccttgaatgagtcacaggaggatgaggaagacagtgaacatggaaccagcctgaacagggaaatggacagcctgggcagcaaccattccattccaagcatgtccgtgagcacaggcagccagagcagcagtgtgaacagcatgcaggaagtcatggacgagagcagttccgaacttgtcatgatgcacgatgacgaaagcacaatcaattccagctcctccgtcgtgcataagaaagatcatgtattcataagggatgaggcgggccacggcgatcccaggcctgagccgcggcctacccagtcagttcagagccaggccctccactaccggaacagagagcgctttgccacgatcaaatcagcatctttggttacacgacagatccatgagcatgagcaggagaacgagttgcgggaacagatgtcaggttataagcggatgcggcgccagcaccagaagcagctgatcgccctggagaacaagctgaaggctgagatggacgagcaccgcctcaagctacagaaggaggtggagacgcatgccaacaactcgtccatcgagctggagaagctggccaagaagcaagtggctatcatagaaaaggaggcaaaggtagctgcagcagatgagaagaagttccagcaacagatcttggcccagcagaagaaagatttgacaactttcttagaaagtcagaagaagcagtataagatttgtaaggaaaaaataaaagaggaaatgaatgaggaccatagcacacccaagaaagagaagcaagagcggatctccaaacataaagagaacttgcagcacacacaggctgaagaggaagcccaccttctcactcaacagagactgtactacgacaaaaattgtcgtttcttcaagcggaaaataatgatcaagcggcacgaggtggagcagcagaacattcgggaggaactaaataaaaagaggacccagaaggagatggagcatgccatgctaatccggcacgacgagtccacccgagagctagagtacaggcagctgcacacgttacagaagctacgcatggatctgatccgtttacagcaccagacggaactggaaaaccagctggagtacaataagaggcgagaaagagaactgcacagaaagcatgtcatggaacttcggcaacagccaaaaaacttaaaggccatggaaatgcaaattaaaaaacagtttcaggacacttgcaaagtacagaccaaacagtataaagcactcaagaatcaccagttggaagttactccaaagaatgagcacaaaacaatcttaaagacactgaaagatgagcagacaagaaaacttgccattttggcagagcagtatgaacagagtataaatgaaatgatggcctctcaagcgttacggctagatgaggctcaagaagcagaatgccaggccttgaggctacagctccagcaggaaatggagctgctcaacgcctaccagagcaaaatcaagatgcaaacagaggcacaacatgaacgtgagctccagaagctagagcagagagtgtctctgcgcagagcacaccttgagcagaagattgaagaggagctggctgcccttcagaaggaacgcagcgagagaataaagaacctattggaaaggcaagagcgagagattgaaacttttgacatggagagcctcagaatgggatttgggaatttggttacattagattttcctaaggaggactacagatgagattaaattttttgccatttacaaaaaaaaaaaaaaaaaa

SEQ ID NO: 25311 - DNA, 3322 bp, Homo Sapiens
tccccgcggcggcggcggctgcccagtgacagcggcggcggtgccaggtcggccgtggtagcgtagggttgcgcggcccggaaacgcagagccggccaaagagcggcgcgacgtgagccggggccgtgcgcgaagagacctcgcgggcgcggagcgaaaggccggcgtgagtgagcgcggagacagtggccgccggcggcccaacccgtctatcccttcggccgccgccggcatgagccacatccagatcccgccggggctcacggagctgctgcagggctacacggtggaggtgctgcgacagcagccgcctgacctcgtcgaattcgcagtggagtacttcacccgcctgcgcgaggcccgcgccccagcctcagtcctgcccgccgccaccccacgccagagcctgggccaccccccgccagaacccggcccggaccgtgtcgccgacgccaaaggggacagcgagtcggaggaggacgaggacttggaagttccagttcctagcagatttaatagacgagtatcagtctgtgctgagacctataaccctgatgaggaagaggaagatacagatccaagggtgattcatcctaaaactgatgaacagagatgcagacttcaggaagcttgcaaagatattctccttttcaaaaatcttgatcaggaacagctttctcaagttctcgatgccatgtttgaaaggatagtcaaagctgatgagcatgtcattgaccaaggagatgatggagacaacttttatgtcatagaacggggaacttatgacattttagtaacaaaagataatcaaacccgctctgttggtcaatatgacaaccgtggcagttttggagaactagctctgatgtacaacaccccgagagctgctaccattgttgctacctcagaaggctccctttggggactggaccgggtgacttttagaagaatcatagtgaaaaataatgcaaagaagaggaagatgtttgaatcatttattgagtctgtgcccctccttaaatcactagaggtgtcagaacgaatgaagattgtggatgtaataggagagaagatctataaggatggagaacgcataatcactcagactaaatcaaacaaggatggtgggaaccaggaggtcgagattgcccgctgccataaggggcagtactttggagagcttgccctggtcaccaacaaacccagagctgcctcagcttatgcagttggagatgtcaaatgcttagttatggatgtacaagcattcgagaggcttctggggccctgcatggacatcatgaagaggaacatctcacactatgaggaacagctggtgaagatgtttggctccagcgtggatctgggcaacctcgggcagtaggtgtgccacaccccagagccttcttagtgtgacaccaaaaccttctggtcagccacagaacacatacagaaaacagacatgacagaactgttcctgccgttgccgccactgctgccattgctgtggttatgggcatttagaaaacttgaaagtcagcactaaaggatgggcagaggttcaacccacacctccactttgcttctgaaggcccattcattagaccacttgtaaagattactccaacccagtttttatatctttggttcaaaacggcatgtctctccaacaatttaagtgcctgatacaaagtccaaagtataaacatgctcctttcctctcttgctgctactcttgcttttggaagttaccacagggtctgcagaaacctgttgtataactgtagacactctctaatggttctcaaaggaggaaatgtagccttcagtctcctcatttgtcctttgaggaagtccacatttgttcacagttgcagcctttggttttacagtgggaaatggtggtggatgatatggacatatgtagcccagtggcattgtactttctgctgacagctgcacacattacagctgtctccaaacccacagtgatgcttagggaaagaccctgctcaggacccagcaggtcagcaccccagagcagactgataggtccgtgggacccatgttagagcagaaaatttgggctcagcacattttactgttagtagagagccaggaaacgttttctgggttggggattttgtgggattttttaatttttttagtaggttttgtttaacctctgtgcagtttgtatgaatgaattgctatacatttataaggagccagggtctggagggttgctatcactttgtccagcccaaataccttcctgggcaactcctaccatttgtttgcagttgcctctactagctgatggcagtatgctggaaagaggttgtactataaagagagttctttccttctactccagagttgttgtgtagctttgccattgaaccgatcaatttttaaactctttaaagaagcagcagctatttttttgaaattaaagaaaattctcaggccaggctcaatggctcatgcctataattgtagtgctttgggaggctgagctgggaggatcgcttaagaccagcctaggcaacagagtgagatcctgtctctacaaaaacaaaaattttttttttgttttctttttgagacggagtttcgctcttgttgcccaggctggagtgcaatggtgcggtcttggctcaccgcagcctccgcctcccagattaaagtgattctcctgcctcaacctcctgagtggctgggattgcaggcatgcgccaccatgccgggcgaattttgtatttttaatagagacggggtttctctgtgttggtcaggctggtctcaaactcccaacctcaggtgatccgcccacctcggcctctcagagtgctgggattacagatgtgagccactgcacctggcaaaaaaaaaatttttttttaatttgtcaggtgtggtgatgcatgcatgtagtcccaaatacttaggaggctgaggtggaaggatcacttgagcccaggaggtcaaggcaacagtgagctgtgatcatgccactgcactccagtctgggtgacacagtgagaccctgtctcttaaaaaaaaaaaaagaaagaaaaaaaattattctttaggtaatttcacttggacatattcatgtatatggagtttgtcagctgactcaggcatttaccctaaagatcaaatctgttttcaaaaattggcattggccaggcacggtgacccacacctgtaatcccagcactttgggaggccgaggcgggcggatcacgaggtcaggggttcaagaccagcctggccaacatggtgaggccccgtctctactaaaaaaaaaaaaaaaaaa

SEQ ID NO: 25312 - DNA, 2601 bp, Homo Sapiens
ggcacgaggctgcagcggagtgcggcggcggcgacactgagtggaaggcaaaatggcggcggcggcggcggtggcctggtgttaaggggagagccaggtccttacgacccctgggacgggccgcgctggcccgcggcagcccccccgttcgtctccccgctctgccccaccagggatacttggggttgctgggacggactctggccgcctcagcgtccgccctcaggcccgtggccgctgtccaggagctctgctctcccctccagagttaattatttatattgtaaagaattttaacagtcctggggacttccttgaagcatcattttcacttttgctcagaagaaagctctggatctatcaaataaagaagtccttcgtgtgggctacatatatagatgttttcatgaagaggagtgaaaagccagaaggatatagacaaatgaggcctaagacctttcctgccagtaactatactgtcagtagccggcaaatgttacaagaaattcgggaatcccttaggaatttatctaaaccatctgatgctgctaaggctgagcataacatgagtaaaatgtcaaccgaagatcctcgacaagtcagaaatccacccaaatttgggacgcatcataaagccttgcaggaaattcgaaactctctgcttccatttgcaaatgaaacaaattcttctcggagtacttcagaagttaatccacaaatgcttcaagacttgcaagctgctggatttgatgaggatatggttatacaagctcttcagaaaactaacaacagaagtatagaagcagcaattgaattcattagtaaaatgagttaccaagatcctcgacgagagcagatggctgcagcagctgccagacctattaatgccagcatgaaaccagggaatgtgcagcaatcagttaaccgcaaacagagctggaaaggttctaaagaatccttagttcctcagaggcatggcccgccactaggagaaagtgtggcctatcattctgagagtcccaactcacagacagatgtaggaagacctttgtctggatctggtatatcagcatttgttcaagctcaccctagcaacggacagagagtgaaccccccaccaccacctcaagtaaggagtgttactcctccaccacctccaagaggccagactccccctccaagaggtacaactccacctcccccttcatgggaaccaaactctcaaacaaagcgctattctggaaacatggaatacgtaatctcccgaatctctcctgtcccacctggggcatggcaagagggctatcctccaccacctctcaacacttcccccatgaatcctcctaatcaaggacagagaggcattagttctgttcctgttggcagacaaccaatcatcatgcagagttctagcaaatttaactttccatcagggagacctggaatgcagaatggtactggacaaactgatttcatgatacaccaaaatgttgtccctgctggcactgtgaatcggcagccaccacctccatatcctctgacagcagctaatggacaaagcccttctgctttacaaacagggggatctgctgctccttcgtcatatacaaatggaagtattcctcagtctatgatggtgccaaacagaaatagtcataacatggaactatataacattagtgtacctggactgcaaacaaattggcctcagtcatcttctgctccagcccagtcatccccgagcagtgggcatgaaatccctacatggcaacctaacataccagtgaggtcaaattcttttaataacccattaggaaatagagcaagtcactctgctaattctcagccttccgctacaacagtcactgcaattacaccagctcctattcaacagcctgtgaaaagtatgcgtgtattaaaaccagagctacagactgctttagcacctacacacccttcttggataccacagccaattcaaactgttcaacccagtccttttcctgagggaaccgcttcaaatgtgactgtgatgccacctgttgctgaagctccaaactatcaaggaccaccaccaccctacccaaaacatctgctgcaccaaaacccatctgttcctccatacgagtcaatcagtaagcctagcaaagaggatcagccaagcttgcccaaggaagatgagagtgaaaagagttatgaaaatgttgatagtggggataaagaaaagaaacagattacaacttcacctattactgttaggaaaaacaagaaagatgaagagcgaagggaatctcgtattcaaagttattctcctcaagcatttaaattctttatggagcaacatgtagaaaatgtactcaaatctcatcagcagcgtctacatcgtaaaaaacaattagagaatgaaatgatgcgggtaaaaccttttaaaatgtccatttttatacttaatcatctgtttgcttggtgtttattttaaaatattgtgtccagtatttttctttctttttatagctaaataaaatatattatcagttatggaatttaaaagtgaataaatattaaagtacttttgaaaaaaaaaaaaaaaaaaaaaaaaaa

SEQ ID NO: 25313 - DNA, 3256 bp, Homo Sapiens
cacctgcaagcaatggtggcctgggtcacccaggagccgccagatagcggtgaggagcggctgcgctacaagtaccccagtgtggcctgcgagattctgacctcagatgtgccccagatcaatgatgccctgggtgctgatgagtcccttctgaaccggctctacggcttcctgcagagcaccggcagcctcaacccactgctggccagcttcttcagcaaggtcatgggcatcctcatcaaccgcaagacagaccagctcgtgtcctttcttcggaagaaggatgacttcgtggacctgctgctgcagcacattggcacctcggccatcatggacctcctgctgcgcctgctcacctgtgtggagcggcctcagctgaggcaggatgttgtcaattggctcaacgaggagaagatcgtccagcggctgattgagcagatccacccgtcgaaggatgagaatcaacattccaacgcatcccagtccctgtgtgacatcatccgcctgagccgggagcagatgatccaagtccaggacagcccagagcctgaccaactgctggccaccctggagaagcaggagacgattgagcagctcttaagcaacatgttcgagggggagcagagccagtctgtcatcgtcagtgggatccaggtgctgctgaccctgctggagcccaggaggccgaggtccgagtccgtgaccgtgaacagcttcttcagcagtgtggatgggcagctggagctcctggcccagggggccctggaaagcactgtgtccagtgtgggcgccttgcacgccctacgcccgcggctcagctgcttccaccagctcctgctggagcctcccaagctggagccgctacagatgacatggggcatgctggctccgcctctgggcaacacgcggctgcacgtggtcaagctcctggccagtgccctgagcgccaatgatgcagccctgacgcacgagctcctggcactggacgtgcccaacaccatgctggacctcttcttccattatgtcttcaacaacttcttgcatgcccaagtagagggatgcgtgagcaccatgctgagcttggggccacctcctgacagcagccctgagacgcccatccaaaaccctgttgtgaaacatctgctgcagcagtgccgcctggtggagcggatcctgacgtcctgggaggagaacgaccgtgtacagtgtgcgggaggccctcggaaaggctacatgggtcacctgacaagagtggccggtgccctggtgcagaacacggagaaggggcccaatgcagagcagctgcggcagctgctgaaggagctgcccagcgagcagcaggagcagtgggaagccttcgtatcggggcccctggcggagaccaacaagaagaacatggtggacctggtgaacacccaccacctacactcctccagtgacgatgaggacgaccggctcaaggagttcaacttccctgaggaggctgtgctgcagcaggccttcatggacttccagatgcagcgcatgacctctgccttcattgaccacttcggcttcaatgatgaggagtttggggagcaggaggagagtgtgaacgcaccttttgacaagacagccaacatcaccttctccctcaatgctgacgatgagaaccccaacgccaacctacttgagatatgctacaaggaccgcatccagcagtttgatgatgatgaggaagaggaggacgaggaagaggcccagggctcaggggagtctgatggagaagatggcgcctggcagggcagccagctggccaggggggcccgtctgggccagccacctggtgtccggagtggaggcagcacagacagtgaggacgaagaagaggaggacgaggaggaggaggaagacgaggagggcattggctgtgcagcccgtggaggggccacccctctgtcctaccccagccctggccctcagcctccaggccccagctggacagccacctttgacccagtgcctacagatgccccgaccagcccccgagtctccggggaggaagagctgcacactgggcctccagccccacaggggcccctcagtgtgccccagggcctccccactcagagcctggccagccctcctgcccgtgacgccctgcagctcaggtctcaggaccccacacccccctcagcacctcaggaagccacagaaggcagcaaagtcacggagccctcagccccttgccaggccttggttagcatcggggaccttcaggccaccttccacgggatccgttctgcccccagctcctcggacagtgcaaccagagacccctctacctctgtcccagcctccggggcccaccagcccccccagaccacagaaggggagaagagcccagagcccttggggcttccccaaagccagagtgcccaggccctcacgcctcctccgatacccaatggctctgccccggaagggcctgcatccccaggctcccaatagctgcctggtgcggcagcggcggccaaatcttccgtcctcccgtggatctcccggggtgggggcagggcgggtcccacgatggcccccattgccctcatcaccctgacacccccacattctctcctctggacccccaggaggctggtgccagggagacaggcccaacccacccccatttgcactgagaagagaagttttggagcgttgcctcctagaataaagatacagagagtcaaatagagagaatggagagagagaaacatatattatatattatatagagagagggaggagagcgagagagagtgaggacaccgaactgggctggcggctccaaagcacagccttccctgttccgtcccagcgggagctggtgttaggggtcccaaggttgccacccacgtgcccagctgtcccacgctgcagcgcagacggccacgcccacacccggccttttagctcaggtccaccatgggggacggcccagcgtgggtgggggtgccagagggtcccgagtgggggccgtgcctttgcccagaccctgcactttcaaccaggccagtccggctctggggagcaggggcctccccggcaacagccccaggggccttgagggtctgaggtcccagccctgttgccaagtgaccttgtccccagttccctcctcccaggctggtgtgagtgtgcgtgcgtttgtgccgagcttctatttcatattgcaaatataaataaaggaaggcagtttacgaaaaaaaaaaaaaaaaaa

SEQ ID NO: 25314 - DNA, 2683 bp, Homo Sapiens
ggcgcaggcgctggctggcaggtgtcgctaaccggacggtggtcgccagggcgagaggcgggagccggagaggtgaggcaggacccgggctccactgccgcctctccgagctcttgtgacgcggacctcagtgccaggatggctcggggcgagcggcggcgccgcgcagtgccggcagagggagtgcggacagccgagagggcggctcggggaggccccgggcgacgggacggccggggcggcgggccgcgtagcacggctggaggagtggctctggccgtcgtggtcctgtctttggccctgggtatgtcggggcgctgggtgctggcgtggtaccgtgcgcggcgggcggtcacgctgcactccgcgcctcctgtgttgcctgccgactcctccagccccgccgtggccccggacctcttctggggaacctaccgccctcacgtctacttcggcatgaagacccgcagcccgaagcccctcctcaccggactgatgtgggcgcagcagggcaccaccccggggactcctaagctcaggcacacgtgtgagcagggggacggtgtgggtccctatggctgggagttccacgacggcctctccttcgggcgccaacacatccaggatggggccttaaggctcaccactgagttcgtcaagaggcctgggggtcagcacggaggggactggagctggagagtgactgtagagcctcaggactcagctacaatgtcttctggacctccaacccaggactgcccctgctgacagagatggtaaagagtcgcctaaatagctggtttcagcatcggcccccaggggcctcccctgaacgctacctcggcttgccaggatccctgaagtgggaggacagaggtccaagtgggcaagggcaggggcagttcttgatacagcaggtgaccctgaaaattcccatttccatagagtttgtgtttgaatcaggcagtgcccaggcaggaggaaatcaagccctgccaagactggcaggcagtctactgacccaggccctggagagccatgctgaaggctttagagagcgctttgagaagaccttccagctgaaggagaagggcctgagctctggcgagcaggttttgggtcaggctgccctcagcggcctccttggtggaattggctacttctacggacaagggctggtattgccagacatcggggtggaagggtctgagcagaaggtggacccagccctctttccacccgtacctctttttacagcagtgccctcccggtcattcttcccacgaggcttcctttgggatgaaggctttcaccagctggtggttcagcggtgggatccctccctcacccgggaagcccttggccactggctggggctgctaaatgctgatggctggattgggagggagcagatactgggggatgaggcccgagcccgggtgcctccagaattcctagtacaacgagcagtccacgccaaccccccaaccctacttttgcctgtagcccatatgctagaggttggtgaccctgacgacttggctttcctccgaaaggccttgccccgcctgcatgcctggttttcctggctccatcagagccaggcaggcccactgccactatcttaccgctggcggggacgggaccctgccttaccaaccttactgaaccccaagaccctaccctctgggctggatgactacccccgggcttcacacccttcagtaaccgagcggcacctggacctgcgatgttgggtggcactgggtgcccgtgtgctgacgcggctggcagagcatctgggtgaggctgaggtagctgctgagctgggcccactggctgcctcactggaggcagcagagagcctggatgagctgcactgggccccagagctaggagtctttgcagactttgggaaccacacaaaagcagtacagctgaagcccaggccccctcaggggctcgttcgggtggtgggtcggccccaacctcaactgcagtatgtagatgctcttggctatgtcagtctttttcccttgctgctgcgactgctggaccccacctcatcccgccttgggcccctgctggacattctagccgacagccgccatctctggagcccctttggtttacgctcccttgcagcctccagctccttttatggccagcgcaattcagagcatgatcccccctactggcggggtgctgtgtggctcaatgtcaactacctggctttgggagcactccaccactatgggcatctggagggtcctcaccaggctcgggctgccaaactccacggtgagctccgtgccaacgtggtaggcaatgtatggcgccagtaccaggctacaggctttctttgggagcagtacagtgaccgcgatgggcgaggcatgggctgccgccctttccacggctggaccagccttgtcttactggccatggctgaagactactgaagggagggagaggaggggagccaagacactcatgccactctggctctgaagggacaaaggcttctggcttttgcccccagccccttggataccagtaattcaaaccttcctcatttcatctcaggtgtctccttgctgtcatcccacatagccctggggtgaatgtgaatccagagtctatttttctaaataaattggaaaaaacaaaaaaaaaaaaaaaa

SEQ ID NO: 25315 - DNA, 1816 bp, Homo Sapiens
cccagccgagcgtccgccgctgcccgtgcgcctctgcgcctccgcgccatggccggcctcaactccctggaggcggtgaaacgcaagatccaggccctgcagcagcaggcggacgaggcggaagaccgcgcgcagggcctgcagcgggagctggacggcgagcgcgagcggcgcgagaaagctgaaggtgatgtggccgccctcaaccgacgcatccagctctttgaggaggagttggacagggctcaggaacgactggccacggccctgcagaagctggaggaggcagaaaaagctgcagatgagagtgagagaggaatgaaggtgatagaaaaccgggccatgaaggatgaggagaagatggagattcaggagatgcagctcaaagaggccaagcacattgcggaagaggctgaccgcaaatacgaggaggtagctcgtaagctggtcatcctggagggtgagctggagagggcagaggagcgtgcggaggtgtctgaactaaaatgtggtgacctggaagaagaactcaagaatgttactaacaatctgaaatctctggaggctgcatctgaaaagtattctgaaaaggaggacaaatatgaagaagaaattaaacttctgtctgacaaactgaaagaggctgagacccgtgctgaatttgcagagagaacggttgcaaaactggaaaagacaattgatgacctggaagagaaacttgcccaggccaaagaagagaacgtgggcttacatcagacactggatcagacactaaacgaacttaactgtatataagcaaaacagaagagtcttgttccaacagaaactctggagctccgtgggtctttctcttctcttgtaagaagttccttttgttattgccatcttcgctttgctggaaatgtcaagcaaattatgaatacatgaccaaatattttgtatcggagaagctttgagcaccagttaaatctcattccttcccttttttttttcaaatggcaccagctttttcagctctcttattttttccttaagtagcatttattcctaaggtaggcagggtatttcctagtaagcatactttcttaagacggaggccatttggttcctgggagaataggcagccccacactttgaagaatacagaccccagtatctagtcgtggatataattaaaacgctgaagaccataaccttttgggtcaactgttggtcaaactataggagagaccagggaccatcacatgggtagggattttccatccagagccaataaaaggactggtgggggccgggggtggctattgtgggaagtcataacccacagatagatcaacctaagaatcctggcccttctccactctccaccatgcaggacaaacatcttctcaagcagtcaacgtagaatgcttgggaaatagtcataattacccacatatagtaattaatagatggtaattaattgatccttgatgtgatgttcttttgcatatttccttcattctaaagttgttccctggccgggagcgttggctttcgcctgtaatcccaacactttgggaggccaggacagatcacttgaggtcaggagttcgagaccagcccagccaacatggcgaaaccatgtctctactaaaaatacaaaaattatggtgacgcctgcctgtagtcccagctactcgggaggctgaggcaggaggatcgcttgaacccaggaagtggagactgcagtgagccgatatcgcaccacagcgctccagcctggtcgacagagtgagactccatctcaaaaaaaaaaaaaaaaaaaaaaaaaaaa

SEQ ID NO: 25316 - DNA, 3189 bp, Homo Sapiens
ggcacgaggaggaagggaagccggaaggggcgcgagtgaagcaaagcgaggacagacagctcccagagggcgaggggtgcgtgtgcgtccgcttctcacctcaggtctcccttcggccccgctgccctccctcgcggctgggtgacagctgggtccggtccctcgcgggctgcctggggtgcgaggatcgcgcaccccgtcttcgcgcgctgtgcctgccgccccgccccctcgtcccgcccgtcccgtcgcgtcgcgtcccgtcccctcgggtgctgccagccgggtgctgatgcgagtcggtggcagcgaggacattttctgactccctggcccctgacacggctgcactttccatcccgtcgcggggccggccgctactccggccccaggatgcagaatgtgattaatactgtgaagggaaaggcactggaagtggctgagtacctgaccccggtcctcaaggaatcaaagtttaaggaaacaggtgtaattaccccagaagagtttgtggcagctggagatcacctagtccaccactgtccaacatggcaatgggctacaggggaagaattgaaagtgaaggcatacctaccaacaggcaaacaatttttggtaaccaaaaatgtgccgtgctataagcggtgcaaacagatggaatattcagatgaattggaagctatcattgaagaagatgatggtgatggcggatgggtagatacatatcacaacacaggtattacaggaataacggaagccgttaaagagatcacactggaaaataaggacaatataaggcttcaagattgctcagcactatgtgaagaggaagaagatgaagatgaaggagaagctgcagatatggaagaatatgaagagagtggattgttggaaacagatgaggctaccctagatacaaggaaaatagtagaagcttgtaaagccaaaactgatgctggcggtgaagatgctattttgcaaaccagaacttatgacctttacatcacttatgataaatattaccagactccacgattatggttgtttggctatgatgagcaacggcagcctttaacagttgagcacatgtatgaagacatcagtcaggatcatgtgaagaaaacagtgaccattgaaaatcaccctcatctgccaccacctcccatgtgttcagttcacccatgcaggcatgctgaggtgatgaagaaaatcattgagactgttgcagaaggagggggagaacttggagttcatatgtatccttccctgtatgtaagattagtggcaaaatggctgttaacgatttttttttttgagaaatttagtgtaaccttaatgatacagtagctataacttgttttaacttctcatctgaaaatcctagtagaagtctttcatttatttagaaaatgttatattgtgatagttatgccttgcttagttgattagaacatgtccccatgtgtagcagtagctcacccttgttacagaggtaactactaatttagaataataatatgagtatctttttcttatgtacatttccagtttaacatgttaccaaaaatgtactttcccatcaggtaaaagtaaaattaggttgtgtcaatctgaggtgtctctgaagcaaataattcagcttaaacaaatacgttaattaaaagtaatgtactacgtgaagtgctttagatattcttaaaatatagtacgttcatttttctcaagacagtagcacctttcttgtatcttactatagttttcctactcagttttcttggattgacaaaagtaatacattcaagttaatgcccaagcaaactgttggatcctaaagtacatgcactcatagcatagatttatcaaaaacagtcaaaatcaatgatttacatgccagatagcttgaattagtttgatgctaggttaatacttgacttggtggtggtttcggctactatgtgttagattagatgtggagactaagatgccacgtctaatcagactgtggggcattgctaataaagtgtgtccctaagaagaactttgaactgatttgatattgaaacaaaccaaaaacttccagtccaaaccatatttactcctgaagtcctattatgcctaactggcacatctctgctggatgctaggtagcaacttggaagactgtctatatataattcataatagtaattggtttcccccaatgaaaagtaagctcctaatgtttttaagtgcaatgaacataaaaaaatttcagaatttaattaaagacagtccagtagagctcagtctttggcaaatacatacactaacctagaatcagtctactatacaggatttttatttaatttttttctcttttgctatagtacttcattatagtctattctgcctcattttctgacataactctagcaaacttaaaggagtctagtaaatgagtacattttgtactcatttaaacatgtatagctttgtcctttttatgtcaaagtaattgtgcttatatgaacacctactcattaagaagtttcaaattcaataatcgaatgagtggtcaggtagtcttaaagagcctcatgttaaatagacacaaatttacatagttgaattctttaatagacttaatttaagattttgtggggtttttttgagaaattaatggcttaataaaatggataattacaacatgggcttaaaacatagaactatttacaaatcttattttccttagctaaaaacctttaggtatcttcttattttcttgaaatttgtacaagctgtcattccaacaatagaatatgactacacaagacacttcacaatgtaatgaagagagcataaaatctatcctaattattggttctgatttttaaagaattaacccatagatgtgaccattgaccatattcatcaatatatacagtttctctaataagggacttatatgtttatgcattaaataaaaatatgttccactaccagccttacttgtttaataaaaatcagtgcaaagagaaaaaaaaaaaaaaaaaaaaaaaaaaaaaaaaaaaaaaaaaaaaaaaaaaaaaaaaaaaaaaaaaaaaaaaaaaaaaaaaaaaaaaaaaaaaaaaaaaaaaaaaaaaaaaaaaaaaaaaaaaaaaaaaaaaaaaaaaaaaaaaaaaaaaaaaaaaaaaaaaaaaaaaaaaaaaa

SEQ ID NO: 25317 - DNA, 1142 bp, Homo Sapiens
gccgcccgactgccatcgcccggcccggccgcgcccgcggaaccagaccaggcagatcgggagcggtgccgagaaaaatttccttactagatgacatttcatcgcaatgtccgatcgtttggggcaaattaccaagggcaaggatgggaaaagcaagtactcgactctcagcctgtttgataagtataaaggaaaatcagtagacgcgattagatcctcagttattcctagacatggcttacagagtcttgggaaagttgctgcagcccggcgcatgccaccgcctgcaaacctgccaagcttgaagtctgaaaacaaaggaaacgaccccaacatcgtgatagtacccaaggacgggacgggatgggcaaacaagcaggatcagcaagacccaaagagttccagtgcgacggcctctcagccgccggagtcgctgccgcagccgggtttgcagaaatctgtctccaatttgcagaaaccgacacagtcaatcagtcaggagaatacaaattcagtgccaggtggaccaaagtcatgggcacagctgaatggaaagccagtaggacacgaaggtggtttaaggggctcaagccgactgttatccttctctcccgaggaatttccgacgctgaaagcagctggagggcaggacaaggctggcaaagaaaagggcgtcttagatctgtcgtatgggccaggaccaagcctccgccctcagaatgtgacaagctggagggagggcggtgggcgacacataatttctgccacgtctctgagcacctccccaactgagctgggcagcaggaactcgagtacgggagatggagccccctcctcggcatgtaccagcgattctaaggacccctctctccgcccggctcagcctgtccgaaaaggggcttcacagttcatgggaaatgtataccacccacctacataccatgacatgcttcctgcttttatgtgttcgccgaagtcatcagaaaaccagggtacagtggaacgaggctcttttccccttcctcagctccgccttgaacctcgagttccttttagacagttccagatgaatgaccaagactggaattatggtgctagattagtaaacatgacttttaatgagtaaaaaaaaaaaaaaaaaa

SEQ ID NO: 25318 - DNA, 2311 bp, Homo Sapiens
gtggaagccggctcttgcgctttgggatcctgatcggccgcctgcttccccaggtcctcaattcctggagcatcggtagagattccctctctccaggccaggagaggccttacagcacggttcggaccaaggtgtatgcgatattagagctgtgggtgcaggtttgtggggcctcggcgggaatgcttcagggaggagcctctggagaggccctgctcacccacctgctcagcgacatctccccgccagctgatgcccttaagctgcgtagcccgcgggggagccctgatgggagtttgcagactgggaagcctagcgcccccaagaagctaaagctggatgtgggggaagctatggccccgccaagccaccggaaaggggatagcaatgccaacagcgacgtgtgtgcggctgcactcagaggcctcagccggaccatcctcatgtgtgggcctctcatcaaggaggagactcacaggagactgcatgacctggtcctccccctggtcatgggtgtacagcagggtgaggtcctaggcagctccccgtacacgagctcccgctgccgccgtgaactctactgcctgctgctggcgctgctgctggccccgtctcctcgctgcccacctcctcttgcctgtgccctgcaagccttctccctcggccagcgagaagatagccttgaggtctcctctttctgctcagaagcactggtgacctgtgctgctctgacccacccccgggttcctcccctgcagcccatgggccccacctgccccacacctgctccagttccccctcctgaggccccatcgcccttcagggccccaccgttccatcctccgggccccatgccctcagtgggctccatgccctcagcaggccccatgccttcagcaggccccatgccctcagcaggccctgtgccctcggcacgccctggacctcccaccacagccaaccacctaggcctttctgtcccaggcctagtgtctgtccctccccggcttcttcctggccctgagaaccaccgggcaggctcaaatgaggaccccatccttgcccctagtgggactcccccacctactatacccccagatgaaacttttggggggagagtgcccagaccagcctttgtccactatgacaaggaggaggcatctgatgtggagatctccttggaaagtgactctgatgacagcgtggtgatcgtgcccgaggggcttccccccctgccacccccaccaccctcaggtgccacaccaccccctatagcccccactgggccaccaacagcctcccctcctgtgccagcgaaggaggagcctgaagaacttcctgcagccccagggcctctcccgccacccccacctccgccgccgcctgttcctggtcctgtgacgctccctccaccccagttggtccctgaagggactcctggtgggggaggacccccagccctggaagaggatttgacagttattaatatcaacagcagtgatgaagaggaggaggaagaggaagaagaggaagaagaagaagaggaagaagaggaagaggaggaagactttgaggaagaggaagaggatgaagaggaatattttgaagaggaagaagaggaggaagaagagtttgaggaagaatttgaggaagaagaaggtgagttagaggaagaagaagaagaggaggatgaggaggaggaagaagaactggaagaggtggaagacctggagtttggcacagcaggaggggaggtagaagaaggtgcacctccacccccaaccctgcctccagctctgcctccccctgagtctcccccaaaggtgcagccagaacccgaacccgaacccgggctgcttttggaagtggaggagccagggacggaggaggagcgtggggctgacacagctcccaccctggcccctgaagcgctcccctcccagggagaggtggagagggaaggggaaagccctgcggcagggccccctccccaggagcttgttgaagaagagccctctgctcccccaaccctgttggaagaggagactgaggatgggagtgacaaggtgcagcccccaccagagacacctgcagaagaagagatggagacagagacagaggccgaagctctccaggaaaaggagcaggatgacacagctgccatgctggccgacttcatcgattgtccccctgatgatgagaagccaccacctcccacagagcctgactcctagccatcttctgcaccccactctttgtttccaataaagttatgtccttagataaaaaaaaaaaaaaaaaaaaaaaaaaa

SEQ ID NO: 25319 - DNA, 1737 bp, Homo Sapiens
cctcgtgccgggccttgagggagagctggggcctgctcccggagagatacggctatgtcgatcgaaatcgaatcttcggatgtgatccgccttattatgcagtacttgaaggagaacagtttacatcgggcgttagccaccttgcaggaggagactactgtgtctctgaatactgtggacagcattgagagttttgtggctgacattaacagtggccattgggatactgtgttgcaggctatacagtctctgaaattgccagacaaaaccctcattgacctctatgaacaggttgttctggaattgatagagctccgtgaattgggtgctgccaggtcacttttgagacagactgatcccatgatcatgttaaaacaaacacagccagagcgatatattcatctggagaaccttttggccaggtcttactttgatcctcgtgaggcatacccagatggaagtagcaaagaaaagagaagagcagcaattgcccaggccttagctggcgaagtcagtgtggtgcctccatctcgtctcatggcattgctgggacaggcactgaagtggcagcagcatcagggattgcttcctcctggtatgaccatagatttgtttcgaggcaaggcagctgtcaaagatgtggaagaagaaaagtttcctacacaactgagcaggcatattaagtttggtcagaaatcacatgtggagtgtgctcgattttctccagatggtcagtatttggtcactgggtctgttgatggattcattgaagtatggaactttactactggaaaaatcagaaaggatcttaagtaccaggcccaagataactttatgatgatggatgatgctgtcctctgcatgtgtttcagcagagatacagaaatgttagcaactggggcccaagatggaaaaatcaaggtgtggaagattcagagtggacaatgtttaaggagatttgagagggcacacagtaagggtgtcacctgtctaagcttttctaaggatagcagtcagatccttagtgcttcttttgaccagacaattagaattcatggtttaaaatctgggaaaaccctgaaggaatttcgtggccattcctcctttgttaacgaagcaacatttacacaagatggacattacattattagtgcatcctctgatggcactgtaaagatctggaatatgaagaccacagaatgttcaaatacctttaaatccctgggcagcaccgcagggacagatattaccgtcaacagtgtgattctacttcctaaaaaccctgagcactttgtggtgtgcaacagatcaaacacggtggtcatcatgaacatgcaggggcagattgtcagaagcttcagttctggtaaaagagaaggtggggactttgtttgctgtgccctctctccccgtggtgaatggatctactgtgtaggggaggactttgtgctctactgtttcagtacagtcactggcaaactggagagaactttgacagtgcacgagaaggatgtgattggtattgcacatcaccctcatcagaacctgattgctacctacagtgaagatggactcctaaagctctggaaaccataattcaacttttctttttaaatcagctcgaaagcatgtacttaaatgaagcatattcatgtaatgtgctttttttttttttttgccagcttttctaagcaaatagattgtctgaattagtcacagaaaaaaaaaaaaaaaaaa

SEQ ID NO: 25320 - DNA, 3054 bp, Homo Sapiens
gaccaacagatccagggtggcctgattggtggagcccctggagtggaaatgctggggcagcttcagcggcacctggaacccattatggtcctttctggtctggaactggccacaacttttgagcacttctatcagcattatatggcggaccgtctcctgagctttggttcgagctggctggagggggctgtgctagagcagattggcctctgttttcccaaccgcctcccacagctgatgctgcagagcctgagcacctctgaggagctgcagcgccagttccacctcttccagctccagcggctcgacaagttgttcttggagcaggaagatgaggaggaaaagagactagaggaagaggaggaggaagaggaggaagaggaagctgagaaagaattatttatcgaagatccaagtccagccatttctatactggtcctgtcaccacgctgctggcccgtctccccactctgctacctgtaccatcccagaaagtgccttcccacagaattctgtgatgcccttgaccgtttctccagtttctacagccagagtcagaaccatccagtcctggacatgggaccacatcggcgactgcagtggacgtggctgggccgggctgagctgcagtttgggaagcagatactgcatgtgtccaccgtgcagatgtggctgctgctgaaattcaatcagacagaggaggtgtcagtagagaccttgctgaaggattctgacctctccccagagctgctgctccaggcactcgtgcccctcacctcagggaatggccctttgaccctgcatgagggccaggactttccacacgggggtgtgctgcggcttcatgagcctgggccccagcgcagtggggaggccctgtggctgatacctccccaggcatacctgaacgtagagaaggatgaaggccgaaccctggaacagaagaggaatctcttgagctgtcttcttgttcgtattctcaaagcccatggggaaaagggcctccacattgatcagctggtttgtctggtgctggaggcctggcagaagggtccaaatcctcctggaaccctgggccacactgttgctgggggtgtggcctgtaccagtacagatgtcctctcttgcatcctgcacctcttaggccagggctacgtgaaacggcgtgatgaccggccccagatcctgatgtatgccgctccagagcccatggggccctgccggggtcaggcagatgtccctttctgtggcagccagagcgaaacctccaagcccagcccagaagctgtggctaccctggcatctctacagctgcctgcaggccgcaccatgagcccccaggaagtagaagggttgatgaagcagacggtgcgtcaggtgcaggagacgctgaacttagagccagatgtcgctcagcaccttttggctcattcccactggggcgctgaacagctgctgcagagctacagtgaggaccctgagccactgctgctggcagctgggctgtgcgtacaccaggctcaggctgtacccgtacggcctgaccactgccccgtctgtgtgagccccctggggtgtgacgacgacctgccctctctctgctgcatgcactattgctgtaagtcttgctggaatgagtacctgacaactcggatcgagcagaaccttgttttgaattgcacctgccccattgccgactgccccgcccagcccaccggagccttcattcgtgccatcgtctcctcgccagaggtcatctccaagtatgagaaggcgctcctgcgtggctatgtggagagctgctccaacctgacctggtgcaccaacccccagggctgcgaccgcatcctgtgccgccagggcctgggctgtgggaccacctgctccaagtgtggctgggcctcttgcttcaactgtagcttccctgaggcacactaccctgctagctgtggccatatgtctcagtgggtcgacgacggtggctactatgacggcatgagcgtggaggcgcagagcaagcacctggccaagctcatctccaagcgctgtcccagctgtcaggctcccatcgagaagaacgaggggtgcctgcacatgacctgtgccaaatgtaaccatggattctgctggcgctgcctcaagtcctggaagccaaatcacaaagactattacaactgctctgccatggtaagcaaggcagctcgccaggagaagcggtttcaggactataatgagaggtgcactttccatcaccaggcgcgggagtttgctgtgaacttgcggaaccgggtgtctgccatccatgaagtgcccccgcccagatccttcaccttcctcaatgatgcctgccagggactggagcaggctcggaaggtgctggcctacgcctgcgtgtacagcttctacagccaggacgcagagtacatggatgtggtggagcagcagacagagaacctggagctgcacaccaatgccctgcagatcctcctggaggaaaccctgctgcggtgcagagacctggcctcctccctgcgcctcctgcgggccgactgcctcagcacgggcatggagctgctccggcggatccaggagaggctgcttgccatcctgcagcattctgcccaggatttccgggttggtcttcagagtccatcagtagaggcctgggaggcaaaaggacccaacatgcctggcagtcagccccaggcctcctcagggccagaggcagaagaggaggaggaagacgatgaggatgatgtgcccgagtggcagcaggatgagtttgatgaggagctggacaatgacagcttctcctacgatgagtctgagaacctggaccaagagactttcttctttggtgatgaggaagaggatgaagatgaggcctatgactgagggggcagatgcaggaaacacctagagcagccccagagtcacggggctgagggggcgggagctgcccctgtcatagggagggggattcccagcgtctgtagtgcttcctgtttgctgaataaaggtctctttctcacaaaaaaaaaaaaaaaaaaaaaa

SEQ ID NO: 25321 - DNA, 1122 bp, Homo Sapiens
taacgggagcagagtcggcgggattgagcatttccacagaaattacagttttgtcctttttgaaaaaatagaactgtatttcagaaaaaagaaactacagttttagcatgcagaaaggaaaagggagaacaagccggatcagaagacgaaaactctgcggaagttctgaatcaagaggagtgaatgagagccacaagtctgaatttatagagctgaggaagtggctgaaagctaggaagtttcaagattcaaacttagcgcctgcttgttttccaggtacaggaagagggctgatgagtcaaacatccctgcaggagggacagatgattatttcgttgcctgagagttgcctgctcaccacggacacagtgattcgaagctacttaggggcatacattactaagtggaagcctcctccatctcctctgctggcgctgtgcacctttttagtttcagaaaagcatgctgggcaccgatctctttggaagccttacctggagattttacccaaggcgtatacctgccctgtttgtttggagccggaagtggtgaaccttcttcccaaatctttaaaagcaaaggctgaagagcagagagcccacgtgcaggagttctttgcttcctccagagactttttctcttctctgcagcctctgtttgcggaggctgttgacagcatcttcagctacagtgccctgctgtgggcttggtgcaccgtcaacaccagagccgtgtacctgaggcccaggcagcgggaatgcctttctgcagagccggacacctgtgcactcgctccgtacctggacctgctgaatcatagcccacatgtccaggtaaaagcagcgtttaatgaagaaactcattcttacgaaattagaacgacttcacgttggagaaagcatgaagaggtattcatctgttacggccctcacgataatcaacggctgttcctggaatacggatttgtttctgtccataatcctcatgcttgtgtttatgtctcaagaggttggaatcaactttgttcttaacattaacactatataatttttttccccatttggagatgtgtattttcagttttaataaaaatatcaaaaccttaaaaaaaaaaaaaaaaaa

SEQ ID NO: 25322 - DNA, 1680 bp, Homo Sapiens
agagcttgtccaaaatggctgtccaaaaacgaccccacacttgcgttagaagatgatacctttttcagggacagttttctctcttggctcctgtcccgctggccctctgtctgcctgtgtccctgaccatggctccctgcagtaccctttaacgatttatcagcaagactgttgaacgcataactgcccaagatgcctgtccctccccctccagcacccccgccgcccccgacgtttgcactggccaatacagagaagcctaccttgaataagacagagcaggctgggagaaatgctctcctttctgatatcagcaaagggaagaaactaaagaagacggtcaccaatgacagaagtgcaccaatactggacaaacctaaaggagctggtgctggaggcggtggtggtggctttggtggaggcggcggatttggcggaggaggtggtggcggaggcggtggaagttttggagggggcggacctccaggtctgggaggattgttccaggctggaatgccgaagctgagatccacggccaacagggataatcattctggaggaagccgaccaccattgttgccaccgggaggaagatccacatctgcgaaacccttttcacccccaagtggcccagggaggtttcctgtgccttctccaggccacagaagtggtcccccagagcctcagaggaaccgaatgccgcccccaaggcccgacgtgggctcaaagcctgatagcattcctcctccagtacctagtactccaagacccattcaatcaagtctgcacaaccgggggtccccaccagtgcccggaggccccaggcagcccagccccgggcccactcctcccccacctccagtgagggacccgccaggccgatcaggccccctcccaccacctcctccagtaagcagaaacggcagcacatctcgggccctgcctgctacccctcagttgccatccaggagtggagtagacagtcccaggagtggacccaggcctccccttcctcctgataggcccagtgctggggcacctcccccacctccaccatcaacatctattagaaatggcttccaagactctccatgtgaagatgagtgggaaagcagattctacttccatccgatttccgatttgccacctccagagccatatgtacaaacgaccaaaagttatcccagcaaactggcaagaaacgaaagccggagtggatccaaccgaagagaaaggggtgctccaccactccctcccatcccgaggtgatctttgcctgctcttctctacccaagctcaagagctgcttctgttgctatctaagaactgcataccctcctccctgcttcttcccttgtgcctcatgtatgggcaggaggaaaggtgggagggggagtgggaatatgcgtgtgtgggtgggaatcggtaagaaatgcacctagcttttcatattgtgtttattctccaggctattgcttgcttcagctgcagcctgcctgtgctggctgctggggtcgataggcttttgtcgtaataggcagagatgacttgcatcccagctttccaccaaccaaattcaaacattcactgcttatttgttacagactgtaattattaaagtccctgagagctgttaaaaaaaaaaaaaaaaaaaaaaaaaaaaaaaaaaaaaaaaaaaaa

SEQ ID NO: 25323 - DNA, 2117 bp, Homo Sapiens
ggcaacgaggggctgcctctggggggtccgctagtcgcggggcggcggcggcggctgcgggcgcgaggttcccagcaggatgccccggctctgcaggaagctgaagtgagaggcccggagagggcccagcccgcccggggcaggatgaccaaggcccggctgttccggctgtggctggtgctggggtcggtgttcatgatcctgctgatcatcgtgtactgggacagcgcaggcgccgcgcacttctacttgcacacgtccttctctaggccgcacacggggccgccgctgcccacgcccgggccggacagggacagggagctcacggccgactccgatgtcgacgagtttctggacaagtttctcagtgctggcgtgaagcagagcgaccttcccagaaaggagacggagcagccgcctgcgccggggagcatggaggagagcgtgagaggctacgactggtccccgcgcgacgcccggcgcagcccagaccagggccggcagcaggcggagcggaggagcgtgctgcggggcttctgcgccaactccagcctggccttccccaccaaggagcgcgcattcgacgacatccccaactcggagctgagccacctgatcgtggacgaccggcacggggccatctactgctacgtgcccaaggtggcctgcaccaactggaagcgcgtgatgatcgtgctgagcggaagcctgctgcaccgcggtgcgccctaccgcgacccgctgcgcatcccgcgcgagcacgtgcacaacgccagcgcgcacctgaccttcaacaagttctggcgccgctacgggaagctctcccgccacctcatgaaggtcaagctcaagaagtacaccaagttcctcttcgtgcgcgaccccttcgtgcgcctgatctccgccttccgcagcaagttcgagctggagaacgaggagttctaccgcaagttcgccgtgcccatgctgcggctgtacgccaaccacaccagcctgcccgcctcggcgcgcgaggccttccgcgctggcctcaaggtgtccttcgccaacttcatccagtacctgctggacccgcacacggagaagctggcgcccttcaacgagcactggcggcaggtgtaccgcctctgccacccgtgccagatcgactacgacttcgtggggaagctggagactctggacgaggacgccgcgcagctgctgcagctactccaggtggaccggcagctccgcttccccccgagctaccggaacaggaccgccagcagctgggaggaggactggttcgccaagatccccctggcctggaggcagcagctgtataaactctacgaggccgactttgttctcttcggctaccccaagcccgaaaacctcctccgagactgaaagctttcgcgttgctttttctcgcgtgcctggaacctgacgcacgcgcactccagtttttttatgacctacgattttgcaatctgggcttcttgttcactccactgcctctatccattgagtactgtatcgatattgttttttaagattaatatatttcaggtatttaatacgaaatgtggaagggaatgctggagtaaaatatcccctctcccctccgcccgcccgcccgcccgcccgctcgcccgcccgcccgctcgcccgctcctgtggtttttctgagcgtgcgggctccgggaggggatgctgaggctgatggagctgcctccagggctagggccactcaccggaggagggcggggcctgcacttgaagtcaggccgcacctgtctgtttttggaagggtagccgacaaatccttccagagggaaagttctttgtttaagtgttgtacttgaaaaggtcaatcttcagggcttcctgtttgaagtcaagtcagaggtaaaccggtcagttacagaagcaggatttctaggatttctaactccagctgttcccatactgtctagtttaaattatggctgttaaggccgggcgggtgactcaggcaggtaatcccagaactttgggaggcccagacagaaggatcgcttgaggtcaggaatttgagacctggccaacatggtgaaaccctgtctctactaaaaaaaaaaaaaaaaaaaaaaaaa

SEQ ID NO: 25324 - DNA, 2180 bp, Homo Sapiens
ggcacgagggaggaactcctggagggtttgagcgtctggaaactctctgctctgacccgaggaagcaccctcctgacgccgccttcctccggttattgaaaggacgcctcagaaatgctttgttttcttttacgatgtattcagaagcctttactgattaaagttttcttttatttgggtggccgggagagacccagggaggttctggaggttcctttctgtctcctggccccaccagggatttccccatttctgtttgctgcctgaaagcaggatgaggaaggccaaggagagtccttgcacccgtgagcgtcaggatgaggaaatgacaggaggaagacgtgggtttgggttagtggctgctggcgttttggcccttggtgtttctggagcctccagggatctaggggagcctgggctgcgtgcatgtcgataagcagagctgttcttggggagaaggagggaggtctcgggagtgtagcaccatgccaaccagccctgcgcgaagacagagtgagccacgcccggatggcagggcatgtttctgttttggtgtctcactttcctcccagcgtgacttatttggggattcctcagggcctactggaatgtgactgcccactgcccagctgcctcgggtacaagtcctggccctatgtcccagctgtcaggggctcagggaatcctacccagccacctgtcctgggatggagtgtcagcatccaccccttggttgtcatcgaggccgccctcccagtcctgggtgaagatatttgggccaccagggctcccttggccccttcacgtaggaaatagacacgtgctttttaatgcaggacactttgagtgttacaaaatctgtagacctggcagtagggtcatgatgttgggaagggtgtagtgccctaggttggtgacagaagggacagacacttgtgcacaggtgtctttggtgatggggtttttttttttataacttagtaaaaaaaaaaaaatgtatgtggaattctgtctcttggtaaagctcaaagccaggctagcctgaggtggcgcagggctctccttcctgtcccttcgatctccttgagaattaagagctggcagctgctgatggtgtttcccaacccccctcacttcccaagacaacccccagcttcaggtcctcatggggaggggagggcacgttcttgatacatgggaacttcgctcaggagggcctccccttcccctctccctcagagttttcactgccgtctcgtctttagaaagctgtttgaattccccccgcccccagtttggaccgtgtagatataactggatatacggatttttctctttgtgcaggcttcttatgccgttggtatacagggcaggaaagagaggaataaagggagagagcagtgtggaaaccacggtggttttgctttgttcttactaggttttggtgccaccttccctgcctgcgcttgtgccccctctcctccttggcactggcggcctccttgcctcccttccaccagtgctgccatcccgtgcctgtcgtgttggttcttcacacgtgctctgttctcggggttgttccattcatgccttcttggagggtgagggtggcttgggaaccgacccagtgatcatgcctactttcttctttgtatctccctccttcccagcccacccgggcagcagactctgatggaaggaaggtgccgtaggtgggcttttagaaactaacgggactggttttcaaagcagttatcttgggaaactgtttattccagcgatgtgacttttttcagaatatttcttggaatcatattcagagtctggggctgtgtgttgagcagccttaaggatgctagacactcatttagtgcccagggagtccagcgaatgacgtctgtggccaagcgaggtctcaggtgcaaagcaaaaggaccatttaaagtaaaatagcttggattcaatcatgtgacttttaaattggctcagaaagcaattttgtaatttcagagagtgttttgagccatggccacgttgtcattgtgagtctatagcttgactccttggagaacaatattcatttggttgtggagactgatttgctgggagaaatctgtcctgttactttctggtcatcccaggttctgacttttaccaggggcaaaaaaaaaaaaaaaaaa

SEQ ID NO: 25325 - DNA, 2340 bp, Homo Sapiens
ggggattcaacatggcggcgggagtgtccgcggtggtggcggtgcaagagagctgaaggaggcgcgagggcgcggagttccaggccgagcagttaggccgcgagcgactgcggcgccgagccgatgagtaacccgaagcccctagaggagtggtcacctgcctgagggcacttctgtcccaccagcatcagaccaggccgcaccgagtccccggcaccatgtttgggaagaggaagaagcgggtggagatctccgcgccgtccaacttcgagcaccgcgtgcacacgggcttcgaccagcacgagcagaagttcacggggctgccccgccagtggcagagcctgatcgaggagtcggctcgccggcccaagcccctcgtcgaccccgcctgcatcacctccatccagcccggggcccccaagaccatcgtgcggggcagcaaaggtgccaaagatggggccctcacgctgctgctggacgagtttgagaacatgtcggtgacacgctccaactccctgcggagagacagcccgccgccgcccgcccgtgcccgccaggaaaatgggatgccagaaaagccccctggcccccgctcaccacagcgggagccacagcgagtatcccatgagcagttccgggctgccctgcagctggtggtggacccaggcgacccccgctcctacctggacaacttcatcaagattggcgagggctccacgggcatcgtgtgcatcgccaccgtgcgcagctcgggcaagctggtggccgtcaagaagatggacctgcgcaagcagcagaggcgcgagctgctcttcaacgaggtggtaatcatgagggactaccagcacgagaatgtggtggagatgtacaacagctacctggtgggggacgagctctgggtggtcatggagttcctggaaggaggcgccctcaccgacatcgtcacccacaccaggatgaacgaggagcagatcgcggccgtgtgccttgcagtgctgcaggccctgtcggtgctccacgcccagggcgtcatccaccgggacatcaagagcgactcgatcctgctgacccatgatggcagggtgaagctgtcagactttgggttctgcgcccaggtgagcaaggaagtgccccgaaggaagtcgctggtcggcacgccctactggatggccccagagctcatctcccgccttccctacgggccagaggtagacatctggtcgctggggataatggtgattgagatggtggacggagagcccccctacttcaacgagccacccctcaaagccatgaagatgattcgggacaacctgccaccccgactgaagaacctgcacaaggtgtcgccatccctgaagggcttcctggaccgcctgctggtgcgagaccctgcccagcgggccacggcagccgagctgctgaagcacccattcctggccaaggcagggccgcctgccagcatcgtgcccctcatgcgccagaaccgcaccagatgaggcccagcgcccttcccctcaaccaaagagccccccgggtcacccccgccccactgaggccagtagggggccaggcctcccactcctcccagcccgggagatgctccgcgtggcaccaccctccttgctgggggtagatgagaccctactactgaactccagttttgatctcgtgacttttagaaaaacacagggactcgtgggagcaagcgaggctcccaggacccccaccctctgggacaggccctcccccatgttcttctgtctccaggaagggcagcggccctcccatcactggaagtctgcagtgggggtcgctgggggtggagagaacactaagaggtgaacatgtatgagtgtgtgcacgcgtgtgagtgtgcatgtgtgtgtgtgtgcaaaggtccagccaccccgtcctccagcccgcaaggggtgtctggcgccttgcctgacacccagccccctctccccctgagccattgtgggggtcgatcatgaatgtccgaagagtggccttttcccgtagccctgcgccccctttctgtggctggatggggagacaggtcagggccccccaccctctccagcccctgcagcaaatgactactgcacctggacagcctcctcttttctagaagtctatttatattgtcattttataacactctagcccctgcccttattgggggacagatggtccctgtcctgcggggtggccctggcagaaccactgcctgaagaaccaggttcctgcccggtcagcgcagccccagcccgcccacccctgcctcgagttagttttacaattaaaacattgtcttgtaaaaaaaaaaaaaaaaaa

SEQ ID NO: 25326 - DNA, 2495 bp, Homo Sapiens
gtcccttggtggggaagctgttgctgttgctagacgacgggaactagctctcgtcacttcctcagcccgccgtctgcccactcctctagccggaacctgggggcccggagccggggtaggcacagagttgtcctcggaggtccaggacagcggccagcccggcggcgggagtcagggccacgccacctgcagggaagaacccgagtcgaagcgggaagatggctgcagacaagcctgcagatcagggagcagagaaacatgaaggcacaggtcagtcctctgggatcactgatcaagagaaggagttatccaccaatgctttccaagctttcacatctggaaattatgatgcctgtctacaacaccttgcctgtctacaagatataaacaaagatgattataaaataattttgaatacagcagtagctgagttttttaaaagtaaccaaacaacaacagataatttgagacaaacacttaaccagctgaagaatcaggtccactcagctgttgaagaaatggatggattagatgatgttgaaaacagcatgttgtactataatcaagcagtcattctttatcatctgcggcagtatacagaagccatatcagttggtgaaaaactttatcagttcatagagccttttgaagaaaaatttgcccaagcagtgtgttttttgcttgtagacctgtatatattaacctaccaagctgagaaagctttgcatcttcttgctgtcctagaaaaaatgatttcacagggtaacaataacaaaaatggaaagaatgagactggtaataacaacaacaaagatggatctaatcataaagctgaaagtggagctctaatagaagctgcaaaatcaaagatacatcagtacaaagtacgagcttatatccaaatgaagtctctgaaagcatgtaaaagggaaatcaagtcagtcatgaatacagctggaaattccgcaccctctctctttcttaaaagcaattttgagtacttaagaggtaattatcgaaaagccgtgaagctattaaatagttcaaacattgctgagcatccaggattcatgaaaacaggtgaatgcttgagatgcatgttctggaataaccttggttgcatccattttgccatgagcaagcacaatttgggaatattctactttaaaaaggctctgcaagagaatgacaatgtctgtgcacagctcagtgcaggtagcactgatccaggtaaaaaattttcaggaagacccatgtgtacgttactaaccaataagagatatgagttgctgtataactgtggaattcagcttcttcacattggaaggcctcttgctgccttcgaatgtctgattgaagctgttcaggtttatcatgcaaatcctcgcctctggctacggctggctgaatgctgcattgctgccaataaggggacttctgaacaagaaactaaaggccttcccagcaaaaaaggaattgtacagtctattgttggtcaaggctatcatcgtaaaatagttttggcatcacagtctatacagaatactgtttataatgatgggcagtcttcggccattcctgtagccagtatggagtttgcagccatatgtctcagaaatgccttgttgctgctacctgaagaacagcaagatccaaagcaggaaaatggggctaaaaatagtaatcaattaggtgggaacacagagagcagcgaaagcagtgaaacttgcaggtgctccatacttgcttgcagtgcctacgtggctctggctttgggtgataacctcatggctttgaatcatgcagataaacttcttcagcagcccaagctgtcaggatctcttaagtttttgggacatttatatgctgcagaagccctcatctctctcgacagaatatctgatgccattactcacttgaacccggagaatgtcactgatgtctccttagggatctcttcaaatgagcaggaccaaggatcagacaaaggtgaaaatgaagcaatggaatcctctggtaagcgggcccctcagtgctaccccagttccgtcaactctgccaggactgtgatgctgttcaaccttggcagcgcttactgcctgaggagcgaatatgacaaagcccgaaagtgtctccaccaggcggcttcaatgatccatcctaaagaggtgccccctgaggccatcttgctggcagtctaccttgaactgcagaatggtaatactcagctggccttacagatcatcaaaaggaatcagctgctccctgcagtgaaaacacactctgaagtgagaaagaagccagtgtttcagcctgtccacccgatccagcccatccaaatgtcggctttcaccactgtgcagagaaagtgatacttcacttttggaaaactgttacctgagacccaggggagaatttactggccattttagttgtatcacagcagaatgaataaaagatggtgaaggctgttaaaaaaaaaaaaaaaaaaaaaa

SEQ ID NO: 25327 - DNA, 2578 bp, Homo Sapiens
gtggcggtcccttggtggggaagctgttgctgttgctagacgacgggaactagctctcgtcacttcctcagcccgccgtctgcccactcctctagccggaacctgggggcccggagccggggtaggcacagagttgtcctcggaggtccaggacagcggccagcccggcggcgggagtcagggccacgccacctgcagggaagaacccgagtcgaagcgggaagatggctgcagacaagcctgcagatcagggagcagagaaacatgaaggcacaggtcagtcctctgggatcactgatcaagagaaggagttatccaccaatgctttccaagctttcacatctggaaattatgatgcctgtctacaacaccttgcctgtctacaagatataaacaaagatgattataaaataattttgaatacagcagtagctgagttttttaaaagtaaccaaacaacaacagataatttgagacaaacacttaaccagctgaagaatcaggtccactcagctgttgaagaaatggatggattagatgatgttgaaaacagcatgttgtactataatcaagcagtcattctttatcatctgcggcagtatacagaagccatatcagttggtgaaaaactttatcagttcatagagccttttgaagaaaaatttgcccaagcagtgtgttttttgcttgtagacctgtatatattaacctaccaagctgagaaagctttgcatcttcttgctgtcctagaaaaaatgatttcacagggtaacaataacaaaaatggaaagaatgagactggtaataacaacaacaaagatggatctaatcataaagctgaaagtggagctctaatagaagctgcaaaatcaaagatacatcagtacaaagtacgagcttatatccaaatgaagtctctgaaagcatgtaaaagggaaatcaagtcagtcatgaatacagctggaaattccgcaccctctctctttcttaaaagcaattttgagtacttaagaggtaattatcgaaaagccgtgaagctattaaatagttcaaacattgctgagcatccaggattcatgaaaacaggtgaatgcttgagatgcatgttctggaataaccttggttgcatccattttgccatgagcaagcacaatttgggaatattctactttaaaaaggctctgcaagagaatgacaatgtctgtgcacagctcagtgcaggtagcactgatccaggtaaaaaattttcaggaagacccatgtgtacgttactaaccaataagagatatgagttgctgtataactgtggaattcagcttcttcacattggaaggcctcttgctgccttcgaatgtctgattgaagctgttcaggtttatcatgcaaatcctcgcctctggctacggctggctgaatgctgcattgctgccaataaggggacttctgaacaagaaactaaaggccttcccagcaaaaaaggaattgtacagtctattgttggtcaaggctatcatcgtaaaatagttttggcatcacagtctatacagaatactgtttataatgatggtcagtcttcggccattcctgtagccagtatggagtttgcagccatatgtctcagaaatgccttgttgctgctacctgaagaacagcaagatccaaagcaggaaaatggggctaaaaatagtaatcaattaggtgggaacacagagagcagcgaaagcagtgaaacttgcagcagtaaaagccatgatggagataaattcattccagctccaccttcttctccattgagaaaacaggaattagaaaacttaaagtgctccatacttgcttgcagtgcctacgtggctctggctttgggtgataacctcatggctttgaatcatgcagataaacttcttcagcagcccaagctgtcaggatctcttaagtttttgggacatttatatgctgcagaagccctcatctctctcgacagaatatctgatgccattactcacttgaacccggagaatgtcactgatgtctccttagggatctcttcaaatgagcaggaccaaggatcagacaaaggtgaaaatgaagcaatggaatcctctggtaagcgggcccctcagtgctaccccagttccgtcaactctgccaggactgtgatgctgttcaaccttggcagcgcttactgcctgaggagcgaatatgacaaagcccgaaagtgtctccaccaggcggcttcaatgatccatcctaaagaggtgccccctgaggccatcttgctggcagtctaccttgaactgcagaatggtaatactcagctggccttacagatcatcaaaaggaatcagctgctccctgcagtgaaaacacactctgaagtgagaaagaagccagtgtttcagcctgtccacccgatccagcccatccaaatgccggctttcaccactgtgcagagaaagtgatacttcacttttggaaaactgttacctgagacccaggggagaatttactggccattttagttgtatcacagcagaatgaataaaagatggtgaaggctgttaaaaaaaaaaaaaaaaaa

SEQ ID NO: 25328 - DNA, 1953 bp, Homo Sapiens
aggttggcgcgggctgggaggtgttccagccctttaagatgttgcgcgtggtgagctggaacatcaatgggattcggagacccctgcaaggggtggcaaatcaggaacccagcaactgtgccgccgtggccgtggggcgcattttggacgagctggatgcggatatcgtctgtctccaggaaaccaaagtgaccagggatgcactgacagagcccctggctatcgttgagggttataactcctatttcagcttcagccgcaaccgtagcggctattctggtgtagccaccttctgtaaggacaatgctaccccagtggctgctgaagaaggcctgagtggcctgtttgccacccagaatggggatgttggttgctatggaaacatggatgagtttacccaagaggaactccgggctctggatagtgagggcagggccctcctcacacagcataagatccgcacatgggaaggtaaggagaagaccttgaccctaatcaacgtgtactgcccccatgcggaccctgggaggcctgagcggctagtctttaagatgcgcttctatcgtttgctgcaaatccgagcagaagccctcctggcggcaggcagccatgtgatcattctgggtgacctgaatacagcccaccgccccattgaccactgggatgcagtcaacctggaatgctttgaagaggacccagggcgcaagtggatggacagcttgctcagtaacttggggtgccagtctgcctctcatgtagggcccttcatcgatagctaccgctgcttccaaccaaagcaggagggggccttcacctgctggtcagcagtcactggcgcccgccatctcaactatggctcccggcttgactatgtgctgggggacaggaccctggtcatagacacctttcaggcctctttcctgctgcctgaggtgatgggctctgaccactgccctgtgggtgcagtcttgagtgtgtcctctgtgcctgcaaaacagtgcccacctctgtgcacccgcttcctccctgagtttgcaggcacccagctcaagatccttcgcttcctagttcctctcgaacaaagtcctgtgttggagcagtcgacgctgcagcacaacaatcaaacccgggtacagacatgccaaaacaaagcccaagtgcgctcaaccaggcctcagcccagtcaggttggctctagcagaggccagaaaaacctgaagagctactttcagccctcccctagctgtccccaagcctctcctgacatagagctgcctagcctaccactgatgagcgccctcatgaccccgaagactccagaagagaaggcagtggccaaagtggtgaaggggcaggccaagacttcagaagccaaagatgagaaggagttacggacctcattctggaagtctgtgctggcggggcccttgcgcacacccctctgtgggggccacagggagccatgtgtgatgcgtactgtgaagaagccaggacccaacttgggccgccgcttctacatgtgtgccaggccccggggtcctcccactgacccctcctcccggtgcaacttcttcctctggagcaggcccagctgaaccaatggaggcctggggacatctggcatggtcacccctgcacatgatctgaggccagctccccttccctgagctgcctcctgcttctccctcaaagtctcctacccttctcttcctcttttaagccctctcttcctcgctttccttcctacctagctccttgttggtgagcttcttgtgccttaatcctgtgacccagccccttacaccactttccaccttcctgtccgaagtacacggacactagctgccccaggaagttgtgtgattttaaatcacttctgtctttgctggaaagtgtatttgtgcataaataaagtctgtgtatttgtttcaaaaaaaaaaaaaaaaaaaaaaa

SEQ ID NO: 25329 - DNA, 1746 bp, Homo Sapiens
aactcaggcgccgggcgcactgtcctagctgctggttttccacgctggttttagctcccggcgtctgcaaaatgaagattgaggaggtgaagagcactacgaagacgcagcgcatcgcctcccacagccacgtgaaagggctggggctggacgagagcggcttggccaagcaggcggcctcagggcttgtgggccaggagaacgcgcgagaggcatgtggcgtcatagtagaattaatcaaaagcaagaaaatggctggaagagctgtcttgttggcaggacctcctggaactggcaagacagctctggctctggctattgctcaggagctgggtagtaaggtccccttctgcccaatggtggggagtgaagtttactcaactgagatcaagaagacagaggtgctgatggagaacttccgcagggccattgggctgcgaataaaggagaccaaggaagtttatgaaggtgaagtcacagagctaactccgtgtgagacagagaatcccatgggaggatatggcaaaaccattagccatgtgatcataggactcaaaacagccaaaggaaccaaacagttgaaactggaccccagcatttttgaaagtttgcagaaagagcgagtagaagctggagatgtgatttacattgaagccaacagtggggccgtgaagaggcagggcaggtgtgatacctatgccacagaattcgaccttgaagctgaagagtatgtccccttgccaaaaggggatgtgcacaaaaagaaagaaatcatccaagatgtgaccttgcatgacttggatgtggctaatgcgcggccccaggggggacaagatatcctgtccatgatgggccagctaatgaagccaaagaagacagaaatcacagacaaacttcgaggggagattaataaggtggtgaacaagtacatcgaccagggcattgctgagctggtcccgggtgtgctgtttgttgatgaggtccacatgctggacattgagtgcttcacctacctgcaccgcgccctggagtcttctatcgctcccatcgtcatctttgcatccaaccgaggcaactgtgtcatcagaggcactgaggacatcacatcccctcacggcatccctcttgaccttctggaccgagtgatgataatccggaccatgctgtatactccacaggaaatgaaacagatcattaaaatccgtgcccagacggaaggaatcaacatcagtgaggaggcactgaaccacctgggggagattggcaccaagaccacactgaggtactcagtgcagctgctgaccccggccaacttgcttgctaaaatcaacgggaaggacagcattgagaaagagcatgtcgaagagatcagtgaacttttctatgatgccaagtcctccgccaaaatcctggctgaccagcaggataagtacatgaagtgagatggctgaggttttcagcagtaagagactccccaggtgtgcctggcctgggtccagcctgtgggcgcttgcccctgggcttggggctgccgtccccactcaggcgtggtctgcagcgctgtcagttcagtgtggaaagcatttctttttaagttatcgtaactgttcctgtggttgctttgaaagaacccttccttacctggtgtgttttctataaatcttcataggttattttgattctctctctctctctctctaagttttttaaaaataaacttttcagaacaaaaaaaaaaaaaaaaaa

SEQ ID NO: 25330 - DNA, 2846 bp, Homo Sapiens
agatggcggtgcaggtggtgcaggcggtgcaggcggttcatctcgagtctgacgctttcctcgtttgtctcaaccacgctctgagcacagagaaggaggaagtaatggggctgtgcataggggagttgaacgatgatacaaggagtgactccaaatttgcatatactggaactgaaatgcgcacagttgctgaaaaggttgatgccgtcagaattgttcacattcattctgtcatcatcttacgacgttctgataagaggaaggaccgagtagaaatttctccagagcagctgtctgcagcttcaacagaggcagagaggttggctgaactgacaggccgccccatgagagttgtgggctggtatcattcccatcctcatataactgtttggccttcacatgttgatgttcgcacacaagccatgtaccagatgatggatcaaggctttgtaggacttattttttcctgtttcatagaagataagaacacaaagactggccgggtactctacacttgcttccaatccatacaggcccaaaagagttcagagtcccttcatggtccacgagacttctggagctccagccagcacatctccattgagggccagaaggaagaggaaaggtatgagagaatcgaaatcccaatccatattgtacctcatgtcactatcgggaaagtgtgccttgaatcagcagtagagctgcccaagatcctgtgccaggaggagcaggatgcgtataggaggatccacagccttacacatctggactcagtaaccaagatccataatggctcagtgtttaccaagaatctgtgcagtcagatgtcggcagtcagcgggcctctcctacagtggttggaggacagactggagcaaaaccaacagcatttgcaggaattacaacaagaaaaggaagagcttatgcaagaactttcttctctagaataaatcaggagacaaaatggggaaagatgaaaatatccagtgtaaagttacttaagctaaatcaatttcaaagaagaaaaacttggaggactcattttacctgacttcaagacttactataaagctatagtaatcaagatagatggtattggcagaggaacagacacatacgtcaatggaacagatgagagaacccagaaataaacccatataaatatgctcagctgattttgaaaaagtgaaaaagcaattcaatggaggaagaatagcctttctgacaaattatgctagagcaattagacacccatggcgaggagaaaaaagaacctctacttaaacctcacatcttatataaaatttaactcaaaatgtataacggacttaaatgtgatacataaaactagataactttgaaaaaagccacaggagaaaaatcttcaggatcttgggctaggtgacaagttcttggactttgccccgaaagcacatccataaaagacaaaatctgatatattggacttcttcaaaatttaaaaacttgtgatttaagaagaggaaaagataagctacagattgagatgaatttgcaaaccatatatctgatcaatttggaatatataaagtgtactaaaaactcaactgaagtcaggcatggtagctcatgcttgtaatctcaccactttgggaggccaagatgggaggagtgcttgaggttaggcgttccagaccagcctgggcaacatagtgagactcttgtctctacaaaaagtttttttaaaaaattaactgggcaccatgacacacaccagtagtcccagctactagggaggcaggaggatcacttgagcccaggagtttgaggctgcggtgagctgtgatcacaccaccacactccaacctgtgtaacagagtgaggcctcatctcaaaaaaaaaaaaaggccacaaaactcaacaataaaaacaaacagtccaattagaaaatgggcaaaagacatgaatagatgtttcactgaagaggatctatagatggcaagtaagcatatgaaaagctgttaaactccataagtcatcagggaatgcaaattgaaaccacagcgaggctatgacttacttatctcaatggctaaagaaaaaatagtgaaaataccaaatactgatgaggatacaaactggatattttatacattgctgacaggaatgtaaaatggtacagccactctgggaaagagtttatgaatttcttatcaagttaaacataattttttaatcaagttaaacataagacccagcagttgtgctcctggacattcattccagagaaatgaaaacctatattgtacttgtactcaaatattcataggagctttatttgtaatagccccaaactggaaacaacccagatgtcctacaacaggtacatggttaaacaaaccatccataacttggaatactgctctggaatgaaaaggaactaactgttgatacaagaacttggttgtacctcaggggtattatggtgaacaaaaaaaaaaccagtctcaaatggtcacatactgtatgatcgcatttatataacattcttgaggtgacaaaattattgaaatgaagaacagattaatggttgccagggatagggactggagggggtgtggggtatgtatgactataaagggatgacgcaaggagttcctttgtgctgatggaacagttctatatgattatgatgattacgatgttgattataacatttgattatgaggttaagcacatgaatctttacctgtgctgaagttgtatggacctacatacacacaaatgaatgcatgtaaaatctggtgatactgaataaagtctgtagtctagatagcagtaaaaaaaaaaaaaaaaaaaaaaaa

SEQ ID NO: 25331 - DNA, 2430 bp, Homo Sapiens
cacacccgcactcctcccgggtttctgctctccgcccgtgtggagtggtgggggcctgggtgggaatgggcgtgtgccagcgcacgcgcgctccctggaaggagaagtctcagctagaacgagcggccctaggttttcggaagggaggatcagggatgtttgcgagcggctggaaccagacggtgccgatagaggaagcgggctccatggctgccctcctgctgctgcccctgctgctgttgctaccgctgctgctgctgaagctacacctctggccgcagttgcgctggcttccggcggacttggcctttgcggtgcgagctctgtgctgcaaaagggctcttcgagctcgcgccctggccgcggctgccgccgacccggaaggtcccgaggggggctgcagcctggcctggcgcctcgcggaactggcccagcagcgcgccgcgcacacctttctcattcacggctcgcggcgctttagctactcagaggcggagcgcgagagtaacagggctgcacgcgccttcctacgtgcgctaggctgggactggggacccgacggcggcgacagcggcgaggggagcgctggagaaggcgagcgggcagcgccgggagccggagatgcagcggccggaagcggcgcggagtttgccggaggggacggtgccgccagaggtggaggagccgccgcccctctgtcacctggagcaactgtggcgctgctcctccccgctggcccagagtttctgtggctctggttcgggctggccaaggccggcctgcgcactgcctttgtgcccaccgccctgcgccggggccccctgctgcactgcctccgcagctgcggcgcgcgcgcgctggtgctggcgccagagtttctggagtccctggagccggacctgcccgccctgagagccatggggctccacctgtgggctgcaggcccaggaacccaccctgctggaattagcgatttgctggctgaagtgtccgctgaagtggatgggccagtgccaggatacctctcttccccccagagcataacagacacgtgcctgtacatcttcacctctggcaccacgggcctccccaaggctgctcggatcagtcatctgaagatcctgcaatgccagggcttctatcagctgtgtggtgtccaccaggaagatgtgatctacctcgccctcccactctaccacatgtccggttccctgctgggcatcgtgggctgcatgggcattggggccacagtggtgctgaaatccaagttctcggctggtcagttctgggaagattgccagcagcacagggtgacggtgttccagtacattggggagctgtgccgataccttgtcaaccagcccccgagcaaggcagaacgtggccataaggtccggctggcagtgggcagcgggctgcgcccagatacctgggagcgttttgtgcggcgcttcgggcccctgcaggtgctggagacatatggactgacagagggcaacgtggccaccatcaactacacaggacagcggggcgctgtggggcgtgcttcctggctttacaagcatatcttccccttctccttgattcgctatgatgtcaccacaggagagccaattcgggacccccaggggcactgtatggccacatctccaggtgagccagggctgctggtggccccggtaagccagcagtccccattcctgggctatgctggcgggccagagctggcccaggggaagttgctaaaggatgtcttccggcctggggatgttttcttcaacactggggacctgctggtctgcgatgaccaaggttttctccgcttccatgatcgtactggagacaccttcaggtggaagggggagaatgtggccacaaccgaggtggcagaggtcttcgaggccctagattttcttcaggaggtgaacgtctatggagtcactgtgccagggcatgaaggcagggctggaatggcagccctagttctgcgtcccccccacgctttggaccttatgcagctctacacccacgtgtctgagaacttgccaccttatgcccggccccgattcctcaggctccaggagtctttggccaccacagagaccttcaaacagcagaaagttcggatggcaaatgagggcttcgaccccagcaccctgtctgacccactgtacgttctggaccaggctgtaggtgcctacctgcccctcacaactgcccggtacagcgccctcctggcaggaaaccttcgaatctgagaacttccacacctgaggcacctgagagaggaactctgtggggtgggggccgttgcaggtgtactgggctgtcagggatcttttctataccagaactgcggtcactattttgtaataaatgtggctggagctgatccagctgtctctgacctacaaaaaaaaaaaaaaaaaa

SEQ ID NO: 25332 - DNA, 2162 bp, Homo Sapiens
catttaaaggtgtgcggcgggtctctgttcacatggctcaactggaaacctgtttcatgaacaagcttactcaggaaccatctggtggtattccagcacattgttcttcagggggacgactctaagtcgctttgtggtggcagcagcttagaatcagtatttgtggttgggaaagatggacttacgggagcttggtaatgcaggtggtgaaggagcaggttatgagagcacttacaaccaagcctagctccctggaccagttcaagagcaaactgcagaacctgagctacactgagatcctgaaaatccgccagtccgagaggatgaaccaggaagatttccagtcccgcccgattttggaactaaaggagaagattcagccagaaatcttagagctgatcaaacagcaacgcctgaaccgccttgtggaagggacctgctttaggaaactcaatgcccggcggaggcaagacaagttttggtattgtcggctttcgccaaatcacaaagtcctgcattacggagacttagaagagagtcctcagggagaagtgccccacgattccttgcaggacaaactgccggtggcagatatcaaagccgtggtgacgggaaaggactgccctcatatgaaagagaaaggtgcccttaaacaaaacaaggaggtgcttgaactcgctttctccatcttgtatgactcaaactgccaactgaacttcatcgctcctgacaagcatgagtactgtatctggacggatggactgaatgcgctactcgggaaggacatgatgagcgacctgacgcggaatgacctggacaccctgctcagcatggaaatcaagctccgcctcctggacctggaaaacatccagatccctgacgcacctccgccgattcccaaggagcccagcaactatgacttcgtctatgactgtaactgaagtggccgggcccagacatgccccttccaaaactggaacacctagctaacaggagagaggaatgaaaacacacccacgccttggaaccgtcctttggtaaagggaagctgtgggtccacattcccttcagcatcacctctagccctggcaactttcagcccctagctggcatcttgctcaccgccctgattctgttcctcggctccactgcttcaggtcacttcccatggctgcagtccactggtgggacaagagcaaagcccactgccagtaagaaggccaaagggcccttccatcctagccctctgcaggcatgcccttccttcccttgggcaggaaagccagcagccccagactgcccaaaaacttgcccaccagaccaagggcagtgccccaaggcccctgtctggaggaaatggcctagctatttgatgagaagaccaaaccccacatcctcctttcccctctctctagaatcatctcgcaccaccagttacacttgaattaagatctgcgctcaaatctcctcccacctctctccctgcttttgccttgctctgttcctctttggtcccaagagcagcagccgcagcctcctcgtgatcctccctagcataaatttcccaaacagtccacaggtcccatgcccactttgcgtctgcactgtgatcgtgacaaatcttccctcctcaccagctagtctggggtttcctctccctgccccaggccagaactgccttcttcatttccacccacgctcccagcctcttagctgaaagcacaaatggtgaaatcagtagtctcgctccatctctaatagactaaacctaaatgcctctaggacggactgttgctatccaagcgtttggtgttaccttctcctgggaggtcctgctgcaactcaagttccacaggatggtcaagctgtcagacatccaagtttacatcattgtaattattactggtatttacaatttgcaagagttttgggttagttttttttttttttttgctttgtttttggacaaaagagtctaacattttttgccaaacagatatatatttaatgaaaagaagagatacataaatgtgtgaatttccagtttttttttaattattttaatcccaaacatcttcctgaaaataacattcccttaaacatgctgtggaataaaatggattgtgatgaaaaaaaaaaaaaaaaaaaaaaaaaaaaaaaaa

SEQ ID NO: 25333 - DNA, 2306 bp, Homo Sapiens
gcgagacagagcgagcaacgcaatctgaccgagcaggtcgtacgccgccgcctcctcctcctctctgctcttcgctacccaggtgacccgaggagggactccgcctccgagcggctgaggaccccggtgcagaggagcctggctcgcagaattgcagagtcgtcgcccctttttacaacctggtcccgttttattctgccatacccagtttttggatttttgtcttccccttcttctctttgctaaacgacccctccaagataatttttaaaaaaccttctcctttgctcacctttgcttcccagccttcccatccccccaccgaaagcaaatcattcaacgacccccgaccctccgacggcaggagccccccgacctcccaggcggaccgccctccctccccgcgcgcgggttccgggcccggcgagagggcgcgagcacagccgaggccatggaggtgacggcggaccagccgcgctgggtgagccaccaccaccccgccgtgctcaacgggcagcacccggacacgcaccacccgggcctcagccactcctacatggacgcggcgcagtacccgctgccggaggaggtggatgtgctttttaacatcgacggtcaaggcaaccacgtcccgccctactacggaaactcggtcagggccacggtgcagaggtaccctccgacccaccacgggagccaggtgtgccgcccgcctctgcttcatggatccctaccctggctggacggcggcaaagccctgggcagccaccacaccgcctccccctggaatctcagccccttctccaagacgtccatccaccacggctccccggggcccctctccgtctaccccccggcctcgtcctcctccttgtcggggggccacgccagcccgcacctcttcaccttcccgcccaccccgccgaaggacgtctccccggacccatcgctgtccaccccaggctcggccggctcggcccggcaggacgagaaagagtgcctcaagtaccaggtgcccctgcccgacagcatgaagctggagtcgtcccactcccgtggcagcatgaccgccctgggtggagcctcctcgtcgacccaccaccccatcaccacctacccgccctacgtgcccgagtacagctccggactcttcccccccagcagcctgctgggcggctcccccaccggcttcggatgcaagtccaggcccaaggcccggtccagcacaggcagggagtgtgtgaactgtggggcaacctcgaccccactgtggcggcgagatggcacgggacactacctgtgcaacgcctgcgggctctatcacaaaatgaacggacagaaccggcccctcattaagcccaagcgaaggctgtctgcagccaggagagcagggacgtcctgtgcgaactgtcagaccaccacaaccacactctggaggaggaatgccaatggggaccctgtctgcaatgcctgtgggctctactacaagcttcacaatattaacagacccctgactatgaagaaggaaggcatccagaccagaaaccgaaaaatgtctagcaaatccaaaaagtgcaaaaaagtgcatgactcactggaggacttccccaagaacagctcgtttaacccggccgccctctccagacacatgtcctccctgagccacatctcgcccttcagccactccagccacatgctgaccacgcccacgccgatgcacccgccatccagcctgtcctttggaccacaccacccctccagcatggtcaccgccatgggttagagccctgctcgatgctcacagggcccccagcgagagtccctgcagtccctttcgacttgcatttttgcaggagcagtatcatgaagcctaaacgcgatggatatatgtttttgaaggcagaaagcaaaattatgtttgccactttgcaaaggagctcactgtggtgtctgtgttccaaccactgaatctggaccccatctgtgaataagccattctgactcatatcccctatttaacagggtctctagtgctgtgaaaaaaaaaaaatgctgaacattgcatataacttatattgtaagaaatactgtacaatgactttattgcatctgggtagctgtaaggcatgaaggatgccaagaagtttaaggaatatgggagaaatagtgtggaaattaagaagaaactaggtctgatattcaaatggacaaactgccagttttgtttcctttcactggccacagttgtttgatgcattaaaagaaaataaaaaaaagaaaaaagagaaaaaaaaaaaaaaaaaaaa

SEQ ID NO: 25334 - DNA, 2437 bp, Homo Sapiens
cactcctggagagccaccgtgacggccagcgcagcagcatcatggacgtgcggtcccgggtggattctaagaccctgacccgtaacacgaggatcattgcagaggccctgactcgagtcatctacaacctgacagagaaggggacacccccagacatgccggtgttcacagagcagatgatccagcaggagcagctggactcggtgatggactggctcaccaaccagccgcgggccgcgcagctggtggacaaggacagcaccttcctcagcacgctggagcaccacctgagccgctacctgaaggacgtgaagcagcaccacgtcaaggctgacaagcgggacccagagtttgtcttctacgaccagctgaagcaagtgatgaatgcgtacagagtcaagccggccgtctttgacctgctcctggctgttggcattgctgcctacctcggcatggcctacgtggctgtccagcacttcagcctcctctacaagaccgtccagaggctgctcgtgaaggccaagacacagtgacacagccacccccacagccggagcccccgccgctccacagtccctggggccgagcacgagtgagtggacactgccccgccgcgggcggccctgcagggacaggggccctctccctccccggcggtggttggaacactgaattacagagcttttttctgttgctctccgagactggggggggattgtttcttcttttccttgtctttgaacttccttggaggagagcttgggagacgtcccggggccaggctacggacttgcggacgagccccccagtcctgggagccggccgccctcggtctggtgtaagcacacatgcacgattaaagaggagacgccgggaccccctgcccgatcgcgcgcggcctccgcccaccgcctcctgccgcaaggggcctggactgcaggcctgacctgctccctgctccgtgtctgtcctaggacgtcccctcccgctccccgatggtggcgtggacatggttatttatctctgctccttcttgcctggaggagggcagtgccagccctggggttctgggattccagccctcctggagccttttgttccccatgtggtctcagtgacccgtccccctgacagtgggctcggggagctgcatcacccagccttccccttctccgactgcagggtctgatgtcatcgttgacagcctttgcttcgtgggggcctggcagggcccctgcctccccgacccccgacccactgcaaacccccgttcccccgcactcctcttctcccagcccatccctccggcccctgtgcctctgcggccccagcccagctcccagggccgtcacctgcttggccctggcccagctccctgccctgagtcctgagccagtgcctggtgtttcctgggctcggtactgggcccccaggccatccaggctttgccacggccagttggtcctccctggggaactgggtgcgggtggagtactgggaggcaggaggtggcccggggaggccttgtggctcctcccctcgctcctcgccctgggcctcagcttcctcatcaatagaaaggatgtgttcggggtgggggcgtcaggtgagaacgtttgctgggaaggagaggacttggggcatggcctctggggccacccttcctggaactcggagaggaaggtccgggccctcgggaagccttggacagaaccctccaccccgcagaccaggcgccgtgtgtgtgtgggagagaaggaggcccgtgttgagctcagggagaccccggtgtgtccgttctttagcaatataacctacccagtgcgtgccgagcaggcttggtggggaagggacttgagctgggcaagtcctggcctggcacccgcagccgtctcccttccgtggcccagggaggtgtttgctgtccgaaggacctgggccggcccatgggagcctggggttctgtccagataggaccagggggtctcactttggccaccagttcttcggccagcacctctgccctccagaacctgcagcctggaggggtgaggggacaaccacccctctttcctccaggttggcaggggaccctcttctcccgtctgccctgcgggttgcccgcctcctccagagacttgcccaagggcccatcaccactggcctctgggcacttgtgctgagactctgggacccaggcagctgccaccttgtcaccatgagagaatttggggagtgcttgcatgctagccagcaggctcctgtctgggtgccacggggccagcattttggagggagcttccttccttccttcctggacaggtcgtcaggatggatccactgactgaccgtctggggctcaggctggtgtgggatgcagccggccgatgagaaaataaagccatattgaatgatcgccaaaaaaaaaaaaaaaaaa

SEQ ID NO: 25335 - DNA, 784 bp, Homo Sapiens
gagctgccgatgtggtgcttagtgattgcggtttcggtcgctctcccgtgtttcccgggctgggtatttgcctcgcaccatggcgcccaagggcaaagtgggcacgagagggaagaagcagatatttgaagagaacagagagactctgaagttctacctgcggatcatactgggggccaatgccatttactgccttgtgacgttggtcttcttttactcatctgcctcattttgggcctggttggccctgggctttagtctggcagtgtatggggccagctaccactctatgagctcgatggcacgagcagcgttctctgaggatggggccctgatggatggtggcatggacctcaacatggagcagggcatggcagagcaccttaaggatgtgatcctactgacagccatcgtgcaggtgctcagctgcttctctctctatgtctggtccttctggcttctggctccaggccgggccctttacctcctgtgggtgaatgtgctgggcccctggttcactgcagacagtggcaccccagcaccagagcacaatgagaaacggcagcgccgacaggagcggcggcagatgaagcggttatagccattgacattgtggccacaggccactggccctgggtggctctgtcagggtgcacagcccctcatgcctggagcaatgagggtctagtccaggggccaaaagcagtctgaggtattgggtatacttatactctatagggtcgttgaataaatggcttagaatgtgaaaaaaaaaaaaaaaaaa

SEQ ID NO: 25336 - DNA, 1034 bp, Homo Sapiens
caggctccggctgcggctccagcccgcgatgccccattccgtgaccctgcgcgggccttcgccctggggcttccgcctggtgggcggccgggacttcagcgcgcccctcaccatctcacgggtccatgctggcagcaaggctgcattggctgccctgtgcccaggagacctgatccaggccatcaatggtgagagcacagagctcatgacacacctggaggcacagaaccgcatcaagggctgccacgatcacctcacactgtctgtgagcaggcctgagggcaggagctggcccagtgcccctgatgacagcaaggctcaggcacacaggatccacatcgatcctgagatccaggacggcagcccaacaaccagcaggcggccctcaggcaccgggactgggccagaagatggcagaccaagcctgggatctccatatggacaaccccctcgctttccagtccctcacaatggcagcagcgaggccaccctgccagcccagatgagcaccctgcatgtgtctccaccccccagcgctgacccagccagaggcctcccgcggagccgggactgcagagtcgacctgggctccgaggtgtacaggatgctgcgggagccggccgagcccgtggccgcggagcccaagcagtcaggctccttccgctacttgcagggcatgctagaggccggcgagggcggggcaccatcgtcaaggcacgggacaagctctaccatcccgagtgcttcatgtgcagtgactgcggcctgaacctcaagcagcgtggttacttctttctggacgagcggctctactgtgagagccacgccaaggcgcgcgtgaagccgcccgagggctacgacgtggtggcggtgtaccccaatgccaaggtggaactcgtctgagctgggaccctgctcccacccctgcttcttaaggtccctgctcggccggtgtaaatatgtttcaccctgtccctctaataaagctcctctgctccaccttgaaaaaaaaaaaaaaaaaaaaaaaaaaaaaa

SEQ ID NO: 25337 - DNA, 3702 bp, Homo Sapiens
ctcctcggggtgctcggctccctcccacctaggccggccccggcccgactcgccctcagaaactcactgtttggggctgcggactttctcgtcgtgccccacaaaagtaaagcttggggacctggggggagccggaagtatcgcttcgagatccccaaatactatcggggaaacggaagtggccgtcggtggcagagacctgtcggccatggagcctaatgatagtaccagtaccgctgtggaggagcctgacagcttggaggtgttggtgaagaccttggactctcaaactcgtacctttattgtgggggcccagatgaatgtaaaagagtttaaggagcacattgctgcctctgtcagcatcccatctgaaaaacaacggctcatttaccagggacgagttctgcaagatgataagaagcttcaggaatacaatgttgggggaaaggttatccacctggtggaacgggctcctcctcagactcacctcccttctggggcatcttctgggacggggtctgcctcagccactcatggtgggggatccccccctggtactcgggggcctggggcctctgttcatgaccggaatgccaacagctatgtcatggttggaaccttcaatcttcctagtgacggctctgctgtggatgttcacatcaacatggaacaggccccgattcagagtgagccccgggtacggctggtgatggctcagcacatgatcagggatatacagaccttactatcccggatggagtgtcgaggagggccccaaccgcagcacagtcagccgcccccgcagccaccggctgtgaccccggagccagtagccttgagctctcaaacatcagaaccagttgaaagtgaagcacctccccgggagcccatggaggcagaagaagtggaggagcgtgccccagcccagaacccggagctcactcctggcccagccccagcgggcccaacacctgccccggaaacaaatgcacccaaccatccttcccctgcggagtatgtcgaggtgctccaggagctacagcggctggagagtcgcctccagcccttcttgcagcgctactacgaggttctgggtgctgctgccaccacggactacaataacaatcacgagggccgggaggaggatcagcggttgatcaacttggtaggggagagcctgcgactgctgggcaacacctttgttgcactgtctgacctgcgctgcaatctggcctgcacgcccccacgacacctgcatgtggtccggcctatgtctcactacaccacccccatggtgctccagcaggcagccattcccatacagatcaatgtgggaaccactgtgaccatgacaggaaatgggactcggccccccccaactcccaatgcagaggcacctccccctggtcctgggcaggcctcatccgtggctccgtcttctaccaatgtcgagtcctcagctgagggggctcccccgccaggtccagctcccccgccagccaccagccacccgagggtcatccggatttcccaccagagtgtggaacccgtggtcatgatgcacatgaacattcaagattctggcacacagcctggtggtgttccgagtgctcccactggccccctgggaccccctggtcatggccaaaccctgggacagcaggtgccaggcttcccaacagctccaacccgggtggtgattgcccggcccactcctccacaggctcggccttcccatcctggagggcccccagtctctgggacactgcagggcgccggtctgggtaccaatgcctcgttggcccagatggtgagcggccttgtggggcagcttcttatgcagccagtccttgtggctcaggggaccccaggtatggctccaccgccagcccctgccactgcttctgccagtgctggcaccaccaacacagctaccacagctggccccgctcctggggggcctgcccagcctccacccacccctcaaccctccatggctgatcttcagttctctcagcttctggggaacctgctagggcctgcagggccaggggctggagggtctggtgtggcttctcccaccatcactgtggcgatgcctggtgtccctgcctttctccaaggcatgactgacttcttgcaggcaacacagacagcccctccaccacccccacctcctccacccccaccacctgccccagagcagcagaccatgcccccaccaggctccccttctggtggcgcagggagtcctggaggcctgggtcttgagagcctgtcaccggagttttttacctcagtggtgcagggtgtgctcagctccctgctgggctccctgggggctcgggctggcagcagtgaaagtattgctgccttcatacaacgcctcagtggatccagcaacatctttgagcctggagctgatggggcccttggattctttggggccttgctttctcttctgtgccagaacttctctatggtggacgtagtgatgcttctccatgggcatttccagccactacaacggctccagccccagctgcgatccttcttccaccagcactacctgggtggtcaggagcccacacccagtaacatccggatggcaacccacacattgatcacggggctagaagagtatgtgcgggagagtttttccttggtgcaggttcagccaggtgtggacatcatccggacaaacctggaatttctccaagagcagtttaatagcattgctgcgcatgtgctgcattgcacagatagtggatttggggcccggttgctggagttgtgtaaccaaggcctgtttgaatgcctggccctaaacctgcactgcttggggggacagcagatggagcttgctgctgttatcaatggccgaattcgtcgtatgtctcgtggggtgaatccctccttggtgagctggctgaccactatgatgggactgaggcttcaggtggtactggagcacatgcctgtaggccctgatgccattctcagatacgttcgcagggttggtgatcccccccagccacttcctgaggagccaatggaagttcagggagcagaaagagcttcccctgagcctcagcgggagaatgcttccccagcccctggaacaacagcagaagaggccatgtcccgaggtccacctcctgctcctgaggggggctcccgggatgaacaggatggagcttcagctgagacagaaccttgggcagctgcagtccccccagaatgggtccctattatccagcaggacattcagagccagcggaaggtgaaaccgcagccccctctgagtgatgcctacctcagtggtatgcctgccaagagacgcaagacgatgcagggtgagggcccccagctgcttctctcagaggctgtgagccgggcagctaaggcagccggagctcggcccctgacgagccccgagagcctgagccgggacctggaggcaccagaggttcaggagagctacaggcagcagctccggtctgatatacaaaaacgactgcaggaagaccccaactacagtccccagcgcttccccaatgcccagcgggcctttgctgatgatccttagctctttgctctatggcccttcctcatcaggggaccgtttcccccctcttccttcacagtatttaagaaataaaagtcggatttttctggcaaaaaaaaaaaaaaaaaaaaaaa

SEQ ID NO: 25338 - DNA, 1690 bp, Homo Sapiens
ccaggttatccccaggggtggagaagcggaggcccaggaggagggggaataaagaaggtggaggatcctggctaccactctgaatccgataccgcttctcttagacctcagcgacagaaaaagggaagggtgtctcatcccccttcctcctctcctccctgtcctgagccttagccatggccgaggcaggggctgggctgagcgagaccgtcactgagacaacggttaccgtgacaaccgagcccgatgatttggggaggaagacggagaaacagcaaggattatattttcctttgaagagttgctgggacctttcctaggagaaccggagccttaccatcaaacttcggaaacggaagccagagaaaaaggtagaatggacaagtgacactgtggacaatgaacacatgggccgccgctcatccaaatgctgctgtatttatgagaaacctcgggcctttggcgagagctccacggaaagtgatgaggaggaagaagagggctgtggtcatacacactgtgtacgtggccaccgcaaaggacggcgtcgtgcaaccctaggaccgacccccaccacccctccccagcctcctgacccttcccagccccctccagggccaatgcagcactaaatccctctctcctccagcattcctgtgtctgtctggccctaaatgtatccatgtggctacttctccagccccctccttccctctcttctgcctgatagagggaagaggaagaggaggacgaacagagatcctgaaattctgacttgctgctattccagaacccagcctcctgggtttccccagtcctcatttttcctcccaatacccacccttctctctcgagggatctaggcaccttggtcccagtgtcttccttttgttctcactgccaaactgcctgtcctgggatctagttatcttggccctgcactctcaacatgagtagcgaacacttaaattgggttttcaacagtcccagctttcactgccagggtcccagtcagattccaggaatttgcgccctaactttgcttgctaatcctggtttagagctatcccactaaaatatttaatcctaattcttagtccttgcctgtgagatatgaggtcttacaggagacctcagagctcccagcccttctcctcctgctaacccttctcacaccctcaagaggagttagaaaagaggtccttgtcattctcacctcttatggaaaatggaataagaaataatcatatcctttcttcccacccttctcctgttatttaggatttctgacaaagctggcttgagattggtcacttagagccgactgtctcctctgccttttgtttttcagcttcagagacagatccaatatagtcccagggacctgggtctctgggagaggaaggaagagggagggagcaaagagattggggtatgtcccctgtagtacactcttacctcttacttcctagactttgatttctccggcagcccagatgttcagttctcttggcccctctctaccccttactgggatctggttttcattttccggtccttttgccatacacagttacagagatcagtcaaatccataccaccactgagatctcatttattgccacagatgcacaaaataaataacccaaaatcacaaaaaaaaaaaaaaaaaaaaaaaaaaaaaaaaaac

SEQ ID NO: 25339 - DNA, 1669 bp, Homo Sapiens
gagcaagatggctgactccaaagagggtgttttgccgctgacggctgcttccactgccccaatttcattcggcttcactcgcacgtccgcacggaggcggctggccgactcgggagacggcgcggggccatctccggaggagaaggatttcttgaaaaccgtggaagggagggagctgcagagtgtgaagccccaggaggcccccaaggaactcgtcatccctttgatccagaatggccatcgcaggcagccaccagcccggccccctgggccatccacagatactggggccttggcggatggggtggtgtcccaggctgtgaaggagctcattgcggaatccaagaagtctctggaagagagagagaatgcgggtgtcgaccccacgctcgctatccccatgatccagaaaggatgcacccccagcggggaaggggcagacagcgaaccccgggcagagacagtgccagaggaggctaattatgaggcggtccccgtggaggcctatgggctggccatgctgcggggcatgggctggaaacctggcgagggcatcggccgcaccttcaatcaagtagtgaagccccgtgtcaactcactgaggcccaaggggttagggctgggtgccaacctgaccgaggcccaggccttgacccccactggcccctcccgcatgccaagaccagatgaggagcaagagaaagataaggaagatcagcctcaagggctggtgcctggaggagctgtggtggttctttctggccctcaccgaggcctctatgggaaggtggaaggccttgatcctgacaatgttcgggccatggttcgtctggctgtggggagccgggtggtgactgttagtgagtactacctgcggcctgtctcccagcaggagtttgacaagaacaccttggatctcaggcaacagaacggaactgcctcatcacggaagaccctctggaatcaagaactctacatccagcaggacaactcagagaggaagcggaaacaccttccagaccgacaggatgggcctgcagccaagagtgagaaagcagcccccagaagtcagcactggttgcacagggacctgcgtgtgcggtttgtggacaacatgtacaaaggaggccaatattacaacaccaagatgataattgaagatgtcctaagcccagatacctgtgtatgtcggacagatgaaggccgagtcctggaaggcctgagggaagacatgctggagaccctggttcccaaggcagagggtgaccgtgtgatggtggtgctgggcccacagactggaagggtgggacatttgctgagccgggacagagcacggagccgggctttggtgcaactgccaagagaaaatcaggtggtggagcttcactacgatgccatctgccagtacatgggccctagtgacacagatgatgactgacccatgggactcctcccatcccccaggctggtaccagttctgtaccatatgagaaagttgccttcagaaggtgggaagatcattgttccatcctctacttctggtgcagtcctgggacaaggacaagggaaagggatgggtgaaccagtagggaagctagaaacaaacccaatatttaccaaaatttagggtataataaaaaccatttcaagtaaaaaaaaaaaaaaaaaa

SEQ ID NO: 25340 - DNA, 2111 bp, Homo Sapiens
gtgatggcgggcaagcggtccggctggagccgggcggctctcctccagctccttctcggcgtgaacctggtggtgatgccgcccacccaggcccggagtctgcgcttcgttaccttgctgtaccgccatggagaccgttcaccagtgaagacatatcccaaggacccctatcaggaagaagaatggccccaggggtttggtcagttaaccaaggaggggatgctacagcactgggaactgggccaggccctgcggcagcgctatcacggcttcctaaacacctcttatcaccggcaagaggtttatgtgcgaagcacagactttgaccggactctcatgagtgctgaggccaacctggctggactcttccctcccaacgggatgcagcgcttcaacccgaacatctcgtggcagcctattcctgtgcacactgtgcccatcactgaggacaggctgctgaagttcccgttgggcccatgtccccgttatgagcagctacagaacgagacccggcagacaccagagtatcagaatgagagttctcggaatgcacaatttctggacatggtggccaacgagacagggcttacagacctgacactggagaccgtctggaatgtctatgacacactcttctgtgagcaaacgcacgggctgcgcctgccgccctgggcctcaccccaaaccatgcagcgtctcagccggctaaaggacttcagcttccgcttcctcttcggaatctaccagcaggcggagaaggcccggcttcaggggggagtcctgctggctcagataaggaagaacctgaccctaatggcgaccacctcccagctccccaagctgctggtttactctgcgcacgacactaccctggttgccctgcaaatggcactggatgtctacaatggtgaacaagccccctacgcctcctgccacatatttgaactgtaccaggaagattctgggaatttctcagtggagatgtactttcggaacgagagtgacaaggccccctggccgctcagcctgcctggctgccctcaccgctgcccactgcaggacttccttcgcctcacagagcccgtcgtgcccaaggattggcagcaggagtgccagctggcaagcggtcctgcagacacagaggtgattgtggccttggctgtatgtggctccatcctcttcctcctcatagtgctgctcctcaccgtcctcttccggatgcaggcccagcctcctggctaccgccacgtcgcagatggggaggaccacgcctgacaaccactcagcccccttccctccacctcctaggggaggtgggctgggccctcgctcctgactgttgctgctccccagcccatggacaggagatcctgggttgggcctccctctgatgaccccagccagatgagcgagtggggctcagcgtggcccatggtgcctgtcactcagcattcccatgcctgatgtttaccaagtgctgtgttggacactggctttctccaaacaggatttgcctcctccacgctccctacacacctgagatgtaaactggcagtcagtgttcactcaggacctaggattagaaaatggcagagttggtgctggatccaccttgcacttctatcaagccctgttctttttcctccagcctgaagtcttcggcaaatagctcagagggacacggtcttgcctctcagtgcttattttagtgggaaaaacagctaataccaggggtacaaacattggctcccaaggaactggatcacccaacagccagccagccacatttccctgtgtctggctagagccaccattagactcagacagaatgcttcaggaatcgttgtcaccccttcaactggagcaggacagaaggttgtctgtacttgggagggagtggggagtggtgggaagggagttgcttgtcacacgaatcaggaaactgctctccctcagctgggctggggtctccagggacctgagctacatgcaggttgtgagctggaaaagaaagttctagactgtggcccagaatagggctggggcagctcccagagaatgaatagtgctgtttcctattggactgataaaaaaaaaaaaaaaaaaaaaaa

SEQ ID NO: 25341 - DNA, 1941 bp, Homo Sapiens
gcggaaagggcgcggagagccccggcgcggagcaggcgggggacggtattcagaattcgagcgcaggagctccgcttctccacctgctcccggggagctattgggatccagagaatcacccgctgatggtttttccccaggcctgaaacaaccagagagctacgggaaaggaagggcttggcttgccagaggaattttccaagtgctcaaacgccaggcttacggcgcctgtgatccgtccaggaggacaaagtgggatttgaagatccactccacttctgctcatggcgggccagggcctgcccctgcacgtggccacactgctgactgggctgctggaatgcctgggctttgctggcgtcctctttggctggccttcactagtgtttgtcttcaagaatgaagattactttaaggatctgtgtggaccagatgctgggccgattggcaatgccacagggcaggctgactgcaaagcccaggatgagaggttctcactcatcttcaccctggggtccttcatgaacaacttcatgacattccccactggctacatctttgaccggttcaagaccaccgtggcacgcctcatagccatatttttctacaccaccgccacactcatcatagccttcacctctgcaggctcagccgtgctgctcttcctggccatgccaatgctcaccattgggggaatcctgtttctcatcaccaacctgcagattgggaacctatttggccaacaccgttcgaccatcatcactctgtacaatggagcatttgactcttcctcggcagtcttccttattattaagcttctttatgaaaaaggcatcagcctcagggcctccttcatcttcatctctgtctgcagtacctggcatgtagcacgcactttcctcctgatgccccgggggcacatcccatacccactgccccccaactacagctatggcctgtgccctgggaatggcaccacaaaggaagagaaggaaacagctgagcatgaaaacagggagctacagtcaaaggagttcctttcagcgaaggaagagaccccaggggcagggcagaagcaggaactccgctccttctggagctacgctttctctcggcgctttgcctggcacctggtgtggctgtctgtgatacagttgtggcactacctcttcattggcactctcaactccttgctgaccaacatggccggtggggacatggcacgagtcagcacctacacaaatgcctttgccttcactcagttcggagtgctgtgtgccccctggaatggcctgctcatggaccggcttaaacagaagtaccagaaggaagcaagaaagacaggttcctccactttggcggtggccctctgctcgacggtgccttcgctggccctgacatccctgctgtgcctgggcttcgccctctgtgcctcagtccccatcctccctctccagtacctcaccttcatcctgcaagtgatcagccgctccttcctctatgggagcaacgcggccttcctcacccttgctttcccttcagagcactttggcaagctctttgggctggtgatggccttgtcggctgtggtgtctctgctccagttccccatcttcaccctcatcaaaggctcccttcagaatgacccattttacgtgaatgtgatgttcatgcttgccattcttctgacattcttccacccctttctggtatatcgggaatgccgtacttggaaagaaagtccctctgcaattgcatagttcagaagccctcacttttcagccccgaggatggttttgttcatcttccaccacctttgaggacctcgtgtcccaaaagactttgcctatcccagcaaaacacacacacaaccacccactagttctcttctccagccaagaggaataaagttttgcttccataaaaaaaaaaaaaaaaaaa

SEQ ID NO: 25342 - DNA, 2106 bp, Homo Sapiens
gacgcgggaagtccggacgcagtagctccctgaagcggaggcgaaggggagtttaagccccagcggcggcaatggcggagaggcccgaggacctaaacctgcccaatgccgtgatcaccaggatcatcaaggaggcgctcccggacggtgtcaacatctccaaggaggcccggagcgccatctcccgcgccgccagcgtcttcgtgctgtacgccacatcctgtgctaacaactttgcaatgaaaggaaagcggaagacgctgaatgccagtgatgtgctctcagccatggaagagatggagttccagcggttcgttaccccattgaaagaagctctggaagcatataggcgggagcagaaaggcaagaaggaggcctcagagcaaaagaagaaggacaaagacaaaaaaacagactcggaagagcaagacaagagcagggatgaggacaatgatgaagacgaagaaaggctggaagaagaagaacagaatgaagaggaagaagtagacaactgaaaagggcgggagactgtggcaccttggaaggtaccacttgaaatgagacgtgctacgtgtttctgtgaagcttttccatgctgggcagagtagtctcaggcaaaagtgcctgaaaagatcagaataaaaactgactagaaataccgtcaaaaccagcacttaccaaactcagagcatctgagtagcagaatcctgttttgcttcatcaatctgaaggttatggccttttgacaagagggattctgaacgactaaattagtcagtttgctcgcttttgtttacttaaatgtatggttagatggtttttgatctgcagtcttccctagtcccccaaataagtaataataacttccatgctgcctgctgtgttccagatcacagaggcagccaaggctcaggaaaaactggggctttgcttatggtcagcctatgtttgattgcacagtctttgacaatagtagcttactaagactgctcagaatgagtaagctttaggaaactactaaaatgctgtgggagaataacaaaatccgttctctctcttcacttgacagaagcattaactgaattttgtttttcatagacccacttggcccaaaacctttctatattgcctgtagatgatcggcctgctggtgtggtagtaatctgatcacagatattcttaaatcagcagtgtggaatggtattagtcaaacatggtgccagtgtcttttacaaaaacagatggcatagtgtcagatgtaccttactctctgctactgtacagctttaggatttgtcatcacctcccggaaggtgtaaaaccccaggcttcctcttcttgtagtccatctcccagacttgtgactatggcttttcattcttcaattcatgacgagtgccaaacttgattttctctaggcacagctttctccctctgtgcctcctgcttcctttctctcctgcctctcctctgctccccatcccactttctcatctgcctccttttctcacttctgtcagtctgtaagctttgataacctgcttaatactccaaagtgtgagttcctctgatctcttgattccttagttctaatctcacgttttgtttttaagagatggagtctctcactctgtggcccaggctggagtgcagtggcatgatcatagctcattgcatccttgaaatcctgggctcaggtgatcctcccgcctgagcctcctgagtatctgggactacagatgcgtgccaccaagcctggctaattttgtctcatgtcttctaaaaattattttgtgaagccccttcacaaaaaaccttaagggaaatctgatggtgctcaggaatctaactctccctaaaccatcctctttaactgcttctaaaatatctctgttggcctttcttagcctttttctgtttccattcagtgctccaagcgctttttgtttctaagttgagtgcttggggtttgacaggtagtgacgtgtagtttgacactgttaacttgttaaatacagtgaaaagtttgtgagtgaagaatgctgagaagattgtaatgctttgtacaaataaaagtcttgttaaaaaaaaaaaaaaaaaaaaaaa

SEQ ID NO: 25343 - DNA, 1661 bp, Homo Sapiens
ccctcctccacgcttacagccacacacacagtcacacagacgcgttctgagggtggctgcccgcttgggatggaggaatcacttccctcagaacccagccaagtcctctaggcctccttgggggtccttccagcctgaggggcttcggagctgaggagcagctgttctgatgcacgggaacaagcagcacctgcagaaggacttcttcctgtacaacgcctccaaggccaggagcaaaacctacatcaacatgcgggaggtgtcccagcgcttccgcctgcctcccagcgagtacgtcatcgtgccctccacctacgagccccaccaggagggggaattcatcctccgggtcttctctgaaaagaggaacctctctgaggaagttgaaaataccatctccgtggatcggccagtgaaaaagaaaaaaaccaagcccatcatcttcgtttcggacagagcaaacagcaacaaggagctgggtgtggaccaggagtcagaggagggcaaaggcaaaacaagccctgataagcaaaagcagtccccacagccacagcctggcagctctgatcaggaaagtgaggaacagcaacaattccggaacattttcaagcagatagcaggagatgacatggagatctgtgcagatgagctcaagaaggtccttaacacagtcgtgaacaaacacaaggacctgaagacacacgggttcacactggagtcctgccgtagcatgattgcgctcatggatacagatggctctggaaagctcaacctgcaggagttccaccacctctggaacaagattaaggcctggcagaaaattttcaaacactatgacacagaccagtccggcaccatcaacagctacgagatgcgaaatgcagtcaacgacgcaggattccacctcaacaaccagctctatgacatcattaccatgcggtacgcagacaaacacatgaacatcgactttgacagtttcatctgctgcttcgttaggctggagggcatgttcagagcttttcatgcatttgacaaggatggagatggtatcatcaagctcaacgttctggagtggctgcagctcaccatgtatgcctgaaccaggctggcctcatccaaagccatgcaggatcactcaggatttcagtttcaccctctatttccaaagccatttacctcaaaggacccagcagctacacccctacaggcttccaggcacctcatcagtcatgttcctcctccattttaccccctacccatccttgatcggtcatgcctagcctgaccctttagtaaagcaatgaggtaggaagaacaaacccttgtccctttgccatgtggaggaaagtgcctgcctctggtccgagccgcctcggttctgaagcgagtgctcctgcttaccttgctctaggctgtctgcagaagcacctgccggtggcactcagcacctccttgtgctagagccctccatcaccttcacgctgtcccaccatgggccaggaaccaaaccagcactgggttctactgctgtggggtaaactaactcagtggaatagggctggttactttgggctgtccaactcataagtttggctgcattttgaaaaaagctgatctaaataaaggcatgtgtatggctggtcaaaaaaaaaaaaaaaaaa

SEQ ID NO: 25344 - DNA, 3889 bp, Homo Sapiens
gagactgagtattctaccttgtaaatactgttatttgtatatactgtaaatgatgacatcggtgggcactaaccgagcccggggaaactgggaacaacctcaaaaccaaaaccagacacagcacaagcagcggccacaggccactgcagaacaaattagacttgcacagatgatttcggaccataatgatgctgactttgaggagaaggtgaaacaattgattgatattacaggcaagaaccaggatgaatgtgtgattgctttgcatgactgcaatggagatgtcaacagagctatcaatgttcttctggaaggaaacccagacacgcattcctgggagatggtcgggaagaagaagggagtctcaggccagaaggatggtggccagacggaatccaatgaggaaggcaaagaaaatcgagaccgggacagagactatagtcggcgacgtggtgggccaccaagacgggggagaggtgccagccgtggacgagagtttcgaggtcaggaaaatggattggatggcaccaagagtggagggccttctggaagaggaacagaaagaggcagaaggggccgtggccgaggcagaggtggctctggtaggcgaggaggaaggttttctgctcaaggaatgggaacctttaacccagctgattatgcagagccagccaatactgatgataactatggcaatagcagcggcaatacgtggaacaacactggccactttgaaccagatgatgggacgagtgcatggaggactgcaacagaggagtgggggactgaagattggaatgaagatctttctgagaccaagatcttcactgcctctaatgtgtcttcagtgcctctgcctgcggagaatgtgacaatcactgctggtcagagaattgaccttgctgttctgctggggaagacaccatctacaatggagaatgattcatctaatctggatccgtctcaggctccttctctggcccagcctctggtgttcagtaattcgaagcagactgccatatcacagcctgcttcagggaacacattttctcatcacagtatggtgagcatgttagggaaaggatttggtgatgtcggtgaagctaaaggcggcagtactacaggctcccagttcttggagcaattcaagactgcccaagccctggctcagttggcagctcagcattctcagtctggaagcaccaccacctcctcttgggacatgggctcgacgacacaatccccatcactggtgcagtatgatttgaagaacccaagtgattcagcagtgcacagcccctttacaaagcgccaggcttttaccccatcttcaaccatgatggaggtgttccttcaggagaagtcacctgcagtggctacctccacagctgcacctccacctccgtcttctcctctgccaagcaaatccacatcggctccacagatgtcgcctggatcttcagacaaccagtcctctagccctcagccggctcaccagaaactgaaacagcagaagaaaaaagcctccttgacttctaagattcctgctctggctgtggagatgcctggctcagcagatatctcagggctaaacctgcagtttggggcattgcagtttgggtcagagcctgtcctttctgattatgagtccacccccaccacgagcgcctcttcaagccaggctccaagtagcctgtataccagcacggccagtgaatcatcctctacaatttcatctaaccagagtcaggagtctggttatcagagcggcccaattcagtcgacaacctatacctcccaaaataatgctcagggccctctttatgaacagagatccacacagactcggcggtaccccagctccatctcttcatcaccccaaaaggacctgactcaggcaaagaatggcttcagttctgtgcaggccacgcagttacagaccacacaatctgttgaaggtgctacaggctctgcagtgaaatctgattcaccttccacttctagcatcccccctctcaatgaaacggtatctgcagcttccttactgacgacaaccaatcagcattcatcctccttgggtggcttgagccacagtgaggagattccaaatactaccaccacacaacacagcagcacgttatctacgcagcagaataccctttcatcatcaacatcttctgggcgcacttcgacatccactcttttgcacacaagtgtggagagtgaggcgaatctccattcttcctccagcactttttccaccacatccagcacagtctctgcacctcccccagtggtcagtgtctcctccagtctcaatagtggcagtagcctgggcctcagcctaggcagcaactccactgtcacagcctcgactcgaagctcagttgctacgacttcaggaaaagctcctcccaacctccctcctggggtcccgccgttgttgcctaatccgtatattatggctccagggctgttacatgcctacccgccacaagtatatggttatgatgacttgcagatgcttcagacaagatttccattggattactacagcatcccatttcccacacccactactccgctgactgggagggatggtagcctggccagcaacccttattctggtgacctcacaaagttcggccgtggggatgcctcctccccagccccggccacaaccttggcccaaccccaacagaaccagacgcagactcaccataccacgcagcagacattcctgaacccggcgctgcctcctggctacagttacaccagcctgccatactatacaggggtcccgggcctccccagcaccttccagtatgggcctgctgtgttccctgtggctcctacctcttccaagcagcatggtgtgaatgtcagtgtgaatgcatcggccacccctttccaacagccgagtggatatgggtctcatggatacaacactggtgtttcagtcacctccagtaacacgggcgtgccagatatctcgggttctgtgtactccaaaacccagcagtcctttgagaaacaaggttttcattccggtactcctgctgcttccttcaacttgccttcagccctaggaagtgggggccccatcaatccggccacagctgctgcctacccacctgccccctttatgcacattctgaccccccatcagcagccgcattctcagatccttcaccatcacctgcagcaggatggccagacgggcagcgggcaacgtagccagaccagctccatcccgcagaagccccagaccaacaagtctgcctacaacagctacagctggggggccaactgaggccctgaccctcttctcccggtcccatcttctgagagggcttctcagcctggaaactatggaaacagcatcaaagagaaaggaatgtggggggtttccgctgccccccacccccagcggcccaccccatgcctcagcttcatgtctgtcccattcctataccatccccaccctgttgtatgtattataggatttgtattttctccttttttttcccccttccattccttctcccctcttgcattcaagattatgaaactttgctatgggccctgcacttcctttgcttcctcctgttcaccctggtggtgtacggatgaggcggggaggtgggacccccaaacatatatcagcccaacagccctaagtctccttctttattattaggaaaacaacaacaacaacaaacaaaaaaatggcgtcatgaatatgaacagcattgtcagatgaattagttgaagtggttttttttttgtttttttttttttttttgtactgtgtcctcaaatttaatggattaatgtgtcttgtatatataaaaagaaaacctctaccttcaaaaaaaaaaaaaaaaaa

SEQ ID NO: 25345 - DNA, 2058 bp, Homo Sapiens
ggctccagagcctccagagcctccgggtctgggcggcgcttcggctcctcccgagccgcctgctagccccgcgccgcactccatccccacaggctggggacgggcccggtgcggctgtgtgggttcgggagcggagttgcagaatccaaggacccattttgttctttctccgcactgctttatgggaggcattatggcccccaaagacataatgacaaatactcatgctaaatccatcctcaattcaatgaactccctcaggaagagcaataccctctgtgatgtgacattgagagtagagcagaaagacttccctgcccatcggattgtgctggctgcctgtagtgattacttctgtgccatgttcactagtgagctctcagagaaggggaaaccttatgttgacatccaaggtttgactgcctctaccatggaaattttattggactttgtgtacacagaaacagtacatgtgacagtggagaatgtacaagaactgcttcctgcagcctgtctgcttcagttgaaaggtgtgaaacaagcctgctgtgagttcttagaaagtcagttggacccttctaattgcctgggtattagggattttgctgaaacccacaattgtgttgacctgatgcaagcagctgaggtttttagccagaagcattttcctgaagtggtacagcatgaagagttcattcttctgagtcaaggagaggtggaaaagctaatcaagtgcgacgaaattcaggtggattctgaagagccagtctttgaggctgtcatcaactgggtgaagcatgccaagaaagagcgggaagaatccttgcctaacctgctacagtatgtgcggatgcccctactaacccccaggtatatcacagatgtaatagatgctgagcctttcatccgctgtagtttacaatgcagggatctggttgatgaagcaaagaagtttcatctgaggcctgaacttcggagtcagatgcagggacccaggacaagggctcgcctaggagccaatgaagtgcttttggtggttgggggctttggaagccagcagtctcccattgatgtggtagagaaatatgaccccaagactcaggagtggagctttttgccaagcatcactcgtaagagacgttatgtggcctcagtgtcccttcatgaccggatctacgtcattggtggctatgatggccgttcccgccttagttcagtggaatgtctagactacacagcagatgaggatggggtctggtattctgtggcccctatgaatgtccgacgaggtcttgctggagccaccaccctgggagatatgatctatgtctctggaggctttgatggaagcaggcgtcacaccagtatggagcgctatgatccaaacattgaccagtggagcatgctgggagatatgcagacagcccgggaaggtgccggactcgtagtggccagtggagtgatctactgtctaggaggatatgacggcttgaatatcttaaattcagttgagaaatacgaccctcatacaggacattggactaatgttacaccaatggccaccaagcgttctggtgcaggagtagccctgctgaatgaccatatttatgtggtggggggatttgatggtacagcccacctttcttccgttgaagcatacaacattcgcactgattcctggacaactgtcaccagtatgaccactccacgatgctatgtaggggccacagtgcttcgggggagactctatgcaattgcaggatatgatggtaattccctgctaagtagcattgaatgttatgaccctatcatcgacagctgggaagtcgtgacatccatgggaacccagcgctgtgatgctggtgtttgtgttctccgcgagaagtgaccattgttggagcaccatccagagctagtgaccagtccagtggacagttagtgggagaatcaaaaatcctttccagaatgtctgtttctcactacgtgcaccgggtgattacaggcaccagtgcagtgatgattgtacttatttgacacataaaaaaaaaaaaaaaaaaa

SEQ ID NO: 25346 - DNA, 2164 bp, Homo Sapiens
cttccagctggtgggagttgacgacgtggtgctgggcgttgggaccctactttatctagttcgggaagttgggttgtggggtcatacctgtctgtctgctcccagctttcttgggtttcttccgacggcgtggggcctcgctaaggaattcccggcccctcagggccacggctttagcggtgtcttttgcgagttcttcgtaagtacatcttaaagctgtcaagatggttctagcagaccttggaagaaaaataacatcagcattacgctcattgagcaatgccaccattatcaatgaagaggtattgaatgctatgctaaaagaagtctgtaccgctttgttggaagcagatgttaatattaaactagtgaagcaactaagagaaaatgttaagtctgctattgatcttgaagagatggcatctggtcttaacaaaagaaaaatgattcagcatgctgtatttaaagaacttgtgaagcttgtagaccctggagttaaggcatggacacccactaaaggaaaacaaaatgtgattatgtttgttggattgcaagggagtggtaaaacaacaacatgttcaaagctagcatattattaccagaggaaaggttggaagacctgtttaatatgtgcagacacattcagagcaggggcttttgaccaactaaaacagaatgctaccaaagcaagaattccattttatggaagctatacagaaatggatcctgtcatcattgcttctgaaggagtagagaaatttaaaaatgaaaattttgaaattattattgttgatacaagtggccgccacaaacaagaagactctttgtttgaagaaatgcttcaagttgctaatgctatacaacctgataacattgtttatgtgatggatgcctccattgggcaggcttgtgaagcccaggctaaggcttttaaagataaagtagatgtagcctcagtaatagtgacaaaacttgatggccatgcaaaaggaggtggtgcactcagtgcagtcgctgccacaaaaagtccgattattttcattggtacaggggaacatatagatgactttgaacctttcaaaacacagccttttattagcaaacttcttggtatgggcgacattgaaggactgatagataaagtcaacgagttgaagttggatgacaatgaagcacttatagagaagttgaaacatggtcagtttacgttgcgagacatgtatgagcaatttcaaaatatcatgaaaatgggccccttcagtcagatcttggggatgatccctggttttgggacagattttatgagcaaaggaaatgaacaggagtcaatggcaaggctaaagaaattaatgacaataatggatagtatgaatgatcaagaactagacagtacggatggtgccaaagtttttagtaaacaaccaggaagaatccaaagagtagcaagaggatcgggtgtatcaacaagagatgttcaagaacttttgacacaatataccaagtttgcacagatggtaaaaaagatgggaggtatcaaaggacttttcaaaggtggcgacatgtctaagaatgtgagccagtcacagatggcaaaattgaaccaacaaatggccaaaatgatggatcctagggttcttcatcacatgggtggtatggcaggacttcagtcaatgatgaggcagtttcaacagggtgctgctggcaacatgaaaggcatgatgggattcaataatatgtaaagaaaatgccttaatataaactgactcagttgaatacctaatttgctgagacctcagcgtttcccttctttttgcgaattggggggaaagtgtatttttcttgcttatcatgcactctttccttttcttctcgcccgcttttcccctccttttctttttccttccttctttcctccctttaatataagggagaaatacatggtttttgtggaaatcattatatgtttgctttagattttcttctgttttcaccatcataacacttaagttaaatcatgatgtaaaattttagtacttaaaggtttttaattatctcgaaggccaagcattgcatttgtaaacagtcctggtcagtagttaaataatgtttcaattaaagtgctgtaaaataaacttcaaagtggttataaaaaaaaaaaaaaaaa

SEQ ID NO: 25347 - DNA, 3227 bp, Homo Sapiens
gtctagccgcgccacagctagcggggtgatctttccccccctctggtaggagttggtgaaggtgagactcatgagggaatacaaggtagtggtgttagggagtggaggggttggcaaatctgcccttactgtgcagtttgtcactgggactttcattgagaaatatgaccccaccattgaagatttctaccgcaaagagatcgaagtggactcttccccctccgtgctggaaattctggacaccgcaggaactgagcagtttgcctccatgagagatctctacatcaaaaacggccaaggtttcatcctggtttatagcctggttaatcaacagtcttttcaggatatcaagccaatgagagatcaaattgtcagagtgaagagatatgaaaaagtcccactaatcctagtaggaaataaagtggatctggaaccagaaagagaggttatgtcttcagaaggcagagctctggttcaagaatggggctgtcctttcatggagacatcggcaaaaagtaaatcaatggtggatgaactttttgctgagatcgtcaggcaaatgaactattcatccctgccggagaagcaagatcagtgttgtacaacttgtgtcgtccagtaaagaagataacctcaatcatggccataccgagcagataaaactcagaggaaatttgcacagatgctgctttggagaactttacaacctgggttgcagaactgagccttggtaaacctgtctctattacagcatgttgccatacatctatttaagtgcataaggtctttggccttcaagatccatcgaccttaaacaggaatgcttagcacgtttaccatacgtttaaaatccattctttatcaatcagtccttttatagctttctaagttcttattgatggctaatatacaagggttaatttttaatattttaattgatttctttaatcagtttctcgacttgtatttattaaatactcaaactcagtattacctactcaatgccttttaaaagaaagttataatggagaaaaaattgagccttaaacaaatggttacttctgtatattacctcgtaccagtgcttcatcctatttgtaaaatctttctcctttaaaattattggttaatactttgagactttgtttacgtgtggcagtgttgtaaaaagaaactaaagatcacattttacctgtatggatggaatatcccttttcttcaagtgcagtttgtgatgtgttttgttttttttttttttttttttgtaattaacatgttctgaaggttacaattgatatttgaaattgactgtagagcatttagttgaagagttaagcattcagttccattaggttttcacatgtgttaatctcatttacagcattgaattgcggcagtaacattttcctttctgtgaagttctaaatttagttatgacctatttagcaatgcctttgaaaagggatattgtatccatggtaaattaattgtatacctaaacagagatagctcatctttgcctatcaggcttgtaattgacatctagtagacttctgcacatgtaaaattgaattcaaataaaatcatacacactttctagttcttaatatttgtctttctgaataatagtttaaagcaatatttgttaaagttttcttgcactatcacaattgctttttagttatttctcaagaagcatgttcgtattagagacaaaatctgtgtaacaggagggagaatagcgccaagtctctgggctattttttatttttgcaaatgtgctttctaatagccattgccttccatgttgtttacctaatcagcatatttttgtctgaatacttgaacattttaacagtaacgcaggtgtagaatcagaaaggaaacttatgcagagtaatattttggttcagttttaacatcgtgacaatgagggctttttctagcaatgatttttaaattgtgtaagtttgacagtattttattgttgggtttttatttgattttagttgtgtgcttttcatttgcagaagttagtaactgcagctcacctactgcaccaaagttctcgattttaggagcccagctttagtcatttgaacatgcttctaaataaaataaaacaaaaccaaaactatacttttgatctataataagagctcaataactttgtcaaggaaagctctaatatatgcagtgatggtttatgaaagggtgtggcaattttaaatttatattgtgtgtgatgttcaaataaagtggtatctacattcatgtgatttatgggtcagcatgaccattaattactgagtagaaattgactaaactttgatttcctttttttaaatcgtgttgcatttgattcctgagcaaattccctcaaagtgaactcttgttcttaaattttgaattttatggtgagattgtaaagatagaggcaattgaaacattgttccttatttatgaactgcttgaagtgaatacttaatttaagtttgcactttaataccaaacttaaaaccaaacactcatttaaaagtaggttaagtgatcatggatcattgttattagctttgtggctttgtgaaattctaaaggaatcaaataattcatcatgatttaaattttctagagattttgatttttttataatgtttctttcctgtagattgtgttcttgtttctctctctctctctctctctctctctctctctctctctctctctctctcaaaattacagtgttcattgtcattgacctcagcagcaaatttgacttgaattcacttaggatcgcaggaatcaggggaaagtgattttaaaggtggtttctccagcacattttaagaaaagggaccaaaagttattttagcttcctcaatagattgcatgttgcttattaggataataaattaatattaaatgcaatatatgtcttgtctttattatggcatctatttaggagttgttcaaatcactgcagtagggctctgcaaataaaataatgtaacctattatcatggatctaatgtactgtaactttatcagtgaaaggtaaaatctcaaataacaagtacaaacattgaacaattacctataaagatttgtaaaagtaaaatttttccaatagatttcattcttgtcattttgtaagacgaccctgcagtccacctgtttgtaacttttttaataaaatagacatctgtattactaaaaaaaaaaaaaaa

SEQ ID NO: 25348 - DNA, 1925 bp, Homo Sapiens
cctggttccttattccggtttgcagtccccccagcacttgggagtaatttgaccgacaatgtcatgatcacagtagatattattccttcaggttggaattcagctgatggtaaaagtgataaaactaaaagtgcgccttcaagagatccagaaagattgcagaaaataaaagagagcctccttttagaggactcagaagaagaagaaggtgacttatgtagaatttgtcaaatggcagctgcatcatcatctaatttgctgatagagccatgcaagtgcacaggaagtttgcagtatgtccaccaagactgtatgaaaaagtggttacaggccaaaattaactctggttcttcattagaagctgtaaccacctgtgaactatgtaaagagaagttggagcttaacctggaggattttgatattcatgaactacatagagctcatgcaaatgaacaagctgagtatgagtttatcagctctggtctctacctagtggtgttattgcacttgtgcgaacaaagcttttctgatatgatgggaaatacaaatgaaccaagcacacgtgtccgatttattaaccttgcaagaactcttcaggcacatatggaagatctcgaaacttcagaggatgattccgaagaagacggagaccataacaggacatttgatattgcctaacttcatataagacagatggatgatctgtgaacataagtgtttattaaaaatggcaattaaatataaattacttttgtgggggaatgcctaataaatacattgactatatataaaatgaatatatacatacacatgtatgcctgtatatatatattcattctccagtgttgctgaattaaaattctgctggactttttaacatagcaaatccgatgtttataaactggtaatcaaaaaggttttttcttttaggtgagtgggaaagtattacccttgttttaaatatctaagcaatgcctatcaacccttttttgtgttatgattactgtagtcatatttatgaaaaaaggtttgtgttttactcttgctagtgagaaaagtgggacaaaatatacttttgaaataaaatgctatatggcacctaattattttttcttttaaaatgccttaagttgcagtctcattttgataatcatttgcttccagtgtttaaaaattaaaaaaagaatggggagaaggttatgagaagagcattattaagtttccaaatttaatttgaattccaaattcacctagcaataaaatctaatttttaaaaagtatataaatataaaatgtataaatgatggatagatttttgtattgatttgcaaaatgcagattatatttgataggctatagtatgtagatattccttttaggaatattacagctgtaaattatatgagacttgccagtcaaatgctatttggtttaaaaaaattattgcaatctcaagttaatggaatatttttaaatcccacattcagagtttaaaacactggttttcaatgtgttttttagtgttgtcacttgtttatagataaatatataaataacctgtttggatcctggtcctttttaactgttccttggtaattctgagcatttatttgatgacttaatatttttcactacctttggagaacagatgaacattattcaccatgaatggatctatactgtgtggtcatgagttgtgtatacttccataacactgtatttttcttctgtcagtacccttaggatacactttaaaacaccttaaggtctgatgttatggcaacaaactactttttcaaacctaaataggaaccatgtaatttctcaaaagtgattgaacagtttgcccacacttagtttgttggtcttatgtaaaacattggctcaaaataaagtacacactgatttaaaaaaaaaaaaaaaaa

SEQ ID NO: 25349 - DNA, 2236 bp, Homo Sapiens
cccttctgaaaaatggtttcacccgctccgtctctagaacgggtcgggccgctaccactgtccggcccggaggggaactgttttctccggaagtgacaacacgctgactaggaaaaggaggaggcggggcagtggggccttcggcggcgactatggaaggagccggctacagggtggtgtttgagaagggcggagtgtacctgcacaccagcgctaagaagtatcaggaccgagactctctcatcgctggtgtcatccgtgtcgtggaaaaggacaatgacgtcctcctgcactgggctcctgtagaggaggctggagattccacccaaatcctcttctccaagaaggactccagtgggggtgactcatgtgcttctgaggaggaaccaacctttgaccccggctatgaacctgactgggctgtcatcagcactgtgcggccacagccctgccactcagagcccacgagaggtgcagagcccagctgcccccagggctcctgggccttctcagtgagtctgggggagctaaagtccatccgccgctccaagccaggcctcagctgggcctacctggttctggtgacccaggctggaggttccctgcccgcactgcacttccaccgcgggggcacccgcgccctgctccgcgtcctcagccgctacctgctgttggccagctccccgcaggactcccgcctctaccttgtcttcccccacgactcctctgctctctccaactccttccaccacctgcagctctttgaccaggacagctccaatgtggtgtcacgcttcctccaggatccctactccaccaccttcagcagcttctcccgagtgaccaacttcttccggggtgccctgcagccacagcctgagggagccgcctccgaccttcccccgccacccgacgatgagcccgagcctggattcgaggtcatttcctgtgtggagctggggcctcggccaaccgtggagcggggccctccagttacagaggaggagtgggcacgccacgtgggccctgaaggtcgcctgcagcaggtccctgagctgaagaaccggatcttctcggggggtctgagccccagcctgcggcgcgaggcctggaagttcctcctagggtacctcagctgggaaggcacagctgaggagcacaaggcccacatacgcaagaaaacggatgagtatttccgcatgaagctgcagtggaaatctgtgagccctgagcaggagcggagaaactcacttctgcatggataccgcagcctcatcgaaagggatgtgagccgcactgacaggaccaacaagttctacgagggtcccgagaacccggggctgggcctgctgaacgatatcctcctcacctactgcatgtatcacttcgacctcggctacgtccagggcatgagtgatcttctctccccgatcctctacgtcattcagaacgaggtggatgctttctggtgtttctgtggcttcatggagctcgtgcaagggaactttgaagagagccaggagaccatgaagcggcaactcgggcgactgctgctgctcctgagggtgctggaccccctgctctgcgacttcctggattcccaggactccggctctctctgcttctgtttccggtggctgctcatctggttcaagagggaattccccttcccggatgtccttcggctgtgggaggtgctgtggacagggctccctggccccaatctgcacctgctggtggcctgcgccatcctggacatggagagggacaccctcatgctgtccggcttcggctccaatgagatcctcaagcacatcaacgagctgactatgaagctgagcgtggaggacgtgctgacccgcgccgaggccctgcaccgccagctaaccgcctgccccgagctgccccacaacgtgcaggagatcctggggctggccccgcccgcagagccccacagcccctcgcccaccgcctccccgctgcctctgtcgcccacccgggccccgcccaccccgccgccctccacggacacagccccgcagcccgacagcagcctggagatcctgcccgaggaggaggacgagggcgccgactcctaaccccgccaggcagcctcgttctgcacaggcactttagcccgagccaggcacacctgcgagggggcaggtgtgctccgccgccctgctgataagctggcttcattaaactgacacttctcaaaaaaaaaaaaaaaaaa

SEQ ID NO: 25350 - DNA, 2519 bp, Homo Sapiens
cacacgttttctcatgcgaatgaggttaacaccagattgttccaaaatgttgatttcaacgtcctctggatatctcttaattttgcatgaccttgacttaactaactctttagaagtaggcagctatcccattttaagagcaagaagaactacttcaagttcaggagtttcaccacgaaatagtcttgaagtcgtaacccctgaagttcttggtgagagtgaccacggaaactgcatcacgtccttacagctgcacccaaaaggctgggccactcttcttcggtgctcaagcaacagtgatgatgaggagtgtacttgtgtctatgaattccaagaaggagctccagtgcgacctgtctcacctcgctgttctctacgactgactcattacattgaagaagccaatgtaggcaggggttacatcaaagaactttgcttcagccccgatggacgaatgatttcttccccacatggctatgggattcgcttgttgggatttgacaaacagtgcagtgaacttgttgactgcttgcccaaagaagccagtcccctgcgggtgatccgttctctgtactctcataatgatgtggtactgacaacaaagttctctccaacacattgtcagattgcctcagggtgccttagtggacgggtttctttgtatcagccaaagttttaggcacaacttacatcaaataaggaactcttctggtgtttgacttaggaattgcttcaatttagatgaagtattttctttttagaagatcttataagtttgggtcaagatcctggttcttatgggtccatgaacacacttgtgaccttagtacttggtcatccagcatcatacaggcatctccaagttagactctatgcagcatcatcttttgcagcattcctctgctcctgctgatctgtgccactgaactccagttcttctggtcattttgcatggtagctcttgtcacgttccttccttcctcactctctatttctctttccctctccctgtccctctctttctttgtgtttgttgattttggtgtcaattttgtggacatttggcaggagttttgactggggtaggagaaacccatgacattagaattgaataaaacctagaagttggatattggcatattggttgttgaaaaataaatttcatcctcacttatgagtatacttggccttttaaagttactgttatgtttatctatattgagcacagataatggcattattcttataattgttaagatagtcttgcaacaaaatgtcttttaagtttcctgttaaaattataaaaagattttcatggtgagagggattttattgtgaaattctagaaaaaaatattaccacctctctttgtaatttactttacttgtatgaatttaacatctctagcatgtatccttacttgatattttgttcctatcaacagcattagaaaggaaaggagacagaatgagctttggttatttctattgcacagaaaaggatttttaaaattagattagtataatatctggccatagagtgataagaacaatatgacttagattttctgtatttcatctgccagattatttgaatcacacaggatgatgtgttaacagtattagggtggaagaggaatcaagagtaaagaggtaggggtttactcatttttcttccctgagccaggtgtgacaagccaactctgtcaccattcgtgaggggagagttgcagtcctcttcaagctgttatcataagtacagtagtcagctacttggatatcaagactaagtgctgatatgaagacttgcctttgtgttttgttatgaaacacgcaagcataaagcaggactcaagcacaaggctgactgttctactttgaataacagcttccttgcagtctcctccacatgggtggtactgtgtttagaagggattaccaaaggctggagcgatttaagctatgcactagccttgccctcttaggttgcattctctttaggccactggttctcaaacattagggtgcactgtaaccattacagagcttgtgaaaagtgcagaaacctgagcctcaccttatgagattctgattcagccagggggaggacaggaatctgtatttttcatagcaacctcaagtaatctttattctgagggtctcgggattgcaggttgaaaaacacaaccttaatcagcagtaaattcttctctactcggccaggcgcagtggctcatgcctgtaatcccagcactttgggaggccgaggtgggtggatcacaaggtcaggagttcgagaccagcctgaccaacatggtgaaacgccatctctactaaaaatacaaaaattagccgggcgtggtggtgctcacctgtaatcccagctacccaggaggctgaggcaagagaatcacttgaacccgggaggcagagggtgcagtaagccgagattgcaccactgcactccagcctaggcgacagagcgagactctgtctcaaaaaaaaaaaaaaaaaaaaaaa

SEQ ID NO: 25351 - DNA, 1623 bp, Homo Sapiens
ggagcctgcgagccgagaccgagccatgtggctagaaatcctcctcacttcagtgctgggctttgccatctactggttcatctcccgggacaaagaggaaactttgccacttgaagatgggtggtgggggccaggcacgaggtccgcagccagggaggacgacagcatccgccctttcaaggtggaaacgtcagatgaggagatccacgacttacaccagaggatcgataagttccgtttcaccccacctttggaggacagctgcttccactatggcttcaactccaactacctgaagaaagtcatctcctactggcggaatgaatttgactggaagaagcaggtggagattctcaacagataccctcacttcaagactaagattgaagggctggacatccacttcatccacgtgaagcccccccagctgcccgcaggccataccccgaagcccttgctgatggtgcacggctggcccggctctttctacgagttttataagatcatcccactcctgactgaccccaagaaccatggcctgagcgatgagcacgtttttgaagtcatctgcccttccatccctggctatggcttctcagaggcatcctccaagaaggggttcaactcggtggccaccgccaggatcttttacaagctgatgctgcggctgggcttccaggaattctacattcaaggaggggactgggggtccctgatctgcactaatatggcccagctggtgcccagccacgtgaaaggcctgcacttgaacatggctttggttttaagcaacttctctaccctgaccctcctcctgggacagcgtttcgggaggtttcttggcctcactgagagggatgtggagctgctgtaccccgtcaaggagaaggtattctacagcctgatgagggagagcggctacatgcacatccagtgcaccaagcctgacaccgtaggctctgctctgaatgactctcctgtgggtctggctgcctatattctagagaagttttccacctggaccaatacggaattccgatacctggaggatggaggcctggaaaggaagttctccctggacgacctgctgaccaacgtcatgctctactggacaacaggcaccatcatctcctcccagcgcttctacaaggagaacctgggacagggctggatgacccagaagcatgagcggatgaaggtctatgtgcccactggcttctctgccttcccttttgagctattgcacacgcctgaaaagtgggtgaggttcaagtacccaaagctcatctcctattcctacatggttcgtgggggccactttgcggcctttgaggagccggagctgctcgcccaggacatccgcaagttcctgtcggtgctggagcggcaatgacccacccctctccccccgcctgccacctccccccacaagtgccctccaggcttttcttggggaagataccccttttctgaggaatgagtttgcctccgtcccctgcccatgctgggagcccacgctcaccccctcacccctccaagctcactccccaacccccaactccgtgtggtaagcaacatggctttgatgataaacgactttactctaaaaaaaaaaaaaaaaaa

SEQ ID NO: 25352 - DNA, 2549 bp, Homo Sapiens
ccaaggggcctgaacccgagtttgggcctgaagtccttgctgcagacctgagtgcttaaatctggggcttgagacctcccaatcttgactcagcaccccaatatctgaatgcagaaccccgggatcggatctcagactctaaaccccaccgtttggctgcttagcatcccaagactggacctgggagaccctgaccctgaacaacccaaactggacccgtaaaactggaccctagaggcccaatatttaggggtctggaaccccgagtattaaggtctggagactccgttgccacagatttgagccgagtcaggacacagtccctctacagaagccttggggacaggaaaagcatgaccagatgctccctccagagccctgacctctgactcccctggagctaggactctgctccctggggctgcttctagctcaggacacccctgcccgcgatggccatcctcccgttgctcctgtgcctgctgccgctggcccctgcctcatccccaccccagtcagccacacccagcccatgtccccgccgctgccgctgccagacacagtcgctgcccctaagcgtgctgtgcccaggggcaggcctcctgttcgtgccaccctcgctggaccgccgggcagccgagctgcggctggcagacaacttcatcgcctccgtgcgccgccgcgacctggccaacatgacaggcctgctgcatctgagcctgtcgcggaacaccatccgccacgtggctgccggcgccttcgccgacctgcgggccctgcgtgccctgcacctggatggcaaccggctgacctcactgggcgagggccagctgcgcggcctggtcaacttgcgccacctcatcctcagcaacaaccagctggcagcgctggcggccggcgccctggatgattgtgccgagacactggaggacctcgacctctcctacaacaacctcgagcagctgccctgggaggccctgggccgcctgggcaacgtcaacacgttgggcctcgaccacaacctgctggcttctgtgcccgccggcgctttttcccgcctgcacaagctggcccggctggacatgacctccaaccgcctgaccacaatcccacccgacccactcttctcccgcctgcccctgctcgccaggccccggggctcgcccgcctctgccctggtgctggcctttggcgggaaccccctgcactgcaactgcgagctggtgtggctgcgtcgcctggcgcgggaggacgacctcgaggcctgcgcgtccccacctgctctgggcggccgctacttctgggcggtgggcgaggaggagtttgtctgcgagccgcccgtggtgactcaccgctcaccacctctggctgtgcccgcaggtcggccggctgccctgcgctgccgggcagtgggggacccagagccccgtgtgcgttgggtgtcaccccagggccggctgctaggcaactcaagccgtgcccgcgccttccccaatgggacgctggagctgctggtcaccgagccgggtgatggtggcatcttcacctgcattgcggccaatgcagctggcgaggccacagctgctgtggagctgactgtgggtcccccaccacctcctcagctagccaacagcaccagctgtgaccccccgcgggacggggatcctgatgctctcaccccaccctccgctgcctctgcttctgccaaggtggccgacactgggccccctaccgaccgtggcgtccaggtgactgagcacggggccacagctgctcttgtccagtggccggatcagcggcctatcccgggcatccgcatgtaccagatccagtacaacagctcggctgatgacatcctcgtctacaggatgatcccggcggagagccgctcgttcctgctgacggacctggcgtcaggccggacctacgatctgtgcgtgctcgccgtgtatgaggacagcgccacggggctcacggccacgcggcctgtgggctgcgcccgcttctccaccgaacctgcgctgcggccatgcggggcgccgcacgctcccttcctgggcggcacgatgatcatcgcgctgggcggcgtcatcgtagcctcggtactggtcttcatcttcgtgctgctaatgcgctacaaggtgcacggcggccagccccccggcaaggccaagattcccgcgcctgttagcagcgtttgctcccagaccaacggcgccctgggccccacgcccacgcccgccccgcccgccccggagcccgcggcgctcagggcccacaccgtggtccagctggactgcgagccctgggggcccggccacgaacctgtgggaccctagccaggcgcccccccctctaagggtcctctggccccacggacagcaggacccggacaccctgtgggacctggcctcaaactcaccaaatcgctcatggtttttaaaactctgatggggagggtgtcggggacaccggggcaaaacaagaaagtcctatttttccaagcttgggcgaaaaaaaaaaaaaaaaaaaaaaaaaaaaaaaaaaaa

SEQ ID NO: 25353 - DNA, 2833 bp, Homo Sapiens
gaacaaaggaatgaaatcttgactgccatccttgcctcgctcactgcacgccagaacctgaggagagaatggcatgccagggcagagaggagtgttggtgccagtcacgaattgcccgaacattacctgctgatcagaagccagaatgtcggccatactgggaaaaggatgatgcttcgatgcctctgccgtttgacctcacagacatcgtttcagaactcagaggtcagcttctggaagcaaaaccctagaaggagcacaagtctcaggcggaggagaaaaagagatcggcttttctcctccaacgttgtcatgggcttaagcaagagcagtggagacttctcttggcccctagattgtagcacccgggtcccaatccaaaacagctaggaaatggtgcccatgaagttttaaatgttttaaaatgaccctgtgttatagtctgatttggtgttaaacaggaccttcttcccccaaaattgttcagattataaaatgtgagccattcagcccccaaggtccagggcaggcgacaggaacgagcccagcgtgtgacaaagcctaacctactttcctctttcccaagctttttcagagactctggagtggacccagccctctggggaaagacagaacttagagacatcccagttactcaccacacccatagtgctgtccaatatggtagccactagctagctgtggctacttcaatttaaattcagttttaattttaattaaaaatgcagctcttcagtcgccctggccacatttcaagtgcttaacagcctcatgtggctagtgactgctgtattggacggtacagatatggaacattttcatcatcgaagaaagtcctattggacaacacttctataaaaagtttgagagcaggaattctcatttccattcgtctgtagcttctatccccaaaggcaaagaaactaaaagagaaatgactcattgaagattggcctctttcctttctctaagacaaacctaagtaaaagcctgagctttgagtcctatgctcagcacacgggaaggagatgttaataattaaaataaagttgatatcctgtctttagggagttcccttgatctcttgaaagagacacagccccatttacattatttcgtggatttcaccagcatagtatagtttttttctgtaagtccctcattcttatgtaataacaggtggaactgaggtttgaagaacctcagtggcccatcctgatgacattggagactcaaagagacaagagagagtagggtttaaaacctgagctttaagactcccactagcttcgtgtcctttggcatgttaacgtgcctcagtttcctcatctgtataatggggatatatgaaaggcaccagtcctaaggtgaacattaagtgagatgattctagttacagacttagaacaatttccagcacatagttaaatatccaggaaattctggtactgttatgtgtgggtgagctgacctggatgtagatgttttcctctctcttgctgacccctccgccagttttgtcttgtgatgccattaacacatctctccctttctgacctggctcctgcccattggtgtcccaagaaatcgtgagaatagttagcccccctctccccagcctgttgctttctcgtgtagttgttcacagtagttgagaagttgaagagcttttgcctattgaaggtgcactgagaataaactctttcctgccaccagaattgcagtggttcacggcctgcactcattcccatgaatgcagttaatagccacagaaatgtcacattaagcaaagcagccagggtctcatcgtgttgagactcgagtctctcagaccttggattcattccctggtgtctttgagcctcagtttcctcattggtaaaagagaagtgaagcagtgtctcacagggtcattacagagattaaatgaaataaatgaaataacatagaccaggagggcgtggtgtttaaaagtcacagatggggcaccctcgggccatccagcccagtgttttctttagcccctatgatgttcattttttgttatatcccattaggtgcccatatttaaaaattgggagatttcacataaaattaaaaggtctgcattttcttttttcttttcttttttttttttttgagacacagtctcactctgtcaccaggctagagtgcagtggcacgatctcagctcactgcaacctctgcctcccaggttcaagtaattctcctgcctcagcctcccaagtagctgggactacaggcacgtgccaccacgcccagctaatttttgtatttttagcagagatggggtttcaccacattggccaggatgatctcgatctcaacctcgtgatccacccacctcggtctcccaaagcgctgggattacaggcgtgagccaccgcgccaagccaaggtctgcatttttctttagaactcagaacacccaatagtcctaggcccccatcctcgcatggcagcaagctaaataagcatcttcccactgcgagttggggcatgacccagcctatggtttgccatactccctctttttctccgttttttcattaattgtgaacctgacctgcatcaccctttcatgtcagtgctctccaaacctgcttgcttgcacccctctagtcgaaatattttgtgcttaccccaatatatgtgtgtgactattgaactctattcgtagactgcttgtactaatgtcatttgcatcataaaatattcatatccaataaacatattaaaaagataagataaaaaaaaaaaaaaaaaaaaaaaaaaaaaaaaaaaaaaaaaa

SEQ ID NO: 25354 - DNA, 2029 bp, Homo Sapiens
gaccgctgtgctctcgacccctcctcctgtagagagtggtgctgccctctcgggatgtacctgcaggtggagacccgcaccagctcccgcctccatctgaagagggctccaggcatccggtcctggtccctgctggttggaatcttgtcgattggcctggctgctgcctactacagcggagatagcctgggctggaagctcttctacgtcacaggctgcctgtttgtggctgtgcagaacttggaggactgggaggaagccatcttcgacaagagcacagggaaggttgttttgaagacgttcagcctctacaagaagctgctgactcttttcagagctggccacgaccaggtggtggtcctgctccatgatgtccgtgatgtgagcgtggaggaggagaaggtccggtacttcgggaaaggctacatggtggtgctccggcttgcgacgggcttctcccaccccctcacgcagagtgcagtcatgggccaccgcagtgatgtggaagccatcgccaagctcatcaccagcttcctggagctgcactgccttgagagccccacagagctgtctcagagcagcgacagtgaggccggtgaccctgcaagccagagctgacagccccactgtgcctgagcccgtgcaccgcccacaggacccatggcacattcccggtgtgcctgagcccgtgcaccgcccacaggacccgtggcacattcccggtgtgcctgagcccgtgcaccgcccacaggacccgtggcacattcccggtgtgcctgagcccgtgcaccgcccacaggacccgtggcacattcccggtgtgcctgagcccgtgcaccgcccacaggacccgtggccttggcttcagttggtgcctccagccgagttggcctattgcctgctcatgctgctgcttgcacactgcatgaaacagcaggccagaccaggacatccagactttctccatcgtgaggcctgggcctgcctttctgcagccggaggtctcgccagccctggactcctgctttgggccacagcaagacctcgggcgagtggagaggcggggccaggccgggcccttgtgggtgctgatgctgcatgttgtccccgacacagcgtcctctccctggtggacatccccagcggtcaggtgcttccccaagggcagtgaggggtgaacatccagggcctacctggctgtgcacgctgcagccacactgtggaagctgcccctccccgaggacccgcctcccttgctgatgccaggatctcggcgcatagaccactctgccccagcggtcgtcacagaaaggtctctctgttcctcacactcagcttcagcataagctgtgaggccagaaaaaaggtcagctcttctagtatcgtgcagtgcttaaaaaccgggagctccagccgggcgcagtggttcatgccagtaatcccagcactttcggaggccgaggtgggaggattgcttgaggccaggagttcaagaccagcctgggcaacacagcaagatcctgtctttgtaaaaaaactaaccaaacaggaaaaactgggagattttctgcagaaattgagttccagcctctctcgaacctgggaagacctggcaggagggggctgggctctcggctacagacttctccccaccccgtaggagctgaacgccaaccatcctgacccgccagtgctcttggtctcctgagtgtacccaggtcctcccaggtgcggtgtgcaccgagcgcgcctggcctgatgccctggcctgtgagctggggactcctgggccctgtgagcccctaggcggcaggcccaggaatggctgggtaggacagggaacacctttgccccacgtctggctgtgacctcggtgaaagccgacaggagagagatgggaccctcctcctcagtagtggctgccagtccctcgttgcaggacagggtcatcataaccataaataacccttcacgtgtcaaaaaaaaaaaaaaaaaaaaaaaaaaaaaaaaaaaaaaaaaaaacctcggg

SEQ ID NO: 25355 - DNA, 2508 bp, Homo Sapiens [sequence omitted]

SEQ ID NO: 25356 - DNA, 1333 bp, Homo Sapiens
ggcacgaggcgcaggcgcttacagtgcaccaagatggccgcccccgtggatctagagctgaagaaggccttcacagagcttcaagccaaagttattgacactcaacagaaggtgaagctcgcagacatacagattgaacagctaaacagaacgaaaaagcatgcacatcttacagatacagagatcatgactttggtagatgagactaacatgtatgaaggtgtaggaagaatgtttattcttcagtccaaggaagcaattcacagtcagctgttagagaagcagaaaatagcagaagaaaaaattaaagaactagaacagaaaaagtcctacctggagcgaagcgttaaggaagctgaggacaacatccgggagatgctgatggcacgaagggcccagtagggagcctctctgggaagctcttcctcctgcccctcccattcctggtgggggcagaggagtgtctgcagggaaacagcttctcctctgccccgatggatgctttatttggatggcctggcaacatcacattttctgcatcaccctgagccccatttgcttcccagccctggagtttttacccggctttgcctgccacctctgcccaggacacgcttccctctcgggatgtgtgatgaactcccaggagagggaagatgggagccagggcaagataggaagctctgcctgagctttccactaggcacgccagccagaccaataaaaagcgtctgtcccactctgctaagcctggttttcttgagcagagggatggaacagagggtgagagaggcagtggccgtctccacctcagctcctgctccctctgcatcagagcccttcctttcttgggggatgggccttgccctcttctcttttcccttcctgtacctttgactaacgctcagcttccgggcctgcatgcagtagacagaagaggaagaaagaacagatgttcacagctgaatctcagtgaacagaatagcagtccctggatggcagtctgcctaaagattcctttccctgccttctcccatacattccaaaaggaagttcaacagtaagcagcacctccaagactgtctcctttcggccagtatcataagatggacgccataatcctgaggcctcctagaggctgagggggcaacggtgtgatccagctggctcatcccagcccaggtgggccaattattcaattttcaagaattttgttgcaagccagttgtcaaacacagccattataattatgtaaatttgcaaattatgttaaaaacaaggacaataaatattcaaaatgcatccctaattactaaaaaaaaaaaaaaaaaaa

SEQ ID NO: 25357 - DNA, 2236 bp, Homo Sapiens
ctagcgtgctcgctcgctcattgctttccttccctccctcggtcttccttcgcacgctgtttggtgattgtggcgctcgcgacagacagggaggcggtggcagaggacacttgtcatggccgcctctaaacctgtggaggcagcggtggtcgcagccgctgtaccgagctccgggagtggggtgggcggcggcgggactgcgggcccgggcacgggggggctgccgcgatggcagctggctctggcggtcggggcacccctgctgctgggcgcgggtgccatatacctgtggagtcggcagcaacggcgccgggaggccagaggccggggcgacgccagcggcctgaagcgcaacagcgaacggaagaccccggagggcagggccagtccggccccgggcagcggacaccctgaaggtcccggtgctcacttggacatgaactctcttgatagagcccaagcagccaagaataaaggcaataaatattttaaagcaggaaaatatgaacaagctattcagtgctatactgaggctattagcttgtgccctacagagaagaatgttgacctttctacattttatcaaaacagagctgctgcctttgaacagttgcaaaaatggaaagaagtggcacaagactgtacaaaagctgttgaacttaatcccaaatatgtgaaagctctctttagacgtgcaaaagcccatgagaagctagacaataagaaggaatgtttagaagatgtcactgctgtgtgtatattagaagggttccaaaatcaacaaagcatgctgttagccgataaagttcttaaactccttggaaaagagaaagccaaagaaaaatataagaatcgtgaacctctgatgccatctccacagtttatcaaatcttacttcagttctttcacggatgatatcatttcccagcccatgcttaaaggagagaaatctgatgaagataaagacaaggaaggggaggctttagaagtgaaagaaaattctggatacttaaaggccaaacagtatatggaagaagaaaactacgataaaatcataagtgaatgctcaaaagaaatagatgctgaaggcaaatacatggcagaagcattgctactacgagctaccttctacctgcttattggcaatgccaatgcagccaaaccagatttagataaagtcatcagtttgaaagaagctaatgtgaagcttcgagcaaatgctctcatcaaaagaggcagcatgtacatgcaacagcagcagcctttgctgtccactcaagattttaacatggctgctgacatcgatcctcagaatgcagatgtttatcaccaccgaggacagctgaaaatactccttgatcaagttgaagaagcagtggcagattttgatgaatgtattaggttaagacctgagtctgctctggcacaagcacagaaatgttttgcattgtaccgccaggcatatacgggaaacaactcttcacaaatccaagcagctatgaaaggttttgaagaggtcataaagaaatttccaaggtgtgccgaaggctatgcactatacgcccaggcattaacagatcaacaacagtttggtaaagctgatgaaatgtatgataaatgtattgatttggaaccagataatgctacaacatatgttcataaaggtttacttcaacttcagtggaagcaagatctggatagaggtttggaacttatcagcaaggctattgaaattgacaataaatgtgattttgcctatgaaaccatgggaactattgaagtacaaagaggaaacatggagaaagccattgacatgttcaacaaagctattaacctggccaaatcggaaatggagatggcccatctgtattcactttgcgatgccgcccatgcccagacagaagttgcaaagaaatacggattaaaaccaccaacattataaaacagggggaaagcagactgaccctctttttaaaagtttaccccctcttcaactgaaccctaaagacactgtcatgaactgtgttgaatggtggaaatcagtatttctgtttgtggtgttgttatttgttacatctgtttcatgtctaggtgttgtgggtgtggctgttgaaggaagtttgcagtcttgcagcttttattccctgtgcaacaaaagattagaacatgttaaagggatttttaaataaagttgcaaagagtacaaatgataaaaaaaaaaaaaaaaaaaaaaaaa

SEQ ID NO: 25358 - DNA, 1965 bp, Homo Sapiens
ccgcgctcctcctgctggctggggattttccagcctgggcgctgacgccgcggacctccctgcgaccgtcgcggaccatgggcgacaaagggacccgagtgttcaagaaggccagtccaaatggaaagctcaccgtctacctgggaaagcgggactttgtggaccacatcgacctcgtggaccctgtggatggtgtggtcctggtggatcctgagtatctcaaagagcggagagtctatgtgacgctgacctgcgccttccgctatggccgggaggacctggatgtcctgggcctgacctttcgcaaggacctgtttgtggccaacgtacagtcgttcccaccggcccccgaggacaagaagcccctgacgcggctgcaggaacgcctcatcaagaagctgggcgagcacgcttaccctttcacctttgagatccctccaaaccttccatgttctgtgacactgcagccggggcccgaagacacggggaaggcttgcggtgtggactatgaagtcaaagccttctgcgcggagaatttggaggagaagatccacaagcggaattctgtgcgtctggtcatccggaaggttcagtatgccccagagaggcctggcccccagcccacagccgagaccaccaggcagttcctcatgtcggacaagcccttgcacctagaagcctctctggataaggagatctattaccatggagaacccatcagcgtcaacgtccacgtcaccaacaacaccaacaagacggtgaagaagatcaagatctcagtgcgccagtatgcagacatctgccttttcaacacagctcagtacaagtgccctgttgccatggaagaggctgatgacactgtggcacccagctcgacgttctgcaaggtctacacactgacccccttcctagccaataaccgagagaagcggggcctcgccttggacgggaagctcaagcacgaagacacgaacttggcctctagcaccctgttgagggaaggtgccaaccgtgagatcctggggatcattgtttcctacaaagtgaaagtgaagctggtggtgtctcggggcggcctgttgggagatcttgcatccagcgacgtggccgtggaactgcccttcaccctaatgcaccccaagcccaaagaggaacccccgcatcgggaagttccagagaacgagacgccagtagataccaatctcatagaacttgacacaaatgatgacgacattgtatttgaggactttgctcgccagagactgaaaggcatgaaggatgacaaggaggaagaggaggatggtaccggctctccacagctcaacaacagatagacgggccggccctgcctccacgtggctccggctccactctcgtgcactcggatgcttactcgtcttcttcctgttctggtttcttttcccctttgttcttccagtttctaccagggggccccgtgggcttccagatcacggtgatgaacctctggcctcaggattggccccacatcaccacgccaacaggaccacagcgcactggctccaccccatctctgccatctccactcccctccttttcatgctgtctcccagaaaagctgccagggctctggccttggaattggacttgagatggggagcagacaggggaggatggggaatgtgggacacggtgtggtgggcatgagggcttggaggggtggggatgagggctcaagacacgagagaagatgtccacggtcccaggtggttaacaaagttctggcagctaaaagatgaccgcgttgaaggccacctccttctggctgggaggggcagaactgtggacagattctcaatgcctttttgaagttctgacccaccaaagaccttctgccttcaccctcctccccacctgatgtccctctgtgtctgatagtgatgttggtgaaagttcgtagaccccaggaaaaaaaaaaaaaaaaaa

SEQ ID NO: 25359 - DNA, 1229 bp, Homo Sapiens
gagggaggaggtgagagtgattagtgggagaagaaaagcaggcccaggaccaagccctggggactggggacatcctcggtgaccctgtggagcattgagccatgccagctctgtgcctggtgctgtgctggtttcaagggctgttgggagaggtatggaacgccgtggactccgggcactgcctgcagacctactccctgcacacagaggcagtgcgggccgcccggtgggctccctgtggccggcgcatcctcagtggtggctttgacttcgcgctgcacctaacagaccttgaaacaggaacccagctatttagtggtcgaagtgactttagaatcactaccttgaaattccatccaaaagaccacaacatctttttatgtggaggcttcagctctgaaatgaaagcttgggatataaggactggcaaggtgatgagaagctacaaggcgaccatccagcagaccttggacatcctgttcctccgggaaggctccgagttcctgagcagcacagacgcttccacccgggactcagctgaccgcaccattattgcctgggatttccggacctctgccaaaatctccaaccagattttccacgagaggttcacctgccccagcctcgccttgcacccgagagagcccgtgttcctggcacagaccaatggcaactacctggcccttttctccactgtgtggccctaccggatgagcagacggcggcgctatgaagggcacaaggtggagggctactcagtgggctgcgagtgctccccaggcggtgacttgctggtgacgggcagcgccgatggccgggtcctgatgtacagcttccgcacagccagccgagcatgcacactgcaggggcacacacaggcctgtgtcggcaccacctaccaccccgtgctgccctccgtcctcgccacctgctcctggggaggggacatgaagatctggcactgagctttttgtcactgaaccttcccgatgccagctgggctcttggactcccctcttcctcaagggtagatgagaggaacgagcacagaggttggctgtgggtcctgggtaccaccttctgagcctcagtttcctcatctgtaaagtggggagaaaagtctgtttgcctcaggagtgtgaggactacactagtgaaagcgcctggcgggcagccggcgatgcccaataaatgtgtgttttgctgtttgttaaaaaaaaaaaaaaaaa

SEQ ID NO: 25360 - DNA, 2448 bp, Homo Sapiens
gtcgccttgtgcgcttgcgcgcgtccaggcgctcccgtgaggcagtgcgaggcgcgcggggcacggagggcggtggcggcgggctcctgcgagaagcaagcggaacttcctgagcgtgcttaggtgtcacagctgggtgaccctccgaaggaaggttttgccgctggcgcgtctggtgtatcgcggccttggggccgcggatccctggggcttgccgctgcctctggggttcgcgcggccctggcgtcggggctgcctcagcgctggctgaaggccggcccgaagcacccttaattgtggccgcgcgcttccctgctgctcctgctgttctccgcgtcgcggtggtggactctggaggtggagccttgcccggcgagacgttgaggaggaatcattatagattctaaaaatatattttcccttctctgtggacttggtataaaacgtagctttttttctgcttggatttattttctaaaaatcaacaccgtaaacccatatcagatacaacaaaattggggtagttaaaaccatgagttgtggaaatgagtttgtggaaacattaaaaaaaaattggttatcccaaagctgataatcttaatggagaagactttgactggttgtttgagggcgttgaagatgaatcgtttctgaagtggttttgtgggaatgtgaatgaacagaacgtgttgtctgaaagagaattggaagcttttagcattcttcagaaatcaggcaagcctattctagaaggggcggcattggatgaagctcttaaaacgtgtaaaacttctgatttgaagacacctagactggatgataaagagctggagaaattagaggatgaggttcaaactctactgaaattaaagaacctaaaaattcagcgacgtaataaatgtcaattgatggcttcagtaactagccacaaatctctgaggttaaatgctaaagaagaagaagccactaaaaagctgaagcagagtcaaggaattctaaatgcaatgatcactaagatcagtaatgaacttcaggctcttactgatgaagttacacaattgatgatgttcttcagacattctaatttaggtcaagggacaaatccactggtatttttatcgcaattttccttggaaaaatacctaagtcaggaagagcaaagcacagcagcattaactttgtataccaaaaaacagttctttcagggtatacatgaagtagttgaaagttcaaatgaagacaattttcaacttttagatatacagacaccatctatttgtgataatcaagaaatccttgaggagagacgactagagatggctagactgcagctcgcatacatttgtgctcaacatcagttaattcacttaaaagcaagtaattcgagcatgaagtcaagtataaaatgggcagaggagagtcttcacagcctaaccagcaaggctgtggacaaagaaaatttggatgctaaaatttctagcttgaccagtgagattatgaaacttgaaaaagaggtcactcaaataaaagacagaagtttacctgctgtggtaagagagaatgcccagttattgaatatgccagtggtaaagggagattttgatctgcagattgctaaacaagattattatacagcaagacaagagttagttttaaatcaattaataaaacaaaaggcatcatttgaacttctacagttatcatatgaaattgaattaagaaagcatcgggacatatatcgtcaacttgaaaatttggttcaagaacttagtcaaagtaacatgatgctctacaagcaattagaaatgttaacagatccatcagtttctcaacagataaatccaaggaataccattgatactaaggattattctactcataggctttaccaagttttggagggagagaataagaaaaaagaattgtttctaactcatggaaaccttgaggaagtggctgagaaattgaaacagaatatttctttagtacaagatcagttggcagtatctgctcaagaacattctttctttctgtccaaacggaataaggatgtggacatgctttgtgatactttgtatcaaggaggaaatcagcttttgcttagtgatcaggagttaacagagcagtttcataaagttgaatctcaactgaataagctaaatcatctcctcactgatattcttgctgatgtgaagacaaaaagaaaaactttggcaaataataaattacatcaaatggaaagagaattctatgtatattttttaaaagatgaagattatctgaaagatattgtggagaatttagaaactcaatcaaagattaaggctgttagtcttgaagattgaaaattactgaaaactgaatctttattacgtgtcctcttttatttattagaagactgtgtataataaacactactaaatttttaaaaaaaaaaaaaaaaaaaaa

SEQ ID NO: 25361 - DNA, 2645 bp, Homo Sapiens
ccgcagcccagttccataacctgcggtttggggaacggagagatgagcaaatggaaccggagcccaaattatggcgaggccggagaaacaccccgtactggtacttcttgcagtgcaaacacctgatcaaggaagggaagctggttgaagccctggacctgtttgagaggcagatgctgaaggaggagcgattgcagcccatggagagcaactacacggtgctgattgggggctgcgggcgggttggctacctgaagaaggccttcaacctctacaaccagatgaaaaagcgggacctggagccctcggacgccacctacacggccctgttcaacgtctgtgccgagtccccctggaaggactcagctctacagagcgccctgaagctccggcagcagctgcaggccaaaaacttcgagctcaacttgaaaacataccacgcgctgctgaagatggctgccaagtgcgcagaccttaggatgtgcctcgatgtgttcaaggaaatcatccacaaagggcacgtggtcacagaggagaccttcagtttcctgctcatgggctgcatccaagacaagaagacaggcttccggtacgccctccaggtgtggcggctgatgctgagtctagggctacagccgagccgggacagctacaacctgctgttggtggcagctcgggactgtggcctaggggacccccaggtggcctcagagctgcttctgaagcccagggaggaggcgactgtgcttcagcccccagtgagcaggcagcggccaaggaggacagcccaggccaaggcaggcaacctcatgtcagccatgctgcatgtggaggccctggagaggcagctgtttctggaaccttctcaggcacttgggcctccagagcctccggaagccagagtgcccggcaaggcccaaccagaggtggatactaaggcagagcccagccacacagcagcactcaccgcagtggccctgaagccacctcccgtggagctggaagtcaacctcctgacccctggggccgttccccctacagtggtctcctttggaacggtgaccaccccagctgaccggctggccttgatagggggcctggagggcttcctgagcaagatggcagagcacaggcagcagcccgacatcaggaccctcacgctactggccgaggtggtggagtccgggagtcctgcagagtccttgctgctggccctcctggatgagcaccaggtagaggccgacctgacattctttaacacgctggtgagaaagaagagcaagctgggagacctggagggggccaaggcgctgttgccggtcctggcaaagaggggcctcgtccccaacctgcagacattctgcaacctggccatcgggtgccacaggccgaaggacggtctacagcttctcacagacatgaagaagtcccaggtgacccccaacactcacatctacagtgccctcatcaacgcggccatcaggaagctgaactacacctatctcatcagcatcttgaaggacatgaagcagaacagggtcccggtgaacgaagtggtcatccgccagctggagtttgcagcccagtaccctcccacctttgaccggtaccaagggaagaacacctacctggagaagattgacggcttccgagcctattacaagcagtggctgacagtgatgcccgcagaggaaaccccgcacccctggcagaagttccggaccaagccccagggggaccaggacaccggcaaggaggctgatgacggatgtgcccttgggggcaggtgatgggagcacagctggaacaatgtgctcggcccccagtgctctgtgggagccccaggacaagtgagctggtgtcacctcctgcctgggggaagagccaggccctgaggaacagccgcagcgtgtcacaggtgttggtgaggacacacactaggcccaaggtgcctgtgctcccagcaggtccaagtgcagctccagccacctttgcgtgtcaccttcacgggacttccagctccagctacctttgtgtgtcacctcacacaccacaagggggctggggcatctggtccctggggcctgggccgccccgccgggttccataggccgatgctctgaaagaagagacgtggggctcgagagatttaaagattttatttttacaaatcacagctgatagacagcgaagccttccccatagagaccgtgctccaactcgggcctggggcactgctcgctgctcccaggaagggggtggcgtgacaggcaggaacctgcgaagtccagagtccagggtggagcgcaccagcctcagccagagcagccacgacagccacagtgtgtgcactcgatgatgcggccctgcaacggaggaggacagtgagacgatgccactgcgccacgctcgcccctgcacactcacatatgtggcaaccctcccacgaaggacctgccaccatgccatatagggacacacctcagaaacccttccttgacagctctggacagggaaaatttggctccctcatgaaggtagaaccagctgctgttgacaccgaggttacatctgtatgtctatttataatatgttctgcaaatccaacacacgtttgccaatcaagaaaaaaaaaaaaaaaaaaa

SEQ ID NO: 25362 - DNA, 2047 bp, Homo Sapiens
ggggaaactcggccgatatcctccttggccaggaaagattgttaatccaccaaaggacttgaagaaacctcgcggaaagaaatgcttctttgtgaaattttttggaacagaagatcatgcctggatcaaagtggaacagctgaagccatatcatgctcataaagaggaaatgataaaaattaacaagggtaaacgattccagcaagcggtagatgctgtcgaagagttcctcaggagagccaaagggaaagaccagacgtcatcccacaattcttctgatgacaagaatcgacgtaattccagtgaggagagaagtaggccaaactcaggtgatgagaagcgcaaacttagcctgtctgaagggaaggtgaagaagaacatgggagaaggaaagaagagggtgtcttcaggctcttcagagagaggctccaaatcccctctgaaaagagcccaagagcaaagtccccggaagcggggtcggcccccaaaggatgagaaggatctcaccatcccggagtctagtaccgtgaaggggatgatggccggaccgatggccgcgtttaaatggcagccaaccgcaagcgagcctgttaaagatgcagatcctcatttccatcatttcctgctaagccaaacagagaaggaaactggctccacctccatccaggcagctgacagcacagccgtgaatggcagcatcacacccacagacaaaaagataggatttttgggccttggtctcatgggaagtggaatcgtctccaacttgctaaaaatgggtcacacagtgactgtctggaaccgcactgcagagaaatgtgatttgttcatccaggagggggcccgtctgggaagaacccccgctgaagtcgtctcaacctgcgacatcactttcgcctgcgtgtcggatcccaaggcggccaaggacctggtgctgggccccagtggtgtgctgcaagggatccgccctgggaagtgctacgtggacatgtcaacagtggacgctgacaccgtcactgagctggcccaggtgattgtgtccaggggggggcgctttctggaagcccccgtctcagggaatcagcagctgtctaatgacgggatgttggtgatcttagcggctggagacaggggcttatatgaggactgcagcagctgcttccaggcgatggggaagacctccttcttcctaggtgaagtgggcaatgcagccaagatgatgctgatcgtgaacatggtccaagggagcttcatggccactattgccgaggggctgaccctggcccaggtgacaggccagtcccagcagacactcttggacatcctcaatcagggacagttggccagcatcttcctggaccagaagtgccaaaatatcctgcaaggaaactttaagcctgatttctacctgaaatacattcagaaggatctccgcttagccattgcgctgggtgatgcggtcaaccatccgactcccatggcagctgcagcaaatgaggtgtacaaaagagccaaggcgctggaccagtccgacaacgatatgtccgccgtgtaccgagcctacatacactaagctgtcgacaccccgccctcacccctccaatcccccctctgaccccctcttcctcacatggggtcgggggcctgggagttcattctggaccagcccacctatctccatttccttttatacagactttgagacttgccatcagcacagcacacagcagcacccttcccctgaggccggtggggaggggacaagtgtcagcaggattggcgtgtgggaaagctcttgagctgggcactggccccccggacgaggtggctgtgtgttcacacacacacacacacacacacacacacacacacacacacacgtacacacatccctcacttctcttaagccaagaagtttgctttccctagctgcagtgtagatggctcttgtttttgtttttttgttttaatcatttggcattcacatgtggctgttaatatgtgcttgtttttaattaaaacaagaagctttaaaaaaaaaaaaaaa

SEQ ID NO: 25363 - DNA, 1359 bp, Homo Sapiens
caggacccgcccatcagcccggaaacccctgagctgcttctcccggaggccgatgcccacccgggagcccccaaagactcgcggctcccgggggcacctgcatactcacccgcctgggcctgggcccccgctgcagggactggcgccccgaggcctcaaaaccagcgccccccgccctccgtgccagccccagccgggaccccacaaggcaaagaccaagaagattgtgtttgaggatgagttgctctcccaggccctcctgggcgccaagaagcctattggagccatccctaaggggcataagcctaggccccacccagtgcccgactatgagcttaagtacccgccagtgagcagtgagagggaacggagccgctatgtcgcagtgttccaggaccagtacggagagttcttggagctccagcacgaggtggggtgtgcacaggcaaagctcaggcagctggaggccctgctgagctccctgcccccaccccaaagccagaaggaggcccaagttgcagcccgggtttggagggagtttgagatgaagcgaatggcgggagtgcagtggtatgatctcagctcactgcaacctcagcgtcccgggttcaagcggttctcctgcctcagctgggatcacaggcgcccaccaccgtgcctggcaaatttttgtatttgtagtagagatggggtttcaccatgttggccaggctggtctcgaactcctgacctcaagtgatccgcccacctcggcctcccagactgctgggattacaggcatgagccaccttgcccggctcacccggtcgcctgtgcccagtttcaaggagagaaaattgaggctcggagaatgaaaggcagagagttaagcagcttgaaggccacagggcagactgctgcaaagacttccgggtctcgccctgcctaggatcctggcttcctggacaagcaggctcgctgccactacctgaagggtaaactgaggcatctcaagactcagatccagaaattcgatgaccaaggagacagcgagggctccgtgtacttctaagtgcccctgcagatgggcagagggatgcatggggatgcaggtcccttgcatttcttggtatctctcagcttttcctcttgcagctccccctaccaggggtcgctttctcctggattgcaaatgcctcttcagtttggactcagctctgacagcccctcctccaggaaggccttccaggacttcctcctctgggtcctctagctctgaccctacagggactccagatctcaacctgttccctggaagtagggcctgctctccatcccagtgaaataaacatgtattagacaaaaaaaaaaaaaaaaaaa

SEQ ID NO: 25364 - DNA, 2342 bp, Homo Sapiens
cgggaaggcttggaccgacgcggcccagaggccaggaacattccgcgcgtggaccagccgggccagggcgatgctgcgggtgcggtgtctgcgcggcgggagccgcggcgccgaggcggtgcactacatcggatctcggcttggacgaaccttgacaggatgggtgcagcgaactttccagagcacccaggcagctacggcttcctcccggaactcctgtgcagctgacgacaaagccactgagcctctgcccaaggactgccctgtctcttcttacaacgaatgggaccccttagaggaagtgatagtgggcagagcagaaaacgcctgtgttccaccgttcaccatcgaggtgaaggccaacacatatgaaaagtactggccattttaccagaagcaaggagggcattattttcccaaagatcatttgaaaaaggctgttgctgaaattgaagaaatgtgcaatattttaaaaacggaaggagtgacagtaaggaggcctgaccccattgactggtcattgaagtataaaactcctgattttgagtctacgggtttatacagtgcaatgcctcgagacatcctgatagttgtgggcaatgagattatcgaggctcccatggcatggcgttcacgcttctttgagtaccgagcgtacaggtcaattatcaaagactacttccaccgtggcgccaagtggacaacagctcctaagcccacaatggctgatgagctttataaccaggattatcccatccactctgtagaagacagacacaaattggctgctcagggaaaatttgtgacaactgagtttgagccatgctttgatgctgctgacttcattcgagctggaagagatatttttgcacagagaagccaggttacaaactacctaggcattgaatggatgcgtaggcatcttgctccagactacagagtgcatatcatctcctttaaagatcccaatcccatgcatattgatgctaccttcaacatcattggacctggtattgtgctttccaaccctgaccgaccatgtcaccagattgatcttttcaagaaagcaggatggactatcattactcctccaacaccaatcatcccagacgatcatccactctggatgtcatccaaatggctttccatgaatgtcttaatgctagatgaaaaacgtgttatggtggatgccaatgaagttccaattcaaaagatgtttgaaaagctgggtatcactaccattaaagttaacattcgtaatgccaattccctgggaggaggcttccattgctggacctgcgatgtccggcgccgaggcaccttacagtcctacttggactgaacaggcctgatggagcttgtggctggcctcagatacacctaagaagcttaggggcaaggttcattctcctgctttaaaaagtgcatgaactgtagtgctttaaacaatcatctccttaacaggggtcgtaagcctggtttgcttctattacttttctttgacataaagaaaataacttctgctaggtattactctctactcctaaagttatttactatttggcttcaagtataaaattttggtgaatgtgtaccaagaaaaaattagtcacctgagtaacttggccactaataattaaccatctacctctgtttttaattttctttccaaaaggcagcttgaaatgttggtcctaatcttaattttttttcctcttctatagacttgagaatgtttttctctaaatgagagaaagacttagaatgtacacagatccaaaatagaatcagattatctctttttttctaaaggagagaaagacttagaacatacacagatcctaagtagaaccaggtaattgtctctttttctaataaggaatttgggtaatttttaattttttgttttttaaaaaataacctagactatgcaaaacatcaaagtgaattttccatgaatgtttttaatattctcatctcaacattgtgatatatgctactaaaaaccttttcatatacatcttacctcatttcaagtgaattattttaatctttttctctctttccaaaaatttaggaatgtttagtgtaattggatttcgctatcagttcccatccttaagttttgatattcaatatctgatagatacactgcatctttggtcatctaagatttgtttacaaatgtgcaaattatttagagcatagactttataagcattaaaaaaaactaatggaggtaaaacctaaatgcgatgtgaaataattttagtgttgataccgtatgtgtatttttattctaataaacttttgtgttccagaaaaaaaaaaaaaaaaaaaaa

SEQ ID NO: 25365 - DNA, 1960 bp, Homo Sapiens
gtcggaggcgcgtggagagccagggtccgggcctgaggctggcgcccgattcttctgcactgcgggtcgcggcctggagccgttcgtaatgcgagaggtgcgggcgcggctggcggccacgcaggttgaatatatttcaggaaaggtttttttcaccacctgttctgatttgaatatgttgaagaaattaaaatctgcagaaagattatttttgctgattaaaaagcagtttccacttattatttcttctgtaagtaaaggaaaaatatttaatgaaatgcaaagacttataaatgaagatccaggaagttggttgaatgccatttcaatttggaaaaatcttcttgaacttgatgcaaaaaaggaaaaactttctcagagagatgataaccaactaaaaagaaaagtgggagaaaatgaaatcattgcaaagaaattaaaaatagaacaaatgcaaaagatagaagagaatagggactgccagctggaaaaacaaataaaagaagaaactctggagcaaagagattttaccactaaaagcgaaaagtttcaagaagaagaatttcagaatgacatagagaaagcaattgatactcataatcagaatgacttgactttcagagtatcttgtcgctgcagtggaactattggaaaggccttcactgcacaggaggtaggaaaagtaattggaattgctattatgaaacactttggatggaaagcagacttgaggaatccacaattagagatctttatacatctaaatgacatttactctgtggtggggattcctgtgttcagggtttccctagccagcagagcttacatcaagacagctggactgcgatctacaatagcgtgggcaatggcatctctggctgacattaaggctggtgcatttgttttagatccaatgtgtggacttggaacaatacttttggaagctgctaaagaatggccagatgtgtattatgtaggtgctgatgtcagcgactcacagttactaggtacttgggacaatctgaaagctgcaggccttgaggataaaattgaattacttaaaatctctgttatagaattgccattgccttcagaaagtgttgatattattatttctgacattccatttgggaaaaagtttaagttaggaaaagacatcaaaagcattctacaagaaatggaaagagtgcttcatgttggcggaaccattgtattgttgcttagtgaagatcaccacaggcgccttacagattgtaaagagagcaacatccctttcaattccaaggacagtcacacagatgaacctggaattaaaaagtgcttgaatcctgaagaaaaaactggtgcattcaagacagcgtcaacttcattcgaagccagtaaccacaaattcttagacagaatgtcaccatttggctccttggtaccagtggaatgctacaaagttagccttggaaagacagatgcgttcatatgtaaatataagaagtcgcactcttctggactgtagcaggcttgctgccatcagccgggttcaggcccttgtaagttagctgtacagcagaagtttgctgtctctaggattcatatagcacccacagagctccaagtaaccaaattcccccaaagacaggaggtgtggctgatgggtacacatgcttggtaagagtttctgctttatattctaaagtacttaatgtttttgagaaaaaagttaccgaatattttttagacttaagttttatcttctgtcagaatgtgaaaagttctgcccagtttctgagcaaaaacttcaatttcaaaataaaggttttcaggggttcacttaagtgtatcacaatcaacaccagacgggatattttaactatcagattttcggaaatgtaaaaacctttatgtgtaacttcttttgatattaaacttgatttttgagcctgtaacaaaaaaaaaaaaaaaaaaa

SEQ ID NO: 25366 - DNA, 3801 bp, Homo Sapiens
gtgctggagaggccgctgcgagcggaaggcctcctccataaccgagtccgaaagggcagaatctatgggggtggaaactaattctaagccagactgctggagatcaccctgttctagtgtgtggaggcttccaccaggaggcgcattggagtgactgtctggcatcaccaagatgacactccacgccacccggggggctgcactcctctcttgggtgaacagtctacacgtggctgaccctgtggaggctgtgctgcagctccaggactgcagcatcttcatcaagatcattgacagaatccatggcactgaagagggacagcaaatcttgaagcagccggtgtcagagagactggactttgtgtgcagttttctgcagaaaaatcgaaaacatccctcttccccagaatgcctggtatctgcacagaaggtgctagagggatcagagctggaactggcgaagatgaccatgctgctcttataccactctaccatgagctccaaaagtcccagggactgggaacagtttgaatataaaattcaggctgagttggctgtcattcttaaatttgtgctggaccatgaggacgggctaaaccttaatgaggacctagagaacttcctacagaaagctcctgtgccttctacctgttctagcacattccctgaagagctctccccacctagccaccaggccaagagggagattcgcttcctagagctacagaaggttgcctcctcttccagtgggaacaactttctctcaggttctccagcttctcccatgggtgatatcctgcagaccccacagttccagatgagacggctgaagaagcagcttgctgatgagagaagtaatagggatgagctggagctggagctagctgagaaccgcaagctcctcaccgagaaggatgcacagatagccatgatgcagcagcgcattgaccgcctagccctgctgaatgagaagcaggcggccagcccactggagcccaaggagcttgaggagctgcgtgacaagaatgagagccttaccatgcggctgcatgaaaccctgaagcagtgccaggacctgaagacagagaagagccagatggatcgcaaaatcaaccagctttcggaggagaatggagacctttcctttaagctgcgggagtttgccagtcatctgcagcagctacaggatgccctcaatgagctgacggaggagcacagcaaggccactcaggagtggctagagaagcaggcccagctggagaaggagctcagcgcagccctgcaggacaagaaatgccttgaagagaagaacgaaatccttcagggaaaactttcacagctggaagaacacttgtcccagctgcaggataacccaccccaggagaagggcgaggtgctgggtgatgtcttgcaggtggaagaactgagtaagaaactggctgactctgaccaagccagcaaggtgcagcagcagaagctgaaggctgtccaggctcagggaggcgagagccagcaggaggcccagcgcctccaggcccagctgaatgaactgcaagcccagttgagccagaaggagcaggcagctgagcactataagctgcagatggagaaagccaaaacacattatgatgccaagaagcagcagaaccaagagctgcaggagcagctgcggagcctggagcagctgcagaaggaaaacaaagagctgcgagctgaagctgaacggctgggccatgagctacagcaggctgggctgaagaccaaggaggctgaacagacctgccgccaccttactgcccaggtgcgcagcctggaggcacaggttgcccatgcagaccagcagcttcgagacctgggcaaattccaggtggcaactgatgctttaaagagccgtgagccccaggctaagccccagctggacttgagtattgacagcctggatctgagctgcgaggaggggaccccactcagtatcaccagcaagctgcctcgtacccagccagacggcaccagcgtccctggagaaccagcctcacctatctcccagcgcctgccccccaaggtagaatccctggagagtctctacttcactcccatccctgctcggagtcaggcccccctggagagcagcctggactccctgggagacgtcttcctggactcgggtcgtaagacccgctccgctcgtcggcgcaccacgcagatcatcaacatcaccatgaccaagaagctagatgtggaagagccagacagcgccaactcatcgttctacagcacgcggtctgctcctgcttcccaggctagcctgcgagccacctcctctactcagtctctagctcgcctgggttctcccgattatggcaactcagccctgctcagcttgcctggctaccgccccaccactcgcagttctgctcgtcgttcccaggccggggtgtccagtggggcccctccaggaaggaacagcttctacatgggcacttgccaggatgagcctgagcagctggatgactggaaccgcattgcagagctgcagcagcgcaatcgagtgtgccccccacatctgaagacctgctatcccctggagtccaggccttccctgagcctgggcaccatcacagatgaggagatgaaaactggagacccccaagagaccctgcgccgagccagcatgcagccaatccagatagccgagggcactggcatcaccacccggcagcagcgcaaacgggtctccctagagccccaccagggccctggaactcctgagtctaagaaggccaccagctgtttcccacgccccatgactccccgagaccgacatgaagggcgcaaacagagcactactgaggcccagaagaaagcagctccagcttctactaaacaggctgaccggcgccagtcgatggccttcagcatcctcaacacacccaagaagctagggaacagccttctgcggcggggagcctcaaagaaggccctgtccaaggcttcccccaacactcgcagtggaacccgccgttctccgcgcattgccaccaccacagccagcgccgccactgctgccgccattggtgccacccctcgagccaagggcaaggcaaagcactaaagggccagtaccagtgagtggccccacctgtgtccccgatgctgccgtcacctggtcctccgcctactgtccctctcagtgccttctctcagctcccaggccaacagtagccaaacccctagagacagtgatgcctgcccgcaccctggcctggtccctggtccttcactggcgccttctcggagctggcccagggggcctggagcatggacagtgtgggcgctctccctaccttgcctccttttttcttaaagcaaagtcacttctccatcacaaccagatttgaggctggttttgatggctgggtccttgggcctggccagtcttcctcttagcctctggatctagaagggaccataagaggagtaggccctggttcctgctgtcctggtggctgggcccagcaggggccctcactcttgaagtccaggactgggtctgacctggtgggagcacctgccagaggatgctctttcccaggacggatgggccctgtgtctcaggagtggggttgggggacagccttcagcagcagctcacaccctaccttccccagacttgcactggggtgggatttggagtgatgggaaggtttttaagggccggggatggatcttttctaaatgttattacttgtaaataaagtctatttttctcccgtgaaaaaaaaaaaaaaaaaaaaaaaaaaa

SEQ ID NO: 25367 - DNA, 1835 bp, Homo Sapiens
tggagattccctgctccaagtcttctgggcgctccaggttctgtgaggccccacgggagccccggacccctggtctctgtaactgtggggtgagggaaggcagcacgcccggaccttgtggtacgacaggcccaggtatgtgttcatggagttttgtgttgaggacagcaccgatgtccacgtgcttattgaggatcaccgcattgtgttcagctgcaagaatgccgatggagtggagttgtacaatgagattgagttctatgccaaagtgaactccaaggactcccaggataagcgctcttcccgctctattacttgttttgtgagaaaatggaaggaaaaggtggcctggccgcggcttaccaaggaggatatcaagccagtgtggctgtctgtggactttgataactggagagactgggaaggggatgaagagatggagctggctcatgtggaacattatgcagagcttttgaagaaggtcagcaccaagagacctccacctgccatggatgatttggatttcaccaccaccgtggtctcttgctgtcccgcggagctgcagactgaagggagcaacggcaagaaagaagtgctgagcggtttccaagtggtgctggaagacacagtgcttttccctgagggcgggggacagcctgatgaccgtggtacaatcaatgacatctctgtgctgagagtgactcgccgtggggaacaggctgatcatttcacccagacacccctggatccaggaagccaggttctggtccgggtagattgggagcggaggtttgaccacatgcagcagcattcagggcagcatctcatcacggcagttgctgaccatctatttaagctgaagacaacatcatgggagttagggagatttcggagtgcgattgagctggacaccccctctatgactgcagagcaagtagctgccattgagcagagcgtcaatgaaaaaatcagagatcggctgcctgtgaatgtccgagaactgagcctggatgatcctgaggtggagcaggtgagtggccggggtttgcctgatgatcatgctgggcccattcgggttgttaacatcgagggcgttgattccaacatgtgctgtgggacccatgtgagcaatctcagtgaccttcaggtcattaagattctgggcactgagaaggggaaaaagaacagaaccaacctgatatttctgtctgggaaccgggtgctgaagtggatggagagaagtcatggaactgaaaaagcactgactgctctgcttaagtgtggagcagaggatcatgtggaagcagtgaaaaagctccagaactccaccaagatcctgcagaagaataacctgaatctgctcagagacctggctgtgcacattgcccatagcctcaggaacagtccagactggggaggtgtggtcatattacacaggaaggagggtgattcagagttcatgaatatcattgccaatgagattgggtcagaggagaccctcctgttcttaactgtgggcgatgagaaaggtggtggactcttcttactggcagggccacctgcgtctgtggagaccctggggcccagggtggctgaggtcctggaaggcaaaggagcagggaagaaaggccgttttcagggcaaggccaccaagatgagccggcggatggaggcgcaggcgcttctccaggactacatcagcacgcagagtgctaaggagtgagggcttagggcactcacctcctgtttccacaggaatcttttggtcaataaaatagattgactcagaaaaaaaaaaaaaaaaaaaaaaaaaaaaaaaaaaaaaaaaaaaaaaa

SEQ ID NO: 25368 - DNA, 1670 bp, Homo Sapiens
tagagctccaggacattcaggtaccaggtagccccaaggaggagctgccgacctggcagggaacaaccaagactggggttaaatctcacagcctgcaagtggaagagaagaacttgaacccaggtccaacttttgcgccacagcaggctgcctcttggtcctgacaggaagtcacaacttggccctgacttcctatcctagggaaggggccggctggagaggccaggacagagaaagcagatcccttctttttccaaggactctgtgtcttccataggcaacatgtcagaaggggtgggcacgttccgcatggtacctgaagaggaacaggagctccgtgcccaactggagcagctcacaaccaaggaccatggacctgtctttggcccgtgcagccagctgccccgccacaccttgcagaaggccaaggatgagctgaacgagagagaggagacccgggaggaggcagtgcgagagctgcaggagatggtgcaggcgcaggcggcctcgggggaggagctggcggtggccgtggcggagagggtgcaagagaaggacagcggcttcttcctgcgcttcatccgcgcacggaagttcaacgtgggccgtgcctatgagctgctcagaggctatgtgaatttccggctgcagtaccctgagctctttgacagcctgtccccagaggctgtccgctgcaccattgaagctggctaccctggtgtcctctctagtcgggacaagtatggccgagtggtcatgctcttcaacattgagaactggcaaagtcaagaaatcacctttgatgagatcttgcaggcatattgcttcatcctggagaagctgctggagaatgaggaaactcaaatcaatggcttctgcatcattgagaacttcaagggctttaccatgcagcaggctgctagtctccggacttcagatctcaggaagatggtggacatgctccaggattccttcccagcccggttcaaagccatccacttcatccaccagccatggtacttcaccacgacctacaatgtggtcaagcccttcttgaagagcaagctgcttgagagggtctttgtccacggggatgacctttctggtttctaccaggagatcgatgagaacatcctgccctctgacttcgggggcacgctgcccaagtatgatggcaaggccgttgctgagcagctctttggcccccaggcccaagctgagaacacagccttctgaaaacatctcctgccagctgaactgtagttagaatctctgggcctctcctcaactgtcctggacccaaggctaggaaagggctgcttgagatgactgtggtccccccttagactccctaagcccgagtgagctcaggtgtcaccctgttctcaagttgggggatggggaataaaggagggggaattcccttgaacaagaagaactggggatagttatatttccacctgcccttgaagctttaagacagtgatttttgtgtaaggttgtatttcaaagactcgaattcattttctcaatcatttcctttgtaacagagttttacgacttagagtctgtgaaaacaggcaaggagcccgggttaaaatatccccctattcgcccccaaaatgcaataaaagaagataaaagagagaggaaaaaaaaaaaaaaaaaaa

SEQ ID NO: 25369 - DNA, 1710 bp, Homo Sapiens
tgaggagatccggtttccagcactgccttgctccgaattgggagacgtttgtcacctgccttgttcgctgtggcctctattctaaagagcggagatcggataaaggagttcagatgtgttctaagcctgctggagtgaccacacttccaagacctgatggaggccagagctcagagtggcaacgggtcgcagcccttgctgcagacgccccgtgacggtggcagacagcgtggggagcccgaccccagagacgccctcacccagcaggtacatgtcttgtctctggatcagatcagagccatccgaaacaccaatgagtacacagaggggcctactgtcgtcccaagacctgggctcaagcctgctcctcgcccctccactcagcacaaacacgagagactccacggtctgcctgagcaccgccagcctcctaggctccagcactcgcaggtccattcttctgcacgagcctctctgtccagatccataagcacggtcagctcagggtcgcggagcagtacgaggacaagtaccagcagcagctcctctgaacagagactgctaggatcatccttctcctccgggcctgttgctgatggcataatccgggtgcaacccaaatctgagctcaagccaggtgagcttaagccactgagcaaggaagatttgggcctgcacgcctacaggtgtgaggactgtggcaagtgcaaatgtaaggagtgcacctacccaaggcctctgccatcagactggatctgcgacaagcagtgcctttgctcggcccagaacgtgattgactatgggacttgtgtatgctgtgtgaaaggtctcttctatcactgttctaatgatgatgaggacaactgtgctgacaacccatgttcttgcagccagtctcactgttgtacacgatggtcagccatgggtgtcatgtccctctttttgccttgtttatggtgttaccttccagccaagggttgccttaaattgtgccaggggtgttatgaccgggttaacaggcctggttgccgctgtaaaaactcaaacacagtttgctgcaaagttcccactgtcccccctagaactttgaaaaaccaacatagcatcattaatcaggaatattacagtaatgaggattttttctgtctttttttaatacacatatgcaaccaactaaacagttataatcttggcactgttaatagaaagttgggatagtctttgctgtttgcggtgaaatgctttttgtccatgtgccgttttaactgatatgcttgttagaactcagctaatggagctcaaagtatgagatacagaacttggtgacccatgtattgcataagctaaagcaacacagacactcctaggcaaagtttttgtttgtgaatagtacttgcaaaacttgtaaattagcagatgacttttttccattgttttctccagagagaatgtgctatatttttgtatatacaataatatttgcaactgtgaaaaacaagttgtgccatactacatggcacagacacaaaatattatactaatatgttgtacattcggaagaatgtgaatcaatcagtatgtttttagattgtattttgccttacagaaagcctttattgtaagactctgatttccctttggacttcatgtatattgtacagttacagtaaaattcaacctttattttctaaaaaaaaaaaaaaaaaaaaa

SEQ ID NO: 25370 - DNA, 1877 bp, Homo Sapiens
ggctggttggaggaggtagatcaccctttctgcgggggacgatttcgtcggtggtaggctgctaccatgaggttgaatcagaacaccttgctgctggggaagaaggtggtccttgtaccctacacctcggagcatgtgcccaggtaccacgagtggatgaaatcagaggagctgcagcgtttgacagcctcggagccgctgaccctggagcaggagtatgccatgcagtgcagctggcaggaagatgcagacaagtgtaccttcattgtgctggatgccgagaagtggcaggcccagccaggcgccaccgaagagagctgcatggtgggagatgtgaacctcttcctcacagatctagaagacctcaccttgggggagatcgaggtcatgattgcagagcccagctgcaggggtaagggccttggcactgaggccgttctcgcgatgctgtcttacggagtgaccacgctaggtctgaccaagtttgaggctaaaattgggcaaggaaatgaaccaagcatccggatgttccagaaacttcactttgagcaggtggctacgagcagtgtttttcaggaggtgaccctcagactgacagtgagtgagtccgagcatcagtggcttctggagcagaccagccacgtggaagagaagccttacagagatgggtcggcagagccctgctgatggctgggccttgtgggcagccactctgtgtgagcagggtgttgggcccatacacttcaaagaccagagccctgcactgggagagtgctcctggcccaggctgggaatcacctttcgaggcccttcagactctggcggggcttgctgtggcctccctccagctagtggtgtggctgagcagactccagggccagggccagttcccttctcccctcccggccaaacccagacccagactctaggaagctggaatggagggcagggatccatgggagatgtcgggatgaaggtgggagccggaggtgcagggggacctggaacatggatgggagtggacaggcctttctccttagaggccagaggtgctgccctggctgggagtgaagctccaggcactaccagctttcctgattttcccgtttggtccgtgtgaagagctaccacgagccccagcctcacagtgtccactcaagggcagcttggtcctcttgtcctgcagaggcaggctggtgtgaccctgggaacttgacccgggaacaacaggtggtccagagtgagtgtggcctggcccctcaacctagtgtccgtcctcctctctcctggagccagtcttgagtttaaaggcattagtgttagatacagctccttgtggctggaaaacacccctctgctgataaagctcagggggcactgaggaagcagaggccccttgggggtgccctcctgaagagagcgtcaggccatcagctctgtccctctggtgctcccacgtctgttcctcaccctccatctctgggagcagctgcacctgactggccacgcgggggcagtggaggcacaggctcagggtggccgggctacctggcaccttatggcttacaaagtagagttggcccagtttccttccacctgaggggagcactctgactcctaacagtcttccttgccctgccatcatctggggtggctggctgtcaagaaaggccgggcatgctttctaaacacagccacaggaggcttgtagggcatcttccaggtggggaaacagtcttagataagtaaggtgacttgcctaaggcctcccagcacccttgatcttggagtctcacagcagactgcatgtgaacaactggaaccgaaaacatgcctcagtataaaacaaacattataaaaaaaaaaaaaaaaaaaaa

SEQ ID NO: 25371 - DNA, 1425 bp, Homo Sapiens
aagacaacagcctccagtcggagactgtgcagtacaagcgaggagtgtgtcagcagttctgcctgccctcccacaccgtggatccctccgagtgggccgaagaggagcttggctttgatttagaccgagaagtttaccctctagtggtacatgccgtggtggatgaaggagacgagtattttggccattgccatgtactgctgggtacttttgagaagcacacagatggaactttctgtgtcaagcccctcaaacagaaacaagtagtagacggggtcagctacctccttcaggagatctatggaattgaaaacaagtacaacacacaagattctaaggtggctgaagacgaagtgagtgataacagtgccgagtgtgtggtgtgtctctcggatgtccgggacaccttgattctgccctgtcgccacctctgcctctgtaacacctgtgcagacacgctgcgctaccaggccaacaactgccccatctgccgactgcccttccgggcactgcttcagatccgagccatgaggaaaaaattgggccccttgtccccaaccagctttaaccccatcatctcatcccagacatctgactctgaagagcatccatcctcagagaatattccaccaggctatgaagtagtatctcttctggaggccctcaacgggcccctcaccccgtctctactaaaaatacaaaaaattagctgggcatggttgcaggcgcctgtagtcccagctacttgggaggctgaggcaggagaatggcctgaacccgggaggcggagcttgcagtgagccgagatcgcgccaatgcactccagcctgggcgacagagaaaaaaaaaaaaaaaagaaggagcccttgaatctgagaatcccccagttaagatgatttcccttaaggagcatttctcctgatcaggtgcattcagggaggcctgcaactccatcctaaggtgacatttcaagaaacacatgtgttgaccacctctgtgtgccaagcactgggtgaggagtggtcgtatattaccataattcatcctcactcaattgggaggtggcattcttgtccctgttgcccccatctctacccccttttgttaatggttgagagaaatgtggaccagtgattctcagtttggtgcccaggtccccaaaggaagtgatggagagccttgagctaagttcaggcagcagcatgtggccagcagcagtgtgctgggagcagaggttggaatcagggctcagggccttcacttcaagggccctccccagctactcgggaggctgaggcaggagaatcgcttgaactcaggaggtggaggttgcggtgagccaagatcgtgccactgcactccagcctgggctacaagattgaaaagatcgaaactctgtctcaaacaaaaaaaaaaaaaaaaaaa

SEQ ID NO: 25372 - DNA, 1481 bp, Homo Sapiens
gtcaggtctgggaaactaggccctggggttttccctgagcaggagcggtgcccgagggcctcaggcgtcagtccaggccctgaatggctggtctccagcggttggcgtcacatctgcctgtgggcgttatgctcccacataatacaacggaagctccagggccccactcagccaagcaagactcttacgaacaaggtgactcttcccagcagtccttgaaggggcacctgaggaacaatttccagaagcagcttttgagcaacaaagagttgattctggataaagtctatactcaccccaaatggaacacccaaacaaaagcccggagctactcctatccccactgtactggaatcagccagcaagatccagaaagtgattcccagggccaaggaaatggtttgttttactcgtcaggccctcaatcctggtatcccaaagccaataaccaggactttatcccctttacaaagaaacgagttggagtggaccgggcgttcccattgaaacccatggtccacaggaagtcgtgcagtacaggtgaggctggcactgatggggaccataatgtctacccaaggccccctgagccgagagagttttcatctaggaactttggtgtgaggaaccagggcaacttttctgtggttggtactgttcttgctgccacgcaggcggagaaggccgtggcaaactttgacaggacggagtgggtgcagatccgaagactagaagctgcaggggagagcttagaggaggaaatccgaagaaagcagattctcctgaggggaaagctgaagaagacagaggaggaactcagaaggatccagacgcaaaaggaacaggccaaggaaaatgaaaacggagagctacagaaaattatactccccaggagcagagttaaaggctgaacctcctcagaagagcaactggagatagaagcatgaatcttttatccatacgttccgccaggctcgagaggtccagcaggtaactgccaaaggtggaaactgttcacacttgcctcccatcctgcctgcagaaaacccagactgcattcagtgtcctcagtgtagccaccactttgctcccaaggtggctgagcaacacattcccaagtgtaagaccatcaagaactgtcttccacctctaaggaagcattatagttgagcagacaacaatggaaacttttggatagttcagaaagctctgcttctcttcagcagtaaatgggagtagaatttgatgcaaagcagaaagaaatcaaacagctcccagatctgcctgcagagctaaaatctgtgaggagagagccactgctaagcagcaggaggcagaaggaagccccagcttcccactaaattacaaccttgggctggtatgctttatgttattgccctcagaattgatgggtgaagacactgaagagtcatgagcaggctccattaaagctcttttcttgcaaaaaaaaaaaaaaaaaa

SEQ ID NO: 25373 - DNA, 3039 bp, Homo Sapiens
caaccagcaggaccagtttgacttcacttttgttgaagtttatcgcgtcaagaaattccagtttacgtcgaagcacatggaggatgaggacagcgacctcaaggagggggggaagaagcgctttgggcacatttgcagcagccacccctcctgctgctgcaccgtctccaacagctcctggaactgcgacggggaggtcctgcacagccctgccatcgaggtcagagtccactgccagctggttcgactctttgcacgaggaattgaagagaatccgaagccagactcacacagctgagaagccggcgtcccgctcacaaactgggaaagtgtgaaaactatttaagataattattacagaccaattatgttgatatatacatttaaatgtagaaatttatttttgatagttaaatcttgattttagaagaaaacccttttgtcaacaattttgtgtacatatttggcattttcagttctgtacgcatctgcgggttgcagcccacgccgcttactctcagcggatgcagctgctcacttgggggcactggcctcttaggttttaacgatgtcaacagtgtagtttagaaaatggcccgttagtggctctattgcaataatgttagggacattatatgatttccacgcaggtcacaccatctgggcctgaggtagcagtgggtcactttgatccactttgcaggacttattctgtaacggtttgtggccaagttttgggaagtggttgattctctttgccttcatttcaccttcctcttcgtttacggttaggacatcgctgcttgatccttacaatactgtgcaactgcaatgcaacgtggccctgcttcaggtgatccgcgggaggggcctccacgccagcgccgggaaggctgctggggcctccacacctgcctcatcacggcggcgaggctacgacaatccggctgggagcatgaccttggcgtctgttctgggagcacggatgataagctctggaagctggcagtgtgtaaagcactggcaagtttgttactgttaaaatgtcaaataccaatgctttatatcgacgcgaagtgcttaacacagccgggcttgggggcagtcaggaggaagctggccatccgtggaggaggggccggtcctggactcccgcaggactcctctgaggcagggcctgaagtctgtacacgtggtccagatttgtccttgtcttttcttcacactgagttctctatatttattgaacatcttgtccttttaagccagagtagtgtaaactgcgtctcggatgtctgtcttttgcctcgaagccacgatggatcgctggtttcctctgcagcgcgagggctccggcgaccagaggattcttcccggaaggcattcctgccgcgctccccggggcacccctcaattgtgtactacgtccttgtttagtgtgtatccgtgcccacgtagatgatgtctgtaacgtagttttgtttgaaatatgagaatatgcggcttaaactttgatctgtaaggagcggggccgtggccgtttggagcacgctgtagacaccgttcctcatgctgccgggtgggttttgcagaagctcccttagtgatttcatgtttaacaggcagcatccattttcagaatttcctggcattgatttatattttgaagcatacaggaaacttctcgtttcctcgtttagccccacccagatcaggtgaaagggcagctttaatggtggtttttatggaccacattatcagagagcactgtgcaagccaaatggttcaataatgaatgaaaattctgggtgtaaagagtaaatatgccctggctctttctaccaatgtttgctcctggttggaaagaaaccaaagatttaagacgggctgctcttccagactggctgtgcctgcctgtgcccagcaacctgtgcagccggcagtgtgcctggtgtcacgccaggaggctgtggctgctgtgggccctctggaattgtgctcctcacaaagtttccccaaaaggttcttctaagcctttattgtccctggtaaatgtttcccggctgggcgcggtggctcacgcctgtaatcccagcactttgggaggccgaggcgggtggatcacctaaggtcaggagtttgagatcagcctgcccaacatggtgaaacctcgtctctactaaaaatacacaacttagccagtcttgttggcgcacgcctgtaatctcagctactagggatgctgaggcaggagaatcgcttgaacccaagaaagaggtggaggttgcggtgagccaagattgcgccactgcactccagcctgggcaaacagagggagactccatcgccccccccaacaaaaaaaaagtttcccatacactggcctgccccaaaacccactaacaattttagcaaaacagtccaggccaaagaggaagcatttcatgttcaataagaaacccagccattccgcatggctggttcctgagtggctctggtgatactctccagccacctgctgacattcagaatctcagacctcgggactgctgttgcggtaccgtgtgtctgacacctgccagcagccctttgctatctgcgcgcaggatgggggtgactgcccagacattcccgctagataggctctgatttccggggcagcctttcagatgcggcagacatacaacacctgtactttagagttttaagggaaaaaaaatcagaagtgctggttagatagtaaaaacttaggataacttagaaaggctagttttagcttcctttgtggctccctggtgcaaaacaattagcagttatgcaatggacctgattctagtttattctaattaagaagtgaggccgggtttgacttcgttcctgaatacaatcttgagtaactgggaaagtctgagtgaaaggatggcctcattctctttctaatcttgctggtttcaagattagaaaatggcattatttgatctgaaatgtttgagaagacacgaataaagttacttgggcagaaaaaaaaaaaaaaaaaaa

SEQ ID NO: 25374 - DNA, 1927 bp, Homo Sapiens
gttgggagagcgtctgtagcttccttgtgtccggccgtcagctgcagcccggggagccaggtgcagaaacggaagatgaccactctgtgactgaagggcctgcggatgagggcattcgaccacggccgcaggggtcttcacctgtctacgaatacacgactgaggctgccgactttggactccaggaagacgcccccggcaggcaaggttctgctgggagacggagatcctggtggaagcgagattcaggggactcacggacatttttcaggatgagtcgtccagaggctgtccaggaggcaacagaggtgacgctgaagacagaggtggaggcaggagccagtggctacagtgtcacaggtggtggggaccaggggatcttcgtcaagcaagtgctgaaggactcctcagccgccaagctttttaacttgagagaaggggatcagctgctcagtacaaccgtgttctttgaaaacataaaatatgaagatgctctcaaaatccttcaatattcagagccgtacaaggttcagttcaaaatcagacggcagctccctgccccacaggatgaagagtgggcttccagcgatgcccagcacggcccacagggcaaggagaaggaggacacggatgttgctgatgggtgcagagagacccccacgaaaactctggaaggagatggggaccaagagagactcatctccaaacccagggtggggagaggcaggcagagccagagggagaggctctcttggccaaaatttcaatccataaagagcaagcgggggccgggaccccagaggtcacacagctcgtcagaggcctacgaacccagggacgcacatgacgtgtcccctacaagcacagacacagaggcccagctcacggtggagcgccaagagcagaaggcagggccgggcagccagaggaggcggaagttcctcaacctcagattcaggacaggctcgggacagggcccttcatcgacaggacagccaggcagggggttccagagtggggtgggccgtgctggggtcctggaagagttggggccctggggtgatagcctcgaggagactggggctgccacaggcagcaggagagaggagagggcagaacaggatcgagaagtgatgcctgctcagagcatgccattgcccacagagctcggtgaccctagactttgcgagggaacccctcaggaagggggactcagggcagccaggctccatggaaagaccctggaggggcaggcacaggagacagcagtggcccagaggaagcccagggcccagccaactcctggaatgagccgggagggtgaaggcgagggactgcagagcctggaaatcgggatcgccagactgtccttgagagacacaaccgaaggaggcacacagattggcccaccagaaattagggtgcgagtacacgatttaaagacaccaaaatttgcattttccacagaaaaagagccagaaagagaaaggcgccttagtaccccacagcgagggaagagacaggatgcgtcctcaaaagcgggtactggcctgaagggtgaggaggtggaaggagccgggtggatgccgggcagggaaccaaccacacatgcagaagcacagggggatgaaggagatggagaggaaggactacagaggacaaggatcactgaggaacaggacaagggcagggaagacacagaaggacagataagaatgcccaagttcaagataccctccttaggatggtcgccaagcaagcacacaaagacaggcagagaaaaagccacagaagacacagagcagggaagggaaggagaggccacagcaacagctgatagaagagaacagagacgcacagaggaaggattaaaagacaaagaagacagtgactcaatgacaaacacaacaaaaaaaaaaaaaaaaaa

SEQ ID NO: 25375 - DNA, 3594 bp, Homo Sapiens
gcggcgcccagggcggtagcgtgaaacttggtggaagacgctgaccagtcgtgttggaatcaaaacagcggggaccctgcgccatgtcgcgactgatcgtgaagaatctcccgaatgggatgaaggaggagcgtttcaggcagctgtttgccgccttcggcacgctgacagactgcagcctgaagttcaccaaagatggcaagttccgcaagtttggttttattggcttcaagtccgaggaagaggcccagaaggcacagaagcatttcaacaagagcttcatcgacacatcccggatcacagtggagttctgcaagtcattcggggacccggccaaacccagagcctggagcaaacatgcccagaaaccaagccagcccaagcagcctccaaaagactctactactccagaaattaagaaagatgagaagaagaaaaaggtggcaggtcaactggagaagctgaaggaggatacagagttccaggagtttctgtcagttcatcagaggcgggcgcaggcagccacttgggcgaatgatggcctggatgctgagccctcgaaagggaagagcaagccggccagtgactacctgaacttcgactccgattctgggcaggagagtgaggaggagggagccggggaggacctggaagaagaggcaagcctcgaaccaaaggcagctgtgcagaaggagctgtcggacatggattacctgaaatccaagatggtgaaggctgggtcgtcctcttcctcggaggaagaggaaagtgaagatgaagccgtgcactgtgatgaagggagtgaggccgaggaagaggattcctccgccaccccagtcctgcaggaaagagacagcaggggtgcaggccaagagcaagggatgccagctgggaaaaagagaccaccggaggccagagccgagacagagaaaccagcaaaccagaaggaacccaccacctgccacaccgtgaagctgcggggagccccgttcaatgtcacagagaaaaatgttatggaattcctggcacccctgaaaccagtggccattcgaattgtgagaaacgctcatgggaataaaacaggatacatctttgtggatttcagcaatgaagaggaagtgaagcaagctctgaaatgcaaccgggagtacatgggtgggcgctacatcgaggtgttcagggaaaagaacgtccccaccaccaagggtgcaccaaagaataccaccaaatcctggcaaggccggatactcggggagaacgaagaggaggaggacctggccgaatccggaaggctctttgtacggaacctgccctacaccagcaccgaggaggatctggagaagctcttctccaaatacggtcccctgtctgagctccactaccccatcgacagcctgaccaagaaacccaagggttttgcattcatcaccttcatgttccctgagcacgctgtgaaggcctactcggaggtggacgggcaggtattccagggcaggatgctccacgtgttaccatctaccatcaagaaggaagccagcgaggatgccagtgccctgggatcgtcgtcctacaagaagaagaaggaggcccaggacaaagccaacagtgccagctctcacaactggaacacactattcatggggccgaatgccgtggccgatgccatcgcacagaagtacaacgccaccaaaagtcaagtgtttgaccacgagaccaagggcagcgtggccgtgcgcgtggctctgggggaaacccagctcgtccaggaagtgcggcgttttctcatagacaacggggtcagcctggattccttcagccaggctgcagcagagcgaagcaagactgtgattctggtcaagaacctcccggcaggcaccctggcggccgagctgcaggagaccttcggccgttttggcagcctgggccgcgtgctgctgccagagggcggaaccactgccatcgtggagttcctggagcccctggaggcccgcaaggccttcaggcatctggcctattccaagttccatcatgtccccctctatctggagtgggctccagttggcgtcttctccagcgcagccccacagaagaaaaagctccaagacacaccttcagaacccatggaaaaggacccagcagagccagaaacagtgcctgatggcgaaaccccagaagatgaaaatccaacagaggaaggagcagacaactcttcagcaaagatggaagaggaggaggaggaagaggaagaagaagaagagagcctcccaggatgtactctgtttattaagaatctcaattttgacacaacagaagagaagctgaaggaagtgttttcaaaagtggggacagtgaagagctgctccatctccaagaagaagaacaaagcaggagtgctcctttccatggggtttggatttgtggaatacaggaagccggagcaagcccagaaagctctcaagcagctccagggtcacgtcgtggacggccacaagctggaagtgaggatctcggaacgagccactaagccagccgtgacattggctcggaagaaacaagttcccagaaagcagaccacctccaagatcctggtgcggaacatccccttccaggcccacagccgggagatccgagagctcttcagcacctttggggagttgaagacggtccgcctgccaaagaagatgactgggacaggcacacacagaggcttcggctttgtggacttcctcaccaagcaggatgcgaagagagccttcaacgccctgtgtcacagcacccacttgtacgggcggaggctggtgctggagtgggccgactccgaggtgaccctgcaggccctgcggcggaagacggccgctcactttcacgagcccccgaagaaaaagcggtctgtggtgttggacgagatcctggagcagctggaaggcagtgacagcgacagcgaggagcagacccttcagctgtgagctggcaccgagaggggctgctgagctagaattcccacctatgtctttccaagggactgttcacggcttgggacttggtctctgtcctgccccatcctcgtcacttgggaccacgagccctggttcagtcacccagggaagcctcccagcggctcatgaagcatcgagctccaagcccagatgccaagctccctggctgagctgaatgatgtcactcatggtggacgcgttctgctcacgggcccagagccctgtgaaatgcatcaaggtcctctccgctggccagcagcatccccaggcttctctcaggcgcccgtgttcacattttctccagcctgagacgcagcctcccgcctggaagggcctgtgccagcaccaggcagagggcaagacggagagggcagagcaagaactgcactgcatctcactgcagtctgaatctagacatcgccattccccgaggtgcgacctcagactaatgacatcctggctgagcctctgtttttctctctaggaaatgggggtgataattgtgcctacctcagatagacagtgccagaattaagtgagtcaagccaagtaaagcccagagaagattctcatcaaaaaaaaaaaaaaaaaaaaaaaa

SEQ ID NO: 25376 - DNA, 1861 bp, Homo Sapiens
gccggacggagggtggagggccctgcgcctgcgcggagctggagtccggctgggccgcagccgctgggagaccggcggttgccgtggggaccggtcgggcccctccctcctccggtcccccgccccaggcccttccccaccgagacgcgccggcggaccgcgggcgagtgcagccggtgacccggcgagaggcggcgccgctcccaagatgtcgcagacggccatgtccgaaacctacgattttttgtttaagttcttggttattggaaatgcaggaactggcaaatcttgcttacttcatcagtttattgaaaaaaaattcaaagatgactcaaatcatacaataggagtggaatttggttcaaagataataaatgttggtggtaaatatgtaaagttacaaatatgggatacagcaggacaagaacgattcaggtccgtgacgagaagttattaccgaggcgcggccggggctctcctcgtctatgatatcaccagccgagaaacctacaatgcgcttactaattggttaacagatgcccgaatgctagcgagccagaacattgtgatcatcctttgtggaaacaagaaggacctggatgcagatcgtgaagttaccttcttagaagcctccagatttgctcaagaaaatgagctgatgtttttggaaacaagtgcgctcacaggggagaatgtagaagaggcttttgtacagtgtgcaagaaaaatacttaacaaaatcgaatcaggtgagctggacccagaaagaatgggctcaggtattcagtacggagatgctgccttgagacagctgaggtcaccgcggcgcgcacaggccccgaacgctcaggagtgtggttgttaggagagcacacaggtgttcatacagtggcatttgggacacaatcgttggaacctgaagaatctgaagttttttttaccaccatctttttctactctgtatggaagtagatctttatggggaaaagagaatttggggtgttctgcaagccagtcaaagtggcacagcaaatcatataaatcgaattaaatggacaacaccgttagatgtgtatgtaaaaattttctgtttcatatttttcctttcactttcggtttaaaacatgctatatgtactgtatgtcctgtagcccagtgcggctccacagcatggaatctgatgtatgatatgatagaatgtggcactaaatgcagtttcagattttattttttttaatcatatgaactaaaattgtcaattgtgaggtgtgcttttctcatcatgttggttatattgcacaattggttatatttatgacctgatattcaaagactctggcattgatagccagtgtgttttcttatttaactccgtttactacattctacatggtgtttacgtgatccacacttgaaatactagatcagtagacattcactaatataccaaaataaaatgaaaaattgagtttttccgtgaactttatactgtccagctctgttgattttaaagcctcttcatccaggtcagttcaggaagtatatctggagtacctgctctgtttttggctgtgagactagcactaaggattctggtacctttacccaaacctactgggctactaatacttctctcagcagttgatcaaatacaatagaccatgtaagctggggccgctcatccacttccagtttgctggtctccctgctagaaaacacattgtactgtgctttttctggaattcagtataatggcatcactgcctgtttttcacatcttttgtttcctgttcattttaaggaaacctactaaatccagttaatattaaatggacaccactcaaaaaaaaaaaaaaaaaaa

SEQ ID NO: 25377 - DNA, 2661 bp, Homo Sapiens
gcgaggtgaacagcaccgactgggacagcaagatgggcttctgggcgccgttggtgctgagccacagccgccgccagggggtggtgcgcctgcgtctgcgggacttgcaggaggcctttcagcgcaaggggagcgtcccgctggggctggccacggtgctgcaggacctgctgcgtcgaggggagctgcagcgggagtcagacttcatggccagtgtagacagcagctggatctcctggggggttggggtcttcctgctgaagcctctcaagtggactctttctaacatgctgggagataataaggttccagctgaggaggtccttgtcgctgtggagctgttgaaggaaaaggctgaggaggtgtatcgtctgtatcagaactcgcccctctcctcccaccccgtggtggccctgtcagagctcagcaccctctgtgctaactcctgcccagatgagaggaccttctacttggtgttgctgcagctgcagaaggagaagagggtcacagtcctcgagcagaacggggagaagattgtgaagtttgcccgagggccacgtgccaaggtctctccagtcaatgacgtagatgttggggtgtaccagctgatgcagagtgaacagcttctctcacgcaaagtggagtccttatcccaggaagcagagaggtgtaaagaagaagcccgccgggcatgccgagcaggaaagaagcagctggcactgaggtctctcaaggccaagcaacggacagagaagcgcatcgaggccttgcatgccaagctggacactgttcaaggcatcctggaccggatctatgcctcccagacagatcagatggtttttaacgcctaccaggctggggtaggagcactcaaactctccatgaaggatgtcacagtggagaaggcagagagcctcgtggatcagatccaagagctctgtgacacccaggatgaagtttctcagactctggctggtggggtaacaaatggcttagattttgacagtgaagaactggagaaggaattggacatcctccttcaggataccaccaaagaacctttggatctgcctgacaacccccgcaataggcattttaccaacagcgtgcctaaccctaggatctcagatgctgaacttgaagctgaacttgagaaactgtccttatcagagggaggtttggtcccaagcagtaaatctccaaaaaggcaattggaaccgactctaaagccattgtaggaccctcaagtgaaggaccctcatgtaaaagagagaccaggcctgctgggtgtgtacatagttatttaaacaagaaactctcagaatgtgtttggaagaggagaaaggagaaccactgattttatctggatgctactacttactacaggacagatagaatttctggaagcgatgctccaaaggcttgctcccagctgtatcatggacctgccttctcatctttatagtgccacgatttatacagtcctgtgtctgacctgtcatttcatagcctgcagttcttgccattggcacacttagatttgtcttcacccaccagcttcgttccagcccatgaaggggaaagatttgcagctttgccaaatctgaatcagttcccactcccccctgtggttttttagaggggtttatcctgtcgctaatgtcagttaaatagcttattcctgtcccacttgatttcactggtaagaatgagaatgaaatacttaaaggttttatttgaggggacttagctgccattttatggaaaaacatgtagtataaaaggtttttctccagggtcatttgacagaattctccaggtgttcagagaaagaggtcgccccaagtggcccagagtcgtgacagtccggaggggctggtgtggccggtgggcgctgcctcttcatctgatggagccaggaggtccgccggtgggggaaaggcttcttccgaggcttctgcactcgcctgggaagaggcccagtcactacaggaccctgagatgtccagaccccttatgcaaagaggcaaaattgttgccttggccccatcatggagtaacttaaaaatacatatctatcttccagaacaagccacacaacaacacacctcccctccttgagcctggcacacagcaccgggctctctgaatttggaaagtgtttcattttgtggcctactgctcggggcaggggggctgagccaggatgtgcaatagaagcaggggttgtcccctctgccagatctgtggggagctgcccaggccacccgtgcacctgtcctgcttcctgcagtccccactccctgcctcctttgagggactgggggacttggggtagggggacagacgggaaagggtctgaatgctctggcaatggcgagaagaagcgatcgccacactgccactctgctgcccagccaccaggatttctgcctggagccctttgccctgtccctgctgcctgaggtggcgtagagcagaggagaagaatttgctccaggccaggagcacaaatcgttgttcaatgaatttctctccaactcgaccttggtaaacggaaatgttgggggtgaagagaaacaatcactatttttttcttttttatctggtaaataattaaaagaaaaaccgaaaaaaaaacaaaaaaaaaaaaaaaaaaaa

SEQ ID NO: 25378 - DNA, 1975 bp, Homo Sapiens
cccacacccaagtgagcggcctgctcactcctcagctgcaggagccagacgtgtggagtcccagcagaggccaacctgtgtctcttcatctccctgggaaaggtgcccccgaggtgaaagagatggcctggtggaaatcctggattgaacaggagggtgtcacagtgaagagcagctcccacttcaacccagaccctgatgcagagaccctctacaaagccatgaaggggatcgggaccaacgagcaggctatcatcgatgtgctcaccaagagaagcaacacgcagcggcagcagatcgccaagtccttcaaggctcagttcggcaaggacctcactgagaccttgaagtctgagctcagtggcaagtttgagaggctcattgtggcccttatgtacccgccatacagatacgaagccaaggagctgcatgacgccatgaagggcttaggaaccaaggagggtgtcatcattgagatcctggcctctcggaccaagaaccagctgcgggagataatgaaggcgtatgaggaagactatgggtccagcctggaggaggacatccaagcagacacaagtggctacctggagaggatcctggtgtgcctcctgcagggcagcagggatgatgtgagcagctttgtggacccaggactggccctccaagacgcacaggatctgtatgcggcaggcgagaagattcgtgggactgatgagatgaaattcatcaccatcctgtgcacgcgcagtgccactcacctgctgagagtgtttgaagagtatgagaaaattgccaacaagagcattgaggacagcatcaagagtgagacccatggctcactggaggaggccatgctcactgtggtgaaatgcacccaaaacctccacagctactttgcagagagactctactatgccatgaagggagcagggacgcgtgatgggaccctgataagaaacatcgtttcaaggagcgagattgacttaaatcttatcaaatgtcacttcaagaagatgtacggcaagaccctcagcagcatgatcatggaagacaccagcggtgactacaagaacgccctgctgagcctggtgggcagcgacccctgaggcacagaagaacaagagcaaagaccatgaagccagagtctccaggactcctcactcaacctcggccatggacgcaggttgggtgtgaggggggtcccagcctttcggtcttctatttccctatttccagtgctttccagccgggtttctgacccagagggtggaaccggcctggactcctcttcccaacttcctccaggtcatttcccagtgtgagcacaatgccaaccttagtgtttctccagccagacagatgcctcagcatgaagggcttggggacttgtggatcattccttcctccctgcaggagcttcccaagctggtcacagagtctcctgggcacaggttatacagaccccagccccattcccatctactgaaacagggtctccacaagaggggccagggaatatgggtttttaacaagcgtcttacaaaacacttctctatcatgcagccggagagctggctgggagcccttttgttttagaacacacatccttcagcagctgagaaacgaacacgaatccatcccaaccgagatgccattaacattcatctaaaaatgttaggctctaaatggacgaaaaattctctcgccatcttaataacaaaataaactacaaattcctgacccaaggacactgtgttataagaggcgtgggctcccctggtggctgaccaggtcagctgccctggccttgcacccctctgcatgcagcacagaagggtgtgaccatgccctcagcaccactcttgtccccactgaacggcaactgagactgggtacctggagattctgaagtgcctttgctgtggttttcaaaataataaagatttgtattcaaaaaaaaaaaaaaaaaaaaaaa

SEQ ID NO: 25379 - DNA, 1829 bp, Homo Sapiens
tgcaagaccgtgtaaatgagctccaggaggaagcccaggaggctgatgcctgccaggaggagctggcactgaaggtggaacagttgaaggctgagctggtggtcttcaaggggctcatgagtaacaacctgtcggagctggacaccaagatccaggagaaagccatgaaggtggatatggacatctgccgccgcatcgacatcaccgccaagctctgcgatgtggctcagcagcgcaactgcgaggacatgatccagatgttccagaagctggtcccatccatgggggggcggaagcgggagcgcaaggctgccgtcgaggaggacacctccctgtcggagagtgaggggccccgccagcccgatggggatgaggaggagagcacagccctcagcatcaacgaggagatgcagcgcatgctcaaccagctgagggagtatgattttgaggacgactgtgacagcctgacttgggaggagactgaggagaccctgctgctttgggaggatttctcaggctatgccatggcagctgcagaggcccagggagagcagcaggaagatagcctggagaaggtgattaaagatacggagtccctgttcaaaacccgggagaaggagtatcaggagaccattgaccagatagagctggagttggccacggccaagaacgacatgaaccggcacctgcacgagtacatggagatgtgcagcatgaagcgcggcctggacgtgcagatggagacctgccgccggctcatcacccagtctggagaccgaaagtctcctgctttcactgcggtcccgcttagcgacccgccgccgccgccaagcgaggctgaggactccgatcgcgatgtctcatctgacagctccatgagatagagacctgcctcccccttgcacccgaggccctcgcagcagggagctcagcgaggcagagggtggggctgcacagaggggaacatcagctgcagctctgcaccaggccggtccctggggactggggcgctcctccctcaggctttctccctcagtcttggcttctccagggctctggggtgtctggagctaggcttggccctaccattctggggccatttccaccacagttggggctctcctgccttcacgcgtgggtgtctgctacttccccatctttaaaatgctgccagagcgattgcggcccctcaccttgtccacgtatcaggaatgtgaatgtgggacctttcctccatccctgttgtccggagccagctcactgtcttccacactggtgctaactggcccaggcactggagtggaatagaatgcagctggaggctacgcatggcctctgcagcacacgcagctggagagggcttctgtccctgtcagcggcagagggcgttggggctggccggggcaccttgtccctgctatggtccacatgctcacgctgtccacctgccaggtggagtgtatgtggctgtggccctccctcgtggaggtgccgtgctttaaagaggccttagtgcccgggatgggcacagtgttttgaagggaggtgggagctcttgctctcctggtcactgcagaatgacagagaaggtgaagctccatgcatgtgtgcgcgggtgtatgtgcgctcagggtctctgtttaagtatcagctaaagatgtgcttcctccgtgtctgtcatacactgagaccaacaggctacagtgtccctgattcttggaaaagcctggagaagctggggagatgcggttcacaatgcctcggtataggaggctgtgttgagctgacattcaaatggattctttaataataaaaaaaaaaaaaaaaaa

SEQ ID NO: 25380 - DNA, 2451 bp, Homo Sapiens
ctgcatgcaggtgggctgtaacaaggtgtacacgagcacgtctgacgtgatgacccacgagaacttccacaagaagaatacccagctcattaacgacggcttccagcgcttccgagccaccgaagactgtggcacagccgactgccagttctacggacagaagaccacgcacttccactgcaggcgccccggctgcacattcactttcaagaacaagtgtgacatcgagaagcacaagagctaccacatcaaggacgatgcctacgccaaggacggcttcaagaagttctacaagtacgaggagtgcaagtacgagggctgcgtgtacagcaaggctaccaaccacttccactgcatccgcgccggctgcggcttcaccttcacctccaccagccagatgacctctcacaagcgcaagcatgagcgccggcacatccgctcctcgggcgcgctggggctgccgccctcgctgctgggcgccaaggacacggagcacgaggagtccagcaacgacgaccttgttgacttctccgccctgagcagcaagaactccagcctgagcgcctcccctaccagccagcagtcctctgcgtccctggctgccgccactgccgccaccgaggctgggcccagtgccaccaaacctcccaacagcaagatctcggggctgctgccccagggcctgcctggctcaatccccctggccctggccctctccaactcgggcctgcccacccccacgccctacttccccatactggctggccgtgggagcacctccctgcctgtgggcacccccagcctcctgggtgccgtgtcgtctgggtcagcagcctcagccacccctgacacacccacgctggtcgcctcgggagctggagactcagcccccgtggctgccgcctctgtcccggcaccacccgcctccatcatggagaggatctctgcaagcaagggcctcatctcgcccatgatggccaggctggctgcagctgccctcaagccctctgccacctttgacccaggaagcgggcagcaggtcaccccagccaggttccccccggcccaagtgaagccggaacccggtgagagcaccggcgccccaggcccccacgaagcctcccaggaccgcagtctagacctgactgtgaaggagcccagcaacgaatcaaatggccacgcagtcccggcaaattcatctcttttatcctcgcttatgaataagatgtctcagggcaaccctggcctgggcagcctgctgaacatcaaggcggaagcggaggggagccccgctgcggagccctcgcccttcctaggcaaggccgtgaaggcgctggttcaggagaagttggcagagccctggaaggtgtacctgcgcaggtttggtacaaaggacttctgtgacggccagtgtgacttcctccacaaggcccacttccactgcgtggtggaggaatgcggcgcgctcttcagcaccttggacggggccatcaagcacgcaaacttccacttccggacagagggaggagcagcaaaaggaaacacagaggctgcctttccggcctcggccgccgagaccaaacctcccatggccccctcgtcccctccggtccctcctgtcaccacggccacggtgtcctctctggaggggcccgctcccagcccggcctccgtgccctccacccccaccctgctcgcctggaagcagctggcttccaccataccccagatgcctcagatcccagcgtcagtgcctcacctgcccgcctcgcccttggcaacgacttctctagagaacgccaagccccaggtcaaacccggattcctccagttccaggagaagtgagtccctcgatgagccgggagtcccgcgttcccctcgcgtctcgggagtaggtgctagcaagggcgctaggaggccctgttcctcactgcggatggtgctgctgtccccagcctctctggggcatggccatcgggtgatgtccttctagccaaagatgctgctgctcctacctcactgcctgtcccagagcaggccagcccgcgtgggccgatggtggcggcagtggctactgctcctgcagggcatgtggtgatcctgccagggccaggtggggtggactgggcgtggtggtcctcagaggacaactcccagcctgacaaggagggctgcgtctccctccgagcctccgtattggcctcctctgtggctcacacccatggctgaatctctgcagggcacgtgaagtcacgggtaggggccaggcccctccaggccgtcactggcctgcacagtggtctgagctcttgggtggaagggaccctcctcactggatggtggtggctccttgcagggagaacggtgactttgtattgtcatgtgtgcggcttcctgttctcaataaaagtaataaattggaaaaaaaaaaaaaaaaaaaaaaaaaaaaa

SEQ ID NO: 25381 - DNA, 2213 bp, Homo Sapiens
caggctcatagccccaagcccggaggaggtggctacattgtgtctattgtatcccttggctggtgtatttgtacatctctcgggacgtgaaattgacagtgaaaagtatggcagatgagcaagaaatcatgtgcaaattggaaagcattaaagagatcaggaacaagaccctgcagatggagaagatcaaggctcgtttgaaggctgagtttgaggcacttgagtcagaggaaaggcacctgaaggaatacaagcaggagatggaccttctgctacaggagaagatggcccatgtggaggaactccgactgatccacgctgacatcaatgtgatggaaaacactatcaaacaatctgagaatgacctaaacaagctgctagagtctacaaggaggctgcatgatgagtataagccactgaaagaacatgtggatgccctgcgcatgactctgggcctgcagaggctccctgacttgtgtgaagaagaggagaagctttccttggattactttgagaagcagaaagcagaatggcagacagaacctcaggagccccccatccctgagtccctggccgctgcagccgctgccgcccaacagctccaagtggctaggaagcaggatactcggcagacggccaccttcaggcagcagcccccacctatgaaggcctgcttgtcatgtcaccagcaaattcaccggaatgcacctatatgccctctttgcaaggccaagagtcggtcccggaaccccaaaaagccgaaacggaagcaggatgaataaagaaagggagagcacatgaagctttgctaattataacccctcaccttgaccagagtcattgatgtcctgatgtgaaacaacccttgcccaaccccacgaagtctcctatttaatgtgatggaagcacaacccctctctcactttgctcctatttctttctgctcttgggatttctggtttaggaagagatgtggttcaggtgctaaacagtgtgtctgatgatcccttctctcccactcacatttcaacccctgcccttgtttggagctaagggaagggcaaaaggctcagatatgattctctatctcttgtgcctgaggcctggagcctaaggagctgtagggtctgaggggcaggggaggcccatatcttgtttcaggtaaaggacccagtatttcccctccttgtacttttgccttaggttctcaagggacaatagtcttcatgttggattctccaacaggctgggtgcatgtatccccctactcctaccctcatctcatccttaaggcccagaggtagcttggacaagccctccttttcataatcatttgggaggcatggctgtaattctttagctttctccacttctgtctcccacatatactaaaattcttaggtactaggctgtgtgtcttgggatcttaagatcaatgaacctttccccaatatctagtctttgcaaattctagtagaagatttccacagtgaaatcagtgagccagaccaactctacatctcctgcctaacctactgcctaagtcattagggctgagggctcggctgtaggggcttccttaggctgagagtgcccccaggctgacatctgtgttggcttttgttcagaaccattactctggcacatgctcaatggtatattgcagggaggagaggagtagatttagatttgagtaaatgccaatcactttacacatgaaggtgggtgggactttccttccattcatcccttgctctcttggatctgaactcttctggagcctcagctcaggatagctgctggccactcctgtcctgtggattgtgcaggtggcctttcctcccaaaagaaaaggcatcaggctccccaagccccacagctctcctttccaccaaagccaggtttcctggtaaggtcactcgaagataagggatggggatgggggctgactgacaaaaaattttagccccaggtctcagtacctggctggggagggggatatttttccttccttaagtagttttacattgccacagtgtgtatgtgttcactatataaaatgttcctctgctctttgaaagtaagagtgttgtgtctgtacaaatccttttaacatgcattcattggagtaaattctgagtatctactgtgtattggataatacaaaagatgtaatgtcaaaaaaaaaaaaaaaaaaaaaaaaaaaaaaaaaa

SEQ ID NO: 25382 - DNA, 1834 bp, Homo Sapiens
cgcagccgccacgccggggccgccgagatcgggtgcccgggatgagcctcatccggaaaaagggcttctacaagcaggacgtcaacaagaccgcctgggagctgcccaagacctacgtgtccccgacgcacgtcggcagcggggcctatggctccgtgtgctcggccatcgacaagcggtcaggggagaaggtggccatcaagaagctgagccgaccctttcagtccgagatcttcgccaagcgcgcctaccgggagctgctgctgctgaagcacatgcagcatgagaacgtcattgggctcctggatgtcttcaccccagcctcctccctgcgcaacttctatgacttctacctggtgatgcccttcatgcagacggatctgcagaagatcatggggatggagttcagtgaggagaagatccagtacctggtgtatcagatgctcaaaggccttaagtacatccactctgctggggtcgtgcacagggacctgaagccaggcaacctggctgtgaatgaggactgtgaactgaagattctggattttgggctggcgcgacatgcagacgccgagatgactggctacgtggtgacccgctggtaccgagcccccgaggtgatcctcagctggatgcactacaaccagacagtggacatctggtctgtgggctgtatcatggcagagatgctgacagggaaaactctgttcaaggggaaagattacctggaccagctgacccagatcctgaaagtgaccggggtgcctggcacggagtttgtgcagaagctgaacgacaaagcggccaaatcctacatccagtccctgccacagacccccaggaaggatttcactcagctgttcccacgggccagcccccaggctgcggacctgctggagaagatgctggagctagacgtggacaagcgcctgacggccgcgcaggccctcacccatcccttctttgaacccttccgggaccctgaggaagagacggaggcccagcagccgtttgatgattccttagaacacgagaaactcacagtggatgaatggaagcagcacatctacaaggagattgtgaacttcagccccattgcccggaaggactcacggcgccggagtggcatgaagctgtagggactcatcttgcatggcaccaccggccagacactgcccaaggaccagtatttgtcactaccaaactcagcccttcttggaatacagcctttcaagcagaggacagaagggtccttctccttatgtgggaaatgggcctagtagatgcagaattcaaagatgtcggttgggagaaactagctctgatcctaacaggccacgttaaactgcccatctggagaatcgcctgcaggtggggccctttccttcccgccagagtggggctgagtgggcgctgagccaggccgggggcctatggcagtgatgctgtgttggtttcctagggatgctctaacgaattaccacaaacctggtggattgaaacagcagaacttgattcccttacagttctggaggctggaaatctgggatggaggtgttggcagggctgtggtccctttgaaggctctggggaagaatccttccttggctctttttagcttgtggcggcagtgggcagtccgtggcattccccagcttattgctgcatcactccagtctctgtctcttctgttctctcctcttttaacaacagtcattggatttagggcccaccctaatcctgtgtgatcttatcttgatccttattaattaaacctgcaaatactctagttccaaataaagtcacattctcaggtaaaaaaaaaaaaaaaaaa

SEQ ID NO: 25383 - DNA, 1248 bp, Homo Sapiens
ggcggcggcggcggaggctgccatggacgacgaggaggagacgtaccggctctggaaaatccgcaagaccatcatgcagctgtgccacgaccgtggctatctggtgacccaggacgagcttgaccagaccctggaggagttcaaagcccaatttggggacaagccgagtgaggggcggccgcggcgcacggacctcaccgtgctggtggcccacaacgatgaccccaccgaccagatgtttgtgttctttccagaggagcccaaggtgggcatcaagaccatcaaggtgtactgccagcgcatgcaggaggagaacatcacacgggctctcatcgtggtgcagcagggcatgacaccctccgccaagcagtccctggtcgacatggcccccaagtacatcctggagcagtttctgcagcaggagctgctcatcaacatcacggagcacgagctagtccctgagcacgtcgtcatgaccaaggaggaggtgacagagctgctggcccgatataagctccgagagaaccagctgcccaggatccaggcgggggaccctgtggcgcgctactttgggataaagcgtgggcaggtggtgaagatcatccggcccagtgagacggctggcaggtacatcacctaccggctggtgcagtagctaccgcctgacagcccctagaggcggacacacagcgacccccatccctgcaggacaaacgcccctgccctgccagaatccggcccccacagctctcacggctgctgctcctctggactccccaaggcaggtggcctccacccacgttctcccgtcctggggtgaggcttcctgtggcccagcccgccccattcacctgtggatttgtgcgagatgcagcctcagaaggaacaaggcccccagagggaggtcacctgggggcagctggtgccgggtcttcacccagaccacgctgggtcccctctgttgggggtttggggtccgggtctcccaccagccactgcttcctcctgggccctcggccttccacccctcgtcttccctccctcgggggccctgatgcgtggcggcccccacccggcctcggctctttactccattcacagccgtgcacgcgctcaagccaccagggtgcgagatgccagctctggagttctcggttgttgtaggaggttgggtgttttcaaatggtaaagatgttttgagcaaataaatttgcttgatacagaaaaaaaaaaaaaaaaaaaaaaaaa

SEQ ID NO: 25384 - DNA, 1066 bp, Homo Sapiens
cggttcgctcggccgcggtcgctatggaggagccggagatgcagctcaaggggaagaaagtcacggacaagttcactgagagcgtctacgtcctggccaacgagccatccgtggccctgtaccggctgcaggagcatgtgcgtcgctccctccccgagctggcccagcacaaggcagacatgcagcgttgggaggagcagagccagggagccatctacactgtggagtacgcctgcagcgccgtgaagaacctggtggacagcagcgtctacttccgcagcgtggagggtctgctcaaacaggccatcagcatccgggaccatatgaatgccagtgcccagggccacaggtagctcctgggaccgcccgcccccactgccactcccagctgcaaggaccgtctctcagctgcgctgggaaccgctgcttctcgcttattagaaaactgtctctttccttttgtcctggtgtctggtgacctcctcttgtcctgtggcatctataacctgagttcagtcacttaataccgaggtcctgcgctctgctgtgtgcctggccctgggctgggcactggggacatagcagtgaccgagacagacaggctcacaaggagacatacgacaaccaggtaaacatggcagacaagagcatgtcagatgcgctgtgaagaacactgcggggcccctcctaggaggtggcatgagttacatgcagacagagacgatccgggggcagacggagttccatgtggggcagtggtgagggcagacgctctggggctgggatccctgggagtgttcgagaagcaccgagaaggcttctgtggctggagccggccagctgggggagatggggccagggagatggcaggggcctctccctgtcccaggacccagagccaagggaggctttaagcccaggaccaggggtctgaaaacgaaaagcactcacagtccttgaacattggaaagagaatttttgaagagtagcccttctttttgtttttgttggcattctaagttaataaacacgcttatgaacacaaaaaaaaaaaaaaaaaaaaaaa

SEQ ID NO: 25385 - DNA, 2989 bp, Homo Sapiens
gaccccctagtaacagaggcggtggctactgctgcggccactgggtttcggcctcttcccagcagcggctctaagaagcgcagcggaactcgaccggatccaacccagttagttacttcctgtctagagttgtagcttccacctgcaccttctagccaccatggcaacctcatctgaagaagttttgctgattgtaaagaaagtgcgtcaaaagaagcaggatggagctctgtacctcatggcagaaagaattgcttgggcacctgaaggcaaagatagatttacaatcagccatatgtatgcagatattaaatgccagaaaattagtccagaaggaaaagctaaaattcagcttcagctggtcctacatgcaggggacacaactaacttccatttttccaatgaaagcacagcagtgaaagagcgagatgcagtaaaagaccttcttcagcagctgctgcccaaattcaagaggaaagcaaataaagaactggaagagaagaacagaatgctgcaagaagatcctgttttgtttcagctttataaagaccttgttgtgagtcaagtgatcagtgctgaggaattctgggccaatcgtttaaatgtgaatgcaacagatagttcttccacatccaatcataagcaggatgttggcatttctgctgcatttctggctgatgtccggccccaaactgatggctgtaacggtctaagatataatttaacttctgatatcattgagtccatatttaggacctatccagcagtaaaaatgaaatatgcagaaaatgttccccacaacatgacagagaaggaattctggacacgttttttccagtcccattattttcacagggatcggctgaatacagggtcaaaggatctctttgcagaatgtgccaaaatagatgaaaaaggcctaaaaacaatggtttcattaggagtgaaaaacccactactagatttaacagctttggaagataaaccattagatgagggctatggcatttcctctgtgccatctgcttccaattctaaatccataaaagagaatagtaatgctgccatcatcaagagatttaaccatcacagtgccatggtcctggcagctggactcagaaaacaagaagcacaaaatgaacaaactagtgagcccagcaacatggatggaaattccggagatgcagactgctttcagccagcagtcaaaagggcgaaattacaagagtccattgaatatgaagacttggggaaaaataattctgtaaaaacgattgcactaaacctcaagaagtcagataggtattatcatggtccaactccaatccagtcactacagtatgcaacaagtcaggacattattaattcttttcaaagtattagacaagaaatggaagcttatacacccaagttaactcaggttctctcaagtagtgctgccagtagtaccatcacagcactgtcacctggaggggcacttatgcagggaggaacacagcaagccataaaccagatggtgccaaatgatattcaatctgaattgaaacacttatatgtagctgttggagaacttctacgacatttctggtcctgctttcctgttaatacgccattcctagaagaaaaggtagtgaaaatgaaaagtaatttggaacgattccaagttacgaagctctgtccattccaagaaaagattcggagacagtatttaagcacaaatttggtaagtcacatagaagagatgctccagacagcctacaacaagctccacacatggcagtcacggcgtctgatgaagaaaacgtgaggtggccatgatgcttacaggttttgtgagattgagagaactatgacctgcagcaactctggaaacctggcctgacagacaagcagatgacctcacaggagtgataagaaacatctgctccacgccaactcccagagctgatgctattgtacttgcacattggagactgaaaggaaagaagggactaaatgctggggaggtaaattaagacagaaccaaatgagctaagttgcaaatatatatatatacacacacacacatatatgtacatgtgtatgtacatatatattttaaaagactgtttactgcagttgctcaggaactgcttttgattcacattaagctgctttcagaaattaaaaaaacactttttaaagggtgcattgataaaatctgaggttttttggttgtcgtttttttctgtgtacatttttttcctaagtttatggcacagggtagaccttaagtattcctcctccatccttcattcttcaccctccattggatcctcaagttttaatgaattccaattataccttacatcagcaagttaaaaaaagtactttaaaataaagcaaagggagactgttgctcaaccatcaggaaacagttgtcagaagacatcattggttctgtgtttcctacggaaataagaaacgataaatattgcactgaatgtttgtggtttggagtccctgaataataaagagggaatatatttgcagaaagtcgcatagggttttttaatgcagaattttgtcagaagacaatggcgctgcatgtttttctttgagtgcaaatgtacattgctaagatttttttaagatggcatgtgctttgaaaagaagatattgcatttttaagagtttaaaaatcttatgagtgagaaatattaaaaaaatcttattttcacctctttagaagaaataaaagatgtttctcctatctccttttctctagtatttgactgttactgtccttggcgaatcgataatcattgcatagtgactgaaaagcctaagtgcaaaaaaaaaaaaaaaaagatgttcttgtttctgaacttcgtgccatattttgttcctgatgggatcaacttaatgtttaagactttagatgtcttgtattaaaaattacacaaaaaaagtaaaactttttatacttaaaaaaaaaaaaaaaaaaaaa

SEQ ID NO: 25386 - DNA, 2125 bp, Homo Sapiens
gcagtggccacgagaggcaggctggctgggacatgaggttggcagagggcaggcaagctggcccttggtgggcctcgtcctgagcactcggaggcactcctatgcttggaaagctcgctatgctgctgtgggtccagcaggcgctgctcgccttgctcctccccacactcctggcacagggagaagccaggaggagccgaaacaccaccaggcccgctctgctgaggctgtcggattaccttttgaccaactacaggaagggtgtgcgccccgtgagggactggaggaagccaaccaccgtatccattgacgtcattgtctatgccatcctcaacgtggatgagaagaatcaggtgctgaccacctacatctggtaccggcagtactggactgatgagtttctccagtggaaccctgaggactttgacaacatcaccaagttgtccatccccacggacagcatctgggtcccggacattctcatcaatgagttcgtggatgtggggaagtctccaaatatcccgtacgtgtatattcggcatcaaggcgaagttcagaactacaagccccttcaggtggtgactgcctgtagcctcgacatctacaacttccccttcgatgtccagaactgctcgctgaccttcaccagttggctgcacaccatccaggacatcaacatctctttgtggcgcttgccagaaaaggtgaaatccgacaggagtgtcttcatgaaccagggagagtgggagttgctgggggtgctgccctactttcgggagttcagcatggaaagcagtaactactatgcagaaatgaagttctatgtggtcatccgccggcggcccctcttctatgtggtcagcctgctactgcccagcatcttcctcatggtcatggacatcgtgggcttctacctgccccccaacagtggcgagagggtctctttcaagattacactcctcctgggctactcggtcttcctgatcatcgtttctgacacgctgccggccactgccatcggcactcctctcattggtgtctactttgtggtgtgcatggctctgctggtgataagtttggccgagaccatcttcattgtgcggctggtgcacaagcaagacctgcagcagcccgtgcctgcttggctgcgtcacctggttctggagagaatcgcctggctactttgcctgagggagcagtcaacttcccagaggcccccagccacctcccaagccaccaagactgatgactgctcagccatgggaaaccactgcagccacatgggaggaccccaggacttcgagaagagcccgagggacagatgtagccctcccccaccacctcgggaggcctcgctggcggtgtgtgggctgctgcaggagctgtcctccatccggcaattcctggaaaagcgggatgagatccgagaggtggcccgagactggctgcgcgtgggctccgtgctggacaagctgctattccacatttacctgctggcggtgctggcctacagcatcaccctggttatgctctggtccatctggcagtacgcttgagtgggtacagcccagtggaggagggggtacagtcctggttaggtggggacagaggatttctgcttaggcccctcaggacccagggaatgccagggacattttcaagacacagacaaagtcccgtgccctgtttccaatgccaattcatctcagcaatcacaagccaaggtctgaacccttccaccaaaaactgggtgttcaaggcccttacacccttgtcccacccccagcagctcaccatggctttaaaacatgctctcttagatcaggagaaactcgggcactccctaagtccactctagttgtggacttttccccattgaccctcacctgaataagggactttggaattctgcttctctttcacaactttgcttttaggttgaaggcaaaaccaactctctactacacaggcctgataactctgtacgaggcttctctaacccctagtgtcttttttttcttcacctcacttgtggcagcttccctgaacactcatcccccatcagatgatgggagtgggaagaataaaatgcagtgaaaccctaaaaaaaaaaaaaaaaaaaaaa

SEQ ID NO: 25387 - DNA, 1223 bp, Homo Sapiens
gtttacttcaaccacgtggagcttccatggcggcctctcaggtcctgggggagaagattaacatcctgtcgggagagactgtcaaagctggggacagggacccgctggggaacgactgtcccgagcaagataggctcccccagcgctcctggaggcagaagtgtgcctcctacgtgttggccctgaggccctggagcttcagtgcctcactcacaccggtggccctgggcagtgcccttgcctacagatcccacggtgtcctggatcccaggctcttggtgggttgtgccgtggctgtcctggctgtgcacggggccggtaatttggtcaacacttactatgacttttccaagggcattgaccacaaaaagagtgatgacaggacacttgtggaccgaatcttggagccgcaggatgtcgtccggttcggagtcttcctctacacgttgggctgcgtctgtgccgcttgcctctactacctgtcccctctgaaactggagcacttggctcttatctactttggaggcctgtctggctcctttctctacacaggaggaattggattcaagtacgtggctctgggagacctcatcatcctcatcacttttggcccgctggctgtgatgttcgcctacgccatccaggtggggtccctggccatcttcccactggtctatgccatccccctcgccctcagcaccgaggccattctccattccaacaacaccagggacatggagtccgaccgggaggctggtatcgtcacgctggccatcctcatcggccccacgttctcctacattctctacaacacactgctcttcctgccctacctggtcttcagcatcctggccacacactgcaccatcagcctggcactccccctgcttaccattcccatggccttctcccttgagagacagtttcgaagccaggccttcaacaaactgccccagaggactgccaagctcaacctcctgctgggacttttctatgtctttggcatcattctggcaccagcaggcagtctgcccaaaatttaaggggacaagtagctccccccacgacatgtctccctttcttagaatatattaaagtcagagtctctgaggaaggaatgtgatttggcagtcagggtactaagcatgggtgggaactcctgccttataaaaattgtttttgtgttcttaaagataaaaaaaaaaaaaaaaaaaaaaaaaaaa

SEQ ID NO: 25388 - DNA, 1889 bp, Homo Sapiens
cctgcgccccttctctcccaggcaacatgtcggaaggaaacgccgccggcgagcccagcacgccgggagggccccgacctctcctgactggggcccgggggctcatcgggcggcggccggcgcctcccctcacccccggccgccttccctccatccgttccagggacctcaccctcgggggagtcaagaagaaaaccttcaccccaaatatcatcagtcggaagatcaaggaagagcccaaggaagaagtaactgtcaagaaggagaagcgtgaaagggacagagaccgacaacgagaggggcatggacgagggcgaggccgtccagaagtgatccagtctcactccatctttgagcagggcccagccgaaatgatgaagaaaaaagggaactgggataagacagtggatgtgtcagacatgggaccttctcatatcatcaacatcaaaaaagagaagagagagacagacgaagaaactaaacagatcttgcgtatgctggagaaggacgatttcctcgatgaccccggcctgaggaacgacactcgaaatatgcctgtgcagctgccgctggctcactcaggatggctttttaaggaagaaaatgacgaaccagatgttaaaccttggctggctggccccaaggaagaggacatggaggtggacatacctgctgtgaaagtgaaagaggagccacgagatgaggaggaagaggccaagatgaaggctcctcccaaagcagccaggaagactccaggcctcccgaaggatgtatctgtggcagagctgctgagggagctgagcctcaccaaggaagaggaactgctgtttctgcagctgccagacaccctccctggccagccacccacccaggacatcaagcctatcaagacagaggtgcagggcgaggacggacaggtggtgctcatcaagcaggagaaagaccgagaagccaaattggcagagaatgcttgtaccctggctgacctgacagagggtcaggttggcaagctactcatccgcaagtctggaagggtgcaactcctcttgggcaaggtgactctggacgtgaccatgggaactgcctgctccttcctgcaggagctggtgtccgtgggccttggagacagtaggacaggggagatgacagtcctgggacacgtgaagcacaaacttgtatgttcccctgattttgaatccctcttggatcacaaacaccggtaaaatgagcaggtggaggaggacggcgcctgtgcccacggctgctgcctgctccagacattttgttcttgaatctgtgagacccagaaggggcccactgagcccactcactccagcctttggcaaccattgttccaggtcccccagggcttcctcccacagcagctgtgaatggcacagtgaccttcctgcagcgtggagatggcacatccttgctgctggggacttggccctgctatttatttttgtatttatgtcttaatctcttccactgatgcatcctccaagggtagatggggagggtctgtgtgaaggggctggcttctcttggtgcctgctgggttgcaggggcaggaagcgtgtggactgcagcttctgctggtgctccccccgtcctcctggaggcagtataggagagagagcaaggattgagtctgagacttaagcactcggtcccagcttgccagttcctggttctgtgtccttggacaaactacctaacctttctgagcctcctatacctcatccgacacaaatggggatgatacctacctccagggttggcgtgaggattcatgggctcttatagatgaaaactgcacaaggccagaaccagcaggcactcaataaacgttcatgtcctttttctctaaaaaaaaaaaaaaaaaa

SEQ ID NO: 25389 - DNA, 1263 bp, Homo Sapiens
tgtccctggaggaccacacctttgctgatgtcgtgcggctggtcagcaatgcctccatgctggtcagcatgcatggggcccagctggtcaccaccctcttcctgccccgtggggcaactgtggtagagctcttcccatatgctgtcaatcccgaccactacactccctataagacgctggccatgctgcctggcatggacctccagtatgtagcctggcggaacatgatgccagagaacacagtcacacaccctgagcggccctgggatcaggggggcatcacccatctggaccgggctgagcaagcccgtatcctgcaaagccgtgaggtcccacggcatctctgttgccggaaccccgagtggctcttccgaatctaccaggacaccaaggtggacatcccatccctcattcaaaccatacggcgcgtggtgaagggccggccaggaccacggaagcagaagtggacagtcggcctatatccaggcaaggtgcgggaggcacggtgccaggcgtcagtgcatggcgcctccgaggcccgcctcactgtctcctggcagatcccatggaaccttaaatacctgaaggtgagggaggtgaagtacgaggtgtggctgcaggagcagggggagaacacctacgtgccttacatcctggctctgcagaaccacaccttcactgagaacatcaagcccttcaccacctacctggtgtgggtccgctgcatcttcaacaagatcctcctgggaccctttgcagatgtgctggtgtgcaacacgtagcgagcaggccacagcctggcctcgggaaggtggctcctgcagttcagcgtccctgggcccattaatcccactgtggagacttctgggaactatttattgagcaggcctgtgcctccacatcatcttgttgtctctggggtgtggtgtcacagcactcctctttgccctagagataagggacctgacttccccttctcccatcctgaacatttgtacccctggagaagttccttagcagggaggaggaagaggagaggaggaagcaaagaatcacaaggaacctctggctaggtgatcctgatgtttcctactgagtttttctggtatccagatttctggaaaccgagtaatcatgtactgtttgattgggtggttcatctgcttccatcccagtgaaatttacctgtagcccagtgaagggtgtgtttggaacattcattaaatgattctaagcatcaaaaaaaaaaaaaaaaaaaaaaaa

SEQ ID NO: 25390 - DNA, 1566 bp, Homo Sapiens
gagagagtgagtgagtgagtgagtgtgtgtgtgggggggactcggcttgttgttgtcggtgacttccccctccccttcaccccttcccctccccgccgccgctgcagtggccgctccctgggccgtaggaaatgagcgataacgatgacatcgaggtggagagcgacgaagagcaaccgaggtttcaatctgcggctgacaaacgggctcatcataatgcactggaacgaaaacgtagggaccacatcaaagacagctttcacagtttgcgggactcagtcccatcactccaaggagagaaggcatcccgggcccaaatcctagacaaagccacagaatatatccagtatatgcgaaggaaaaaccacacacaccagcaagatattgacgacctcaagcggcagaatgctcttctggagcagcaagtccgtgcactggagaaggcgaggtcaagtgcccaactgcagaccaactacccctcctcagacaacagcctctacaccaacgccaagggcagcaccatctctgccttcgatgggggctcggactccagctcggagtctgagcctgaagagccccaaagcaggaagaagctccggatggaggccagctaagccactcggggcaggccagcaataaaaactgtctgtctccatcgtctcatcctcctttcagttcgttggtagagccctcagaaccatttaaaagactctttatttttctctttctcccttttttttttaaatttttatttttacgtagaagctcttggacaacagctctcgttctccttccccatttccactgtatattttttaatgtattcccttcagggattccctgtccccaacaggaatttttaaaccaaaacaccccaacttggcagctttttctgtggaggacagacggccggccggacctctgagcacatagtgtcctgcccaccctaccagctcctccagccctgccgggcacatgcccgggggacgcctgccctgcccaggtggcctcctggcctgccctcacctctgatagactttgtgaatctgaactgctctactttgagaagatgaccggtttggagtaatcagaatgaaccctcctcctttttaagggttttttttttttcctttttctaaaaagctatgtatcgctcctattgaaagaccagatccttaaagaagtttgtggtataaaaagaaagtggggacagattcgcagcacagagtcgctggcatgtttcactcctgcttctctcagccagctgtttaagcctgcggcgccagcctcacggagggccgtgtgacactctcgtggtatgtatgggagacggcagcagtgaagcagcagccaccagggagtggccatttggggttgggacagggagggtgttttgggtggcatagaggttttgtattgagggccagtgatgatgttttgatatttatttcctgctacttaaatttgaatctgagtgaattgtacctatttctgatgatgtcggtcttgcaaagcgacagattcataaagtaatgatgaaatctttaaaaaaaaaaaaaaaaaaaa

SEQ ID NO: 25391 - DNA, 1522 bp, Homo Sapiens
gttggtgagcatcatggcaaccgttacagccacaaccaaagtcccggagatccgtgatgtaacaaggattgagcgaatcggtgcccactcccacatccggggactggggctggacgatgccttggagcctcggcaggcttcgcaaggcatggtgggtcagctggcggcacggcgggcggctggcgtggtgctggagatgatccgggaagggaagattgccggtcgggcagtccttattgctggccagccgggcacggggaagacggccatcgccatgggcatggcgcaggccctgggccctgacacgccattcacagccatcgccggcagtgaaatcttctccctggagatgagcaagaccgaggcgctgacgcaggccttccggcggtccatcggcgttcgcatcaaggaggagacggagatcatcgaaggggaggtggtggagatccagattgatcgaccagcaacagggacgggctccaaggtgggcaaactgaccctcaagaccacagagatggagaccatctacgacctgggcaccaagatgattgagtccctgaccaaggacaaggtccaggccggggacgtgatcaccatcgacaaggcgacgggcaagatctccaagctgggccgctccttcacacgcgcccgcgactacgacgctatgggctcccagaccaagttcgtgcagtgcccagatggggagctccagaaacgcaaggaggtggtgcacaccgtgtccctgcacgagatcgacgtcatcaactctcgcacccagggcttcctggcgctcttctcaggtgacacaggggagatcaagtcagaagtccgtgagcagatcaatgccaaggtggctgagtggcgcgaggagggcaaggcggagatcatccctggagtgctgttcatcgacgaggtccacatgctggacatcgagagcttctccttcctcaaccgggccctggagagtgacatggcgcctgtcctgatcatggccaccaaccgtggcatcacgcgaatccggggcaccagctaccagagccctcacggcatccccatagacctgctggaccggctgcttatcgtctccaccaccccctacagcgagaaagacacgaagcagatcctccgcatccggtgcgaggaagaagatgtggagatgagtgaggacgcctacacggtgctgacccgcatcgggctggagacgtcactgcgctacgccatccagctcatcacagctgccagcttggtgtgccggaaacgcaagggtacagaagtgcaggtggatgacatcaagcgggtctactcactcttcctggacgagtcccgctccacgcagtacatgaaggagtaccaggacgccttcctcttcaacgaactcaaaggcgagaccatggacacctcctgagttggatgtcatcccccgaccccaccctgttttccaccagagttctgacactgtgactctgtataaaatggttgggaagctgcaaaaaaaaaaaaaaaaaaaaaaaaaaaaaaaaaa

SEQ ID NO: 25392 - DNA, 2166 bp, Homo Sapiens
gtactacacggacatcatgcacacgctcttcctggagctcctggagcagtacgtggtggccaagaaccccaagctgatgctgcgcaggtctgagactgtggtggagaggatgctgtccaactggatgtccatctgcctgtaccagtacctcaaggacagtgccggggagcccctgtacaagctcttcaaggccatcaaacatcaggtggaaaagggcccggtggatgcggtacagaagaaggccaagtacactctcaacgacacggggctgctgggggatgatgtggagtacgcacccctgacggtgagcgtgatcgtgcaggacgagggagtggacgccatcccggtgaaggtcctcaactgtgacaccatctcccaggtcaaggagaagatcattgaccaggtgtaccgtgggcagccctgctcctgctggcccaggccagacagcgtggtcctggagtggcgtccgggctccacagcgcagatcctgtcggacctggacctgacgtcacagcaggagggccggtggaagcgcgtcaacacccttatgcactacaatgtccgggatggagccaccctcatcctgtccaaggtgggggtctcccagcagccggaggacagccagcaggacctgcctggggagcgccatgccctcctggaggaggagaaccgggtgtggcacctggtgcggccgaccgacgaggtggacgagggcaagtccaagagaggcagcgtgaaagagaaggagcggacgaaggccatcaccgagatctacctgacgcggctgctctcagtcaagggcacactgcagcagtttgtggacaacttcttccagagcgtgctggcgcctgggcacgcggtgccacctgcagtcaagtacttcttcgacttcctggacgagcaggcagagaagcacaacatccaggatgaagacaccatccacatctggaagacgaacagtttaccgctccggttctgggtgaacatcctcaagaacccccacttcatctttgacgtgcatgtccacgaggtggtggacgcctcgctgtcagtcatcgcgcagaccttcatggatgcctgcacgcgcacggagcataagctgagccgcgattctcccagcaacaagctgctgtacgccaaggagatctccacctacaagaagatggtggaggattactacaaggggatccggcagatggtgcaggtcagcgaccaggacatgaacacacacctggcagagatttcccgggcgcacacggactccttgaacaccctcgtggcactccaccagctctaccaatacacgcagaagtactatgacgagatcatcaatgccttggaggaggatcctgccgcccagaagatgcagctggccttccgcctgcagcagattgccgctgcactggagaacaaggtcactgacctctgacctacaatctccagtgctgccttgggacataggtacctgaggtacctgagagcccctcaggggaggaggccgagtggctgtggctgaggcccccaccctcccctggaacgcgccccaagccggagtgggtgcagccggaacccgcccagcgtctagactgtagcatcttcctctgagcaataccgccgggcaccgcaccagcaccagccccagccccagctccctccggccgcagaaccagcatcgggtgttcactgtcgagtctcgagtgatttgaaaatgtgccttacgctgccacgctgggggcagctggcctccgcctccgcccacgcaccagcagccgcctccatgccctaggttgggcccctgggggatctgagggcctgtggcccccagggcaagttcccagatcctatgtctgtctgtccaccacgagatgggaggaggagaaaaagcggtacgatgccttcctgacctcaccggcctccccaagggtgccggcactctgggtggactcacggctgctgggccccacgtcaaaggtcaagtgagacgtaggtcaagtcctacgtcggggcccagacatcctggggtcctggtctgtcagacaggctgccctagagccccacccagtccggggggactgggagcagttccaagaccaccccacccctttttgtaaatcttgttcattgtaaatcaaatacagcgtctttttcaaaaaaaaaaaaaaaaaa

SEQ ID NO: 25393 - DNA, 3099 bp, Homo Sapiens
ggcacgaggctcaggcgactggttgttaccgaggaagatggcggcgccagacccgaggcgctagggaagatcgcaccgcggacgcccgctgagcttggcgcacgggccgaccaggagctggtgactgccctcatgtgtgatttgcggcggccagcggcaggtgggatgatggacttggcctacgtctgtgagtgggagaaatggtccaagagcacccactgcccatcggtgcccctggcctgcgcctggtcctgccgaaatctcatcgccttcaccatggacctgcgcagcgatgaccaggacctgacccgcatgatccacatcctggacacggagcacccctgggacctgcactcgatcccctcagagcaccacgaggctatcacctgcctggagtgggaccagtcaggctcccggctcctgtcagcagatgccgacgggcagatcaagtgctggagcatggcggaccacctggctaatagctgggagagctcagtgggcagcctagtggagggggaccccattgtggccctgtcctggctgcacaatggtgtgaaactggccctgcacgtggagaagtcgggcgcctccagcttcggggagaagttctcccgagtcaagttctcaccgtcgctcacgctgttcggcggcaagcccatggagggctggatcgcggtgacggtcagcggcctggtcaccgtgtccctgctgaagcccagcgggcaggtgctgacgtccaccgagagcctgtgccggctgcgcggccgcgtggccctggccgacatcgccttcaccggcggcggcaacatcgtggtggccacggcggacggcagcagcgcgtcgcccgtgcagttctacaaggtgtgcgtgagcgtggtgagcgagaagtgccgtatcgacacggagatcctgccctccctgttcatgcgctgcaccaccgacctcaaccgcaaggacaagttccccgccatcacccacctcaagttcctggcccgggacatgtcggagcaggtgcttttgtgcgcgtccagccagaccagcagcatcgtggagtgctggtccctgcgcaaggagggactccccgtgaacaacatcttccagcagatctcccccgtggttggcgacaaacagcccacaattctcaaatggcggatcctatcggccaccaacgatctggaccgtgtgtcggccgtggcgctgcccaagctgcccatctcgctcaccaacaccgacctcaaggtggccagcgacacacagttctaccctggcctcgggctggccctggccttccacgacggcagcgtccacatcgtgcaccggctctcactgcagaccatggccgtcttctacagctccgcggccccgaggcctgtggatgagccggccatgaagcgcccccgcaccgcgggccccgccgtccacttaaaggctatgcagctatcgtggacgtcactggccctggtggggattgacagccacgggaagctgagcgtgctccgcctctcaccttccatgggccacccgctggaggtggggctggcgctgcggcacctgctcttcctgctggagtactgcatggtgaccggctacgactggtgggacatcctgctgcacgtgcagcccagtatggtacagagcctggtggagaagctgcacgaggagtacacgcgccagaccgctgccctgcagcaggtcctctccacccggatcctggccatgaaggcctcgctctgcaagctgtcgccctgcacggtgactcgcgtgtgcgactaccacaccaagctcttcctcatcgccatcagctccaccctgaagtcgctgctgcgcccccactttctcaacacgcctgacaagagccccggcgaccggctgaccgagatctgcaccaagatcaccgacgtcgacattgacaaggtcatgatcaacctcaagacggaggaatttgtgctggacatgaacacactgcaggcgctgcagcagctcttgcagtgggtgggcgacttcgtgctgtacctgctggccagcctacccaaccagggttccctgctgaggccgggccacagctttctgcgggacggcacctcgctgggcatgcttcgggaattgatggtggtcatccgcatctggggccttctgaagcccagctgcctgcccgtgtatacggccacttcggatacccaggacagcatgtccctgctcttccgcctgctcaccaagctctggatctgctgtcgcgatgagggcccagcgagcgagccggacgaggcgctggtggatgaatgctgcctgctgcccagccagctgcttatccccagcctggactggctgccagccagcgacggcctggtcagccgcctgcagcccaagcagccccttcgtctgcagtttggccgggcgcccacgctgcctggcagtgctgccaccctgcagctcgacggcctcgccagggccccaggccagcccaagatcgaccacctgcggaggctgcaccttggcgcttgccccacggaggaatgcaaggcctgcaccaggtgcggctgtgtcaccatgctcaagtcgcccaacagaaccacggcggtgaagcagtgggagcagcgctggatcaagaactgcctgtgcggtgggctctggtggcgggtgcccctcagctacccctgagcccagctgcccctcagctactcctcagctacccctcagctgcccctgagcccggctgctgcaagagccaccgctcgccctggactctcctcggcgcggttaacctcagcccgccctgcagggctgttgaaggccgtgggccggacgcctgcgtgaccagcagagcttctgaggaagcccctgcctttgtccagctgggcccgcagtccacacaccactctcccaggacccccagatccctggaccatctgcatccaaaggaccgtccgtgacggccgggggtccaggcggaccttgtggtgacccggctcgggcgtctcctcggtttccttgcctcacccgcggagagcgctgaacctggacaagcagcggctgggaaggacaggtccaataaacgccctctgcgcccaaaaaaaaaaaaaaaaaaaaaaaaaaaaaaaa

SEQ ID NO: 25394 - DNA, 2943 bp, Homo Sapiens
gtggtgttgggccggtgctgctgccgctgccgccggggaggaggtggaaagcggggctgtggcgggccggcgggggcggcctgtcagccgctgctttgtctccttagctcgggtcccttctgcgctgccgcagggaggccgcccgggccaggcgagccgaaccaatgctggacctggaggtagtgcccgaacgctctctggggaacgagcaatgggaattcacgctgggaatgcctctggctcaggcagtagccattcttcagaagcactgtcgcatcatcaaaaacgtccaggttctctacagtgaacagtctcctctaagccatgacctcattcttaacctgactcaggacgggatcaaactaatgtttgatgctttcaatcagagacttaaggtgatcgaagtatgtgatttgactaaagtaaagttaaaatattgtggcgtgcattttaattctcaggccatagctcctaccattgaacagattgaccagtcttttggcgcaacccatcctggagtgtacaactccgctgagcagctcttccatctcaacttcagaggactgtctttctcttttcagttagactcatggactgaggctccaaagtatgagcccaattttgcccatggcctggcttctctccagataccccatggagcaactgtaaaacgaatgtacatctacagtggcaacagcctgcaggataccaaggctcccatgatgcctctgagctgtttcctgggcaatgtctatgctgagagtgtagatgttcttcgagatggaactggacctgcaggtttacgacttcgcctacttgctgcaggttgtggacctggcctattagcagatgccaagatgcgggtatttgaacgttcagtgtattttggtgattcctgccaagatgttcttagcatgcttggctctccacacaaagtcttctataaatcagaagacaagatgaaaattcattctccttcccctcataaacaagttccatcgaagtgtaatgactacttttttaactacttcactcttggagtggacatcctctttgatgcgaatacacacaaagtgaagaagtttgttctacacaccaattaccctgggcattataatttcaacatttatcatcgctgtgagttcaagatcccactagccataaagaaagaaaacgcagatggtcagacagaaacatgcacgacctacagcaagtgggacaacatccaggagctcctgggccaccctgtggagaagcctgttgtcctgcacaggtcttcctccccaaacaacaccaacccatttggttccacattctgctttggtcttcagcgaatgatctttgaggtcatgcagaacaaccacattgcctcggtgaccctgtatggcccccccaggcctggtagccacctgagaacagcggaactcccctagggacaccaccacccatgcccctctgtcccgtggaactgtgcatcacatcctgctcagtgggcctctgtaccaccctgtgggttttcttggacacctggccagtgctgaagggctgttgtgatgttctgaggttgggctcaggctgggtgctctgccatgggctgagtggcccagatattcttctgtccatctttggcctgctggtgccagcaggggacacagactgcaaagagaagcacaaagtttgagccttgattcctggacccaggagctctcaactaacaaggaggcaggagaggtcaacccttgtcccatgcacattgggaagacttggggctctttctgtgactgaggacacaggcacccaggataaggacaaggtcctgcctttggctccacattgccacatgacccttaaggcaagcaggtagcgtgtccatagtacttggttgcgacatttgcactacatccactttagttacttgatgagctggctgtggccagggtggcccacctgcccttccctgttcctttcttgcacgcgctccctgcctgggcacaccaaactggttgaaacacagctttctaccatccaggtacatgcccaggcctggttctcacccctgttggagtcagctttcaagattgcctgtgcccctgctctgccccatcctggctggcagggctgcatgtttccatcctgtttgcctcttttatttaatgccaaagttttagccaaagacatcttcctacttttgttgtgtttcagcattctgttctgcactgtgggctggctctctgccccaaccctgggcactggcccctggctgggccatttcatggctcaaagcctctgggggctcaaggaaggctgggctgctcagtcccttcatgggtcttgctaatggaaagtagcatatatgtgctttaaaaatattaatccttttgaaaagaactgagaagaaaaatgtataattttatcccatttttaatattttggtctagcaacttgtgatacatagatgacaattttgtgagtttttcaaatgtgtgtacagatttttgtaaatatgactcttttgtaattaactcatgtacagcctcatcctgtatagtttaatgatgaatgtgcaggggacctgtctcaggctcctatatggttcctgggccttatagccaggtttgtgtggcgctcccgacttttgtgactgactggtgtcttcccatttggactgtggcctggccagagccccttgcatatccccactgtcaggggcagccaggactgttcccatcctcctggaatgggggaaccttccttatcccctgcccacatcccctctccaataaagcacctgtgccctcagcaatggcctgccatgtgctgttgctgggatgtttgtattaaaaaaaaaaaaaaaaaaaaaaaaaaaaaaaaaaaaaaaaaaaaaaaaaaaaaaaaaaaaaaaaaaaaaaaaaaaaaaaaaaaaaaaaaaaaaaaaaaaaaaaa

SEQ ID NO: 25395 - DNA, 2110 bp, Homo Sapiens
cagctcggtgctgattatcacaactgtttggtgacctacttcactgacctgtgaggattccttcccttcaagtactggattcttgatctttctgcatcatcaagaatggaaacagactgtaatcccatggagctaagcagtatgtcaggatttgaagaaggttcagagctgaacggttttgaaggaactgacatgaaagacatgaggctcgaagctgaagcagttgtaaatgatgttctctttgctgttaacaacatgtttgtctcgaaaagcctgcggtgtgcggatgatgtggcctatatcaatgtggaaacaaaggaaagaaacagatattgcctagaactcactgaagcagggctcaaggtggtaggctatgcttttgaccaggtagatgatcatttacagactccctaccatgaaacagtctactccttgttggatacactcagccccgcctaccgagaagcatttggaaacgcactgcttcaaagactggaagctttgaaaagagatggacagtcatgactacactttttcctttcagaggggctggtgctcgtacagaatgttgatataaagcttaaaattcttgcatatggtcatagaaaatgcatctttggttttgtgtttttatcacttgcttccaacttaggcttttggctcagaagattattgaataatgatttgtcttagtttctgtttcagtaagggaattctgaggccgttgctatgataccatcattaagacattcacatgtcttcatataatatctcttcatttcaaatcctaatcactatttcatactattacagggctttgatgctgccagcactgtcttttacataggaaattctagatttgcacagtaatagaggaattagaagtacctaactatacactttgattcagcctgctaaatcaggggttcaatactagcttggacaaactttgtagtaattaattgctaccagccttattggaaacaaattatcaactagtttcccctgcacaaattttgaaattcactgcttcacttaatctatttatattactaataatggattaataaagatgaattaattatatattacttaactagtattaaatgaaaaacagggactgaaatagttctgtattccgtgtttgcaacagccagccaactaagcagaggataaaccgttagcaaatgaatgtaataattactcatttccaagatatctaagcacataagcaaatacaggaacagacttcattctttttcttaacaaaaaagcatcttcagtgtgtgatttaaaagaaagaagattctggtttcctagaaaacaatattttggcctgtgttgattcttattctgaatgtgtgtttacataatgtacagtatatattcagaaagtatttttgcttcaacgtttactttctatgatgtagtgctttggtattcctacagcaccccaccttccccaacagatgtacagtgttctgtctccattcgaaatctacaatgtaatatgagtgcattgtatgggtttgaaaccaaaggatgaatgaagcattcagagacttaatatttgaaaaaggaatagtcagtattttatattttattacaggtactgatatttataaatttaataaactgtaccatgctgctgcatgttttcaagtacatgttgaacagtaaggattggggagttgttttttaatggtcacctaaagcagctgctatagaaatgttgaactaaaattttgcatctggtcataccttcatgcatttatcatttgcagatatttttccatcattattaaaaaacaggaacttttaggctctgaagatcatgtggaccagagcaaattaaagttcagtttgtgtcacaattcattgccagacttcattggaatgctttgtttgatgatgtatgttcattctcagctttattttcagatgcttaactgggcaatgaagtctaacttcaggttgaactttctcatgtttaatctcaggctaaatgtaaatgatatttgtaaagtttgaataaaattctgtttactcattttgagttagtatgaaaaaaaaaaaaaaaaaaaaaaaaaaaaaaaaaaaaaaaaaaaaa

SEQ ID NO: 25396 - DNA, 1922 bp, Homo Sapiens
gacagagcgagcgcggcgcggggccaccatgggggcccagctcagcacgttgggccatatggtgctcttcccagtctggttcctgtacagtctgctcatgaagctgttccagcgctccacgccagccatcaccctcgagagcccggacatcaagtacccgctgcggctcatcgaccgggagatcatcagccatgacacccggcgcttccgctttgccctgccgtcaccccagcacatcctgggcctccctgtcggccagcacatctacctctcggctcgaattgatggaaacctggtcgtccggccctatacacccatctccagcgatgatgacaagggcttcgtggacctggtcatcaaggtttacttcaaggacacccatcccaagtttcccgctggagggaagatgtctcagtacctggagagcatgcagattggagacaccattgagttccggggccccagtgggctgctggtctaccagggcaaagggaagttcgccatccgacctgacaaaaagtccaaccctatcatcaggacagtgaagtctgtgggcatgatcgcgggagggacaggcatcaccccgatgctgcaggtgatccgcgccatcatgaaggaccctgatgaccacactgtgtgccacctgctctttgccaaccagaccgagaaggacatcctgctgcgacctgagctggaggaactcaggaacaaacattctgcacgcttcaagctctggtacacgctggacagagcccctgaagcctgggactacggccagggcttcgtgaatgaggagatgatccgggaccaccttccacccccagaggaggagccgctggtgctgatgtgtggccccccacccatgatccagtacgcctgccttcccaacctggaccacgtgggccaccccacggagcgctgcttcgtcttctgagggccgggcacggtcacacggccacccgccccgcgcaccccacgccctgttcacgctcacccagtcacctccccacatcgcacactggggccccgggttcagcctggcctgcccgtgccctggtgaatcacctggctgagcagttcccctggagccccttcgggagcagggctgtgtcccagatgggccacggctgagccttcagagtacgtcctgcctggcacttactggtccttaccagagacgcccagccccatccctgtcctcatgacccctcgtccaccccccacacacactataaggctgagggctgccagcagccccgtctgcccaccattcccggccgtggaccatagtcgggatgtcagcagacacacatgggcagcccaaagctgcaggtgccagggcccaccccagcctcgcctgtcacccccactcccgcctcagggccaggcccaggcctcaccacctgacgctgcatgagacattgacaccagaaagccctcttgggggcactgctccctaccccagggccctggccagccgggagcttggctctcctctggctagagtgggaagagggggctggccatggggccctcccagaacctcagcatttccttccagcccatccaaacactgaggcagccttggggaaccccgagctggggggttggcagcccactgcaccgcctcagggttttggggtcctgggctggggccaccatccctgatggcagaactcccacaaccacatgtatttattcctctgtcctaaaccgtcccctccttccctcacccccagcacagggggattctgagcagtgcctcttgtctgagggacatatcagtgacctcgacgttgcctttagactacagttgtgttagcctcttgcgtattggctttttcagagtcatttatgagcagaaaaaaaaaaagtaaaactttgctaatattaaaaaaaaaaaaaaaaaaaaaaaaaaaaaa

SEQ ID NO: 25397 - DNA, 1370 bp, Homo Sapiens
ccggcccggcccgcccggcccagccgctcctgctgggcgccccaaccgggtccggcccgggggggcgggggccgcggccgccgaggatggggaaatccaacagcaagttgaagcccgaagttgtggaggagctgaccaggaagacctactttaccgagaaggaggtccagcagtggtacaaaggcttcatcaaggactgccccagtgggcagctggatgcggcaggcttccagaagatctacaagcaattcttcccgttcggagaccccaccaagtttgccacatttgttttcaacgtctttgatgaaaacaaggacgggcgaattgagttctccgagttcatccaggcgctgtcggtgacctcacggggaaccctggatgagaagctacggtgggccttcaagctctacgacttggacaatgatggctacatcaccaggaatgagatgctggacattgtggatgccatttaccagatggtggggaataccgtggagctcccagaggaggagaacactcctgagaagagggtggaccggatctttgccatgatggataagaatgccgacgggaagctgaccctgcaggagttccaggaggggtccaaggcagacccgtccattgtgcaggcgctgtccctctacgacgggctggtatagtcccaggctggagctggatgcctgggaaccactcacctccttctgtgccatgaggccacctcagccctgacaccaaccccgtgcgtccacccagccttcttccgcatccacacacagccggctgcccttgacccgggaggccccggctctcctctcccctgtcctgcacccatcccccgcctgaagccaccggctccaattgccagcaacctctgcttgtccggaaaacgacaacacgaaatggaaaaggctacagccctctgcataaaccaaggacttggctgcctcgcaggcagcctccgttcctcccgctctcttgcgcgtgtgcttttttttttattttgaacagacgttttaaaagaaaaaaaaaacaactaccttctgtcctagaagacacagactgacagatggggtgaaggcctggggacctcagagaactctgccttgccctcgtccctcgtccttcggcagccggagaggctgtgggtgggccgagggtgtctaggggttctgcctagtcaacgttatttgtcgtcccatcttttggcagcaaaaccacctgcgtggctaggatgattaattatgaggatgatgattttttttgtgataacagtattgtgctttttgtggggaaagtgaggttttttttttatatacatatataattgatatctttaatttaaaaaaaaaaaaaaaaaaaaaaaaaaaaaa

SEQ ID NO: 25398 - DNA, 3796 bp, Homo Sapiens
ggggtgggcacggggcagtcgtcgggagcgcgcgagtgcgccggaggacggggagagaccccgagacccccggggcacgaagtccagagcgagcgggttatgcctccgcctcgttgccctgaaagccgcagcgacagcgaaaagggctaagattcggccatgagcagcgcccctcggcgccccgccaagggcgcagattctttctgtacgccagagccagagagcttgggccctgggacgcctgggttccccgagcaggaggaagacgaacttcaccgcaccctgggcgtggagcggtttgaggagatcctacaggaggccgggtctcgtggaggggaggagccaggccgcagctatggggaggaagactttgagtaccaccgccagtcctcccaccacatccatcacccactgtccaccactgccccaccaggaggcgactcctcgggcctccaaaggggcccaggctggaacccaggtggaggaggcggaggcggaggcggtggcggtggccagtggcactgcagggggtgacgacgggggtgcctcggggcgccccctgcccaaagcccagcctgggcaccgcagctacaaccttcaggagaggaggcgcatcgggagcatgactggggctgagcaggcactgctgccccgggtccccacggatgagattgaggcccagacgctggccacggccgacctagacctcatgaagagtcaccggtttgaggacgttcctggggtgcggcggcacttggtgcggaagaatgccaaaggttccacacagagtggccgagaagggcgggagcctggccccacacctcgggcccgaccccgggccccccacaagccccatgaggtgtttgtggagctgaatgagttgctcctggacaaaaaccaggagccccagtggcgggagacagctcgctggatcaaatttgaagaggacgtggaggaggagaccgagcgctgggggaagccccacgtggcctccctctccttccgcagtctcctggagctccgcaggaccctggcccatggggctgtgctcttggatctggaccagcagaccctgcccggagtggcccaccaggtggtggagcagatggtcatctctgaccagatcaaggccgaggacagggccaacgtgctgcgggctctgctgttgaaacacagccacccaagtgatgagaaggacttctccttcccccgcaacatctcagctggctccctgggctccctgctggggcatcaccatggtcagggggctgagagtgacccccacgtcaccgagcctctcatgggaggtgttcctgagacccggctggaggtggagcgagagcgtgagctgccgcctccagcaccaccagctggcatcacccgctccaagtccaagcacgagctgaaactgctggagaagattcctgagaatgccgaggccacggtggtccttgtgggctgcgtggagttcctctcccgccccaccatggcctttgtgcggctccgggaggctgtggagttggacgcagtgttggaggtgccggtgcctgtgcgtttcctcttcctgctgctgggcccgagtagtgccaacatggactaccacgagatcggccgctccatctccaccctcatgtcagacaagcaattccacgaggcagcctacctggctgacgagcgggaggacctgctgacggccatcaacgccttcctggactgcagcgtggtgctgccgccttcagaagtgcagggcgaggagctgctgcgctctgtggcccacttccagcgccagatgctcaagaagcgagaggagcagggccggctgctacctacaggggctgggctggagcccaaatctgcccaagataaggcgctcctgcagatggtagaggcggcaggggcagctgaagatgatccccttcggcggacggggcggccctttggggggctgatccgagatgtgcggcgccgctatccccactacctgagtgacttccgagatgcacttgaccctcagtgcctggccgcagtcatcttcatctactttgccgccctgtctcctgccatcacctttggggggctgctgggagagaagacacaggacctgataggggtgtcggagctgattatgtccacagcgctccagggcgtggtcttctgcctgctgggtgcccagcccctgttggtgatcggcttctcagggcccctgctggtctttgaggaggccttcttctcgttctgtagcagcaaccacctggagtacctggtgggccgtgtgtggatcggcttctggctggtgttcctggccctgctcatggtggccctggaggggagcttcctggtccgcttcgtctcccgcttcacccaggagatcttcgccttcttgatctcactcatcttcatctatgagaccttctacaagctggtgaagatcttccaggagcaccccctgcatggctgctcagcctccaacagctcagaggtggacggcggtgagaacatgacatgggccggggcaagacccacgctggggccgggcaacaggagcttggctgggcagtctgggcaggggaagccccggggccagcccaacacggccctgctgtcgctggtgctcatggccggcaccttcttcatcgccttcttcctgcgcaaattcaagaacagccggttctttcctggccggatccggcgggtgattggggactttggggtgcccatcgccatcctcatcatggtgcttgtggattacagtattgaggacacctatacccagaagctgagcgttcccagtggattctcggtgactgccccagaaaagaggggctgggtcatcaaccccctgggagagaagagccccttccctgtgtggatgatggttgccagcctgctgcccgccatcctggtcttcattctcatcttcatggagacacagatcaccacgctcatcatctccaagaaggagcgcatgctgcagaagggctccggcttccacctggacctgctgctcatcgtggccatgggcggcatctgtgccctctttggcctgccctggttggctgctgccactgtccgctctgtcactcacgccaacgcgctcactgtcatgagcaaggctgtggcacctggggacaagcccaagattcaggaagtcaaggagcagcgggtgacggggctgctggttgccctgcttgtgggcctctccatagttatcggggatctgctccggcagatccccctggccgtgctctttggaattttcctgtacatgggagtcacctcccttaacgggatccagttctatgagcggctgcatctgctgctcatgccgcccaaacaccacccagatgtcacttacgtcaagaaggtccggaccctccgtatgcacctgttcacggccctgcagctgctctgcctggccctgctctgggccgtcatgtccacagctgcctccctggccttccccttcatcctcatcctcacagtgccgctccgcatggtggtgctcacccgtatcttcaccgaccgagagatgaaatgtctggatgctaacgaggcagagccggtgtttgatgagcgggagggtgtggacgagtacaatgagatgcccatgcctgtgtagccgccaccgagggacagccgagggaccgatggacgaggggacaggctggtgggatggggttccccctcccatgcccctccctccttttttatttaagtgaataatttaaagtcttctcctcccccactgcccctgcagtaaagtgctttggcccccaaaaaaaaaaaaaaaaaaaaa

SEQ ID NO: 25399 - DNA, 2189 bp, Homo Sapiens
gaaggacggtgtgcgggccggccagccctggacgaaagaagagggcccctccaggccagtctgggcaccctgggatagcggctgcagccaggcatggccgactctgcacaggcccagaagctggtgtacctggtcacagggggctgtggcttcctgggagagcacgtggtgcgaatgctgctgcagcgggagccccggctcggggagctgcgggtctttgaccaacacctgggtccctggctggaggagctgaagacagggcctgtgagggtgactgccatccagggggacgtgacccaggcccatgaggtggcagcagctgtggccggagcccatgtggtcatccacacggctgggctggtagacgtgtttggcagggccagtcccaagaccatccatgaggtcaacgtgcagggtacccggaacgtgatcgaggcttgtgtgcagaccggaacacggttcctggtctacaccagcagcatggaagttgtggggcctaacaccaaaggtcaccccttctacaggggcaacgaagacaccccatacgaagcagtgcacaggcacccctatccttgcagcaaggccctggccgagtggctggtcctggaggccaacgggaggaaggtccgtggggggctgcccctggtgacgtgtgcccttcgtcccacgggcatctacggtgaaggccaccagatcatgagggacttctaccgccagggcctgcgcctgggaggttggctcttccgggccatcccggcctctgtggagcatggccgggtctatgtgggcaatgttgcctggatgcacgtgctggcagcccgggagctggagcagcgggcaaccctgatgggcggccaggtatacttctgctacgatggatcaccctacaggagctatgaggatttcaacatggagttcctgggcccctgcggactgcggctggtgggcgcccgcccattgctgccctactggctgctggtgttcctggctgccctcaatgccctgctgcagtggctgctgcggccactggtgctctacgcacccctgctgaacccctacacgctggccgtggccaacaccaccttcaccgtcagcaccgacaaggctcagcgccatttcggctatgagcccctgttctcgtgggaggatagccggacccgtaccattctctgggtacaggccgctacgggttcagcccagtgacggtggggctggggcctggaggcccagatacagcacatccacccaggtcccgagccctcacaccctggacgggaagggacagctgcattccagagcaggaggcagggctctggggccagaatggctgtccttgtcgtagagccctccacattttctttttcttttttgagacagggtcttgctctgtcacccagactggagtgcagtggtgtgatcatagctcactgcaccctcaacctcctgggttcaagcaatcctcctgcctcagcctcctgaacagctgggaccacaggtgcacgccaccacacctggcttttttttgttgtttttagagacagggtctcactatattgctcaggctggtcttgaactcctgggctcaagtgatcttcccacgtgggcctcccaaaacgctggaactacaagtgtgagccaccgcgcctggcccaagccctccacattttcaatccaggagccttgagtctgtgttgtgtcctgacacctccaagttctagggccgtcaggacacgggagggtttggggacagagtgtccttcctctgtcctctcatcccagtcctgatggccgcttggtgagtgtctggtgccctggtggcctgccccagctctcttctggctttctgagcaggaagcgagcagaggctccacaggcttacgctgctctcctgacagccacacgcgaccctcggtgcagagtgcagaggcggctctggttcctccagccacctcagtccctctttgggaggtgatgttcccattgtttttcaaaggcctcaccttcaactgtctgtcttagaattcccctctggagggctatggcctccctatgctttcacttcccacctctctacctaagttccttcccagcacatcgccagccctgggcctggggatgtccccaatgctgtacctggctgaccccggattaaaagcctcatccacgaccgaaaaaaaaaaaaaaaaaaa

SEQ ID NO: 25400 - DNA, 2090 bp, Homo Sapiens
aggaggctatgatgaagcctacccatagggcttctggggctgaaacgagctaatgatgtcgaagctgctagaactgtacctgtgtcagagcgagtgtgcagcatacgttatcatcactgtcatcactccagcattctgactgtgcctttaaactagtgtgggattttgcccaaacctctaaaccctcccctagccgtggtttcccccgcagtctgaagactctaatacttgacactcgttcagagagatgtttggggaatttatagacacttaacatttatgcatccttatatatcgggtccaggaggaattacagacacttaaaccattactgccttcttcctcaaaagaataacagctttggtaactgggttagcagaggtgttagtggacttagggttgtaaacagatactcatggcactgacatcgatgagtctatgagggaaattagaaagataaatacatctgggatgtaaactcggaaaggcgaggctgttcaaaatgttggtgctattgaattgtgattctcggtgtttgtacattgctaataatgttaaaccatgaagcctgtgagatcttgtgttgcagcgtggtttggccctagcgttcttgcatgctaacctaaggtagaagattagcagcctgtttgcatgcagccggatgctgcccctgacgtgaagcatgttctgggaggttgacccaacctcctttggctgtggcctcattcaccccgtcctgtctgtggcctcattcaccgtgatattaggttgaaaaagctggttgatgaacgggaatgcttattggaacagattaagaaactcaaagggcagctggaggagagacagaagattggcaaactagacaatcttcgatctgaagatgatgtcttggaaaacgggacagacatgcatgtaatggacctacaaagggatgccaacagacagatcagcgacctcaaatttaaacttgcaaaatctgagcaagagataactgcattagaacaaaatgtaataaggttagagagtcaagtatcacgttacaaatcagcggctgaaaatgcagaaaaaatagaagatgaacttaaggcagaaaaacggaaactccaaagagagctccgctctgcattggataaaacagaagagctcgaggtgagcaacggccacttagtgaagcgtctggaaaaaatgaaagcaaatcggagtgcactcttgtcccagcagtaaattccagctctgatcaggcaactggttggtgactggagagcattgtttcataggcttttctctgtcctgtctgggagcgctgcttcttcccctgccttccgagagacgaagaccgtggcgagcttggcgcttaggggctcccgtgccatggctcaccccagggagccccagcagccaccaggtgcctctgtctgcagacccctggcccgggctggcgccgacgctcagaacctgcaggtacttcataagcacacaggggcctcgagggagctctgtgtctgaccgcacagcagcctctgaatgccgctggaagtgatgatcaaagtaaagattcagttgggacttgagttttttttttttttcatgtgtcttgctgaagattaaggggaaatgttacagtgttgggacttcctttcatggcagaatctacaatttgagcgacttcagtagtatctcttagtctacgcttttcatacacaaaacactgtggaaccacaagccattaccaaacaaaactctttcactggaaacaagggggcagtctagaagtaaaagtgaccttaagaagactctttacaggcaacaaatgaagcttttctaagggatttttgcatcagttcagtcataagaatacttttttccagggtaattaggcaatagcttcactgaaaatgacagcttttcattgcattatttaatccttatatttggaattgaagtcgttaacttcttttaaagaatgttctattagaaaaattaaaaatgaaatgttgagagacttcaaaaaaaaaaaaaaaaaaaaaaaaaaaaaaaaaaaaaaaaaaaaaaaaaaaaaaaaaaaaaaaaaaaaaaaaaaaaaaaaaaaa

SEQ ID NO: 25401 - DNA, 4199 bp, Homo Sapiens
ctgagccggagacaggcagttgtgaaaaacttcaggacaaaaatgtttcatttaaggacttgtgctgctaagttgagaccattgacggcttcccagactgttaagacattttcacaaaacagaccagcagcagctaggacatttcaacagattcggtgctattctgcacctgttgctgctgagccctttctcagtgggactagttcgaactatgtggaggagatgtactgtgcttggctggaaaaccccaaaagtgtacataagtcatgggacattttttttcgcaacacgaatgccggagccccaccgggcactgcctaccagagtccccttcccctgagccgaggctccctggctgctgtggcccatgcacagtccctggtagaagcacagcccaacgtggacaagctcgtggaggaccacctggcagtgcagtcgctcatcagggcatatcagatacgagggcaccatgtagcacagctggaccccctggggattttggatgctgatctggactcctccgtgcccgctgacattatctcatccacagacaaacttgggttctatggcctggatgagtctgacctcgacaaggtcttccacttgcccaccaccactttcatcgggggacaggaatcagcacttcctctgcgggagatcatccgtcggctggagatggcctactgccagcatattggggtggagttcatgttcatcaatgacctggagcagtgccagtggatccggcagaagtttgagacccctgggatcatgcagttcacaaatgaggagaaacggaccctgctggccaggcttgtgcggtccaccaggtttgaggagttcctacagcggaagtggtcctctgagaagcgctttggtctagaaggctgcgaggtactgatccctgccctcaagaccatcattgacaagtctagtgagaatggcgtggactacgtgatcatgggcatgccacacagagggcggctgaacgtgcttgcaaatgtcatcaggaaggagctggaacagatcttctgtcaattcgattcaaagctggaggcagctgatgagggctccggagatgtgaagtaccacctgggcatgtatcaccgcaggatcaatcgtgtcaccgacaggaacattaccttgtccttggtggccaacccttcccaccttgaggccgctgaccccgtggtgatgggcaagaccaaagccgaacagttttactgtggcgacactgaagggaaaaaggtcatgtccatcctgttgcatggggatgctgcatttgctggccagggcattgtgtacgagaccttccacctcagcgacctgccatcctacacaactcatggcaccgtgcacgtggtcgtcaacaaccagatcggcttcaccaccgaccctcggatggcccgctcctccccctaccccactgacgtggcccgagtggtgaatgcccccattttccacgtgaactcagatgaccccgaggctgtcatgtacgtgtgcaaagtggcggccgagtggaggagcaccttccacaaggacgtggttgtcgatttggtgtgttaccggcgcaacggccacaacgagatggatgagcccatgttcacgcagccgctcatgtacaagcagatccgcaagcagaagcctgtgttacagaagtacgctgagctgctggtgtcgcagggtgtggtcaaccagcctgagtatgaggaggaaatttccaagtatgataagatctgtgaggaagcttttgccagatctaaagatgagaagatcttgcacattaagcactggctggactctccctggcctggcttcttcaccctggacgggcagcccaggagcatgtcctgcccctccacgggtctgacggaggatattctgacacacatcgggaatgtggctagttctgtgcctgtggaaaactttactattcatggagggctgagccggatcttgaagactcgtggggaaatggtgaagaaccggactgtggactgggctctagcggagtacatggcgtttggctcgctcctgaaggagggcatccacattcggctgagcggccaggacgtggagcggggcacattcagccaccgccaccatgtgctccatgaccagaatgtggacaagagaacctgcatccccatgaaccatctctggcccaatcaggccccctatactgtgtgcaacagctcactgtctgagtacggcgtgctgggctttgagctgggcttcgccatggccagtcctaatgccctggtcctctgggaagcccaatttggtgacttccacaacacggcccagtgtatcatcgaccagttcatctgcccgggacaagccaagtgggtgcggcagaatggcatcgtgttgctgctgccccatggcatggagggcatgggtccagaacattcctccgcccgcccagagcggttcttgcagatgtgcaacgatgacccagatgtcctgccagaccttaaagaagccaacttcgacatcaatcagctatatgactgcaattgggttgttgtcaactgctccactcctggcaacttcttccacgtgctacgacgccagatcctgctgccattccggaagccgttaattatcttcacccccaaatccctgttgcgccaccccgaggccagatccagctttgatgagatgcttccaggaacccacttccagcgggtgatcccagaagatggccctgcagctcagaacccagaaaatgtcaaaaggcttctcttctgcaccggcaaagtgtattatgacctcacccgggagcgcaaagcacgcgacatggtggggcaggtggccatcacaaggattgagcagctgtcgccattcccctttgacctcctgctgaaggaggtgcagaagtaccccaatgctgagctggcctggtgccaggaggagcacaagaaccaaggctactatgactacgtgaagccaagacttcggaccaccatcagccgcgccaagcccgtctggtatgccggccgggacccagcggctgctccagccaccggcaacaagaagacccacctgacggagctgcagcgcctcctggacacggccttcgacctggacgtcttcaagaacttctcgtagatgctgcctagggttgcttgggccactgccctctccacacccatgactgccccttgcttctcaactaaagaatagtgcctcagcgctgcccacaccaccgccctcctcgctgtgccaccacccctccctctgctctcataggagttaggctgtcgtccccctccagtgcttggctgccccacaggccacacgctgcccaggctctgctgacttctgagcagttttccaggaggccggggggagcaggagcaggaaaggtagcccccgagggatgtccttggggaggggtcagctctggccacaatcctccccaccagtctcacccactaggataggaactgggccttgtgtgctggcttccgctgtcacccagcaaggcacaggctcctgtatttgagactaggatagcttcatcttgagcctgagccttagaatctgtagaggagcctggagtcggatctagccatggctggcagaggtttctagggtgggccccagccgtggcgtgaactgaggatgacccggggcagctggcaggagagagccttggcctgacctggcacagaaagggcagcttcagtctctgcagtgtccattatctgctgttccttcgagggttccaggctgtgtgtggggcccaagcatgccccacccacccctcctgggcccaggcagcacctggagcccacagagtctgtgtgtagccaggaagccccgctcaggtagccaccgccggggcactggctgctctgtcttggtcctgttaaccctccacctcctctcttggactccctccccaccccaaccactctttctttctcctttaacccaatggagactttctgatgcatcgttttctttgctgtgccaaagcaggtcagaagagggagaggaggggctgggggtgaggggccaggccatggccaaggggccagctgcccctcatttatcactctgaccttcacagggacagatctgatttatttattttggttaaaaaaaaaaaaaaggaacagaaacaactttgcattgcattggcttgacccataaactaagttatatccgtgaaaaaaaaaaaaaaaaaa

SEQ ID NO: 25402 - DNA, 1885 bp, Homo Sapiens
ccgcgacggcgcgcccccggcggctgctgcggcggcgggagcgaggcgaccgctgaggccgcggagagtgacggcggcccggccgacgggagccggggcggggcggcggcccagcgaaggagcgcgcgggcggtctggccccgccccctccccgcccgccttcccggtgaccttcaggggcccgggtggcgggcgcaggcccctgcggcggcggcgggatgttcgtgcaggaggagaagatcttcgcgggcaaggtgctgcggctgcacatctgcgcgtccgacggcgccgagtggctggaggaggccaccgaggacacctcggtggagaagctcaaggagcgctgcctcaagcactgtgctcatgggagcttagaagatcccaaaagtataacccatcataaattaatccacgctgcctcagagagggtgctgagtgatgccaggaccatcctggaagagaacatccaggaccaagatgtcctattattgataaaaaagcgtgctccatcaccacttcccaagatggctgatgtctcagcagaagaaaagaaaaaacaagaccagaaagctccagataaagaggccatactgcgggccaccgccaacctgccctcctacaacatggaccgggccgcggtccagaccaacatgagagacttccagacagaactccggaagatactggtgtctctcatcgaggtggcgcagaagctgttagcgctgaacccagatgcggtggaattgtttaagaaggcgaatgcaatgctggacgaggacgaggatgagcgtgtggacgaggctgccctgcggcagctcacggagatgggctttccggagaacagagccaccaaggcccttcagctgaaccacatgtcggtgcctcaggccatggagtggctaattgaacacgcagaagacccgaccatagacacgcctcttcctggccaagctcccccagaggccgagggggccacagcagctgcctccgaggctgccgcgggagccagcgccaccgatgaggaggccagagatgagctgacggaaatcttcaagaagatccggaggaaaagggagtttcgggctgatgctcgggccgtcatttccctgatggagatggggttcgacgagaaagaggtgatagatgccctcagagtgaacaacaaccagcagaatgccgcgtgcgagtggctgctgggggaccggaagccctctccggaggagctggacaagggcatcgaccccgacagtcctctctttcaggccatcctggataacccggtggtgcagctgggcctgaccaacccgaaaacattgctagcatttgaagacatgctggagaacccactgaacagcacccagtggatgaatgatccagaaacggggcctgtcatgctgcagatctctagaatcttccagacactaaatcgcacgtaggtggcgttgttccactcggctatcaggccacagcagccccctggtgcggcccgagaccgggcagagtggacctcacctggaaactcaccttcagcgcctcagccctggactgttagaggtgctgcagcggctcctgctctctgatcttattgcttataaactttggtgacggtagtgtgtaaggccgtatttttagcatctgacaggtgtttacaaaaaagtggttgtcgcactgggaagtggagtgatggcctcgtctccagtgctcctctgggctcttgagttgctgcttgaattgccgtgtagacatttgcttggagagtccacttgttatttgacggaggtaggtttcaacccagagttaatgtcaagcatgctaatttaactagtcactcacagatgacttttctttaataaagtcccttttcctaaaaaaaaaaaaaaaaaaa

SEQ ID NO: 25403 - DNA, 2610 bp, Homo Sapiens
caggggcggaggcggcggccagggaggaagcggaggaggcggaggcggccgcggcgttcgcccgcccgctcgctcgctcggtttccccgcccccgccgggcttaacgccgctgaaggtatccgggtgcgcgctgtcgcaacctgccctcatcctggcccgcgactgtaagaccggacccacatccagaccaatcttcctgtccgggctgctgcgacgcgggctccgcaggttgcaggcgggcggccggggcgcctgaaggttaccgagtgcatgagcgcctagcgcttcccgcgctgccccgcccgctggcccgccgacccgcccgccggctcgcccgccagcccctcggcgcccggcggcggcggcggcggtggcggcgacggtcgcaggaggtgccgtctgcctcccaggtgcgcgcttcgctcccggagccgcggaactcggcggccgccatggcgtccaacatggaccgggagatgatcctggcggattttcaggcatgtactggcattgaaaacattgacgaagctattacattgcttgaacaaaataattgggacttagtggcagctatcaatggtgtaataccacaggaaaatggcattctacaaagtgaatatggaggtgagaccataccaggacctgcatttaatccagcaagtcatccagcttcagctcctacttcctcttcttcttcagcgtttcgacctgtaatgccatccaggcagattgtagaaaggcaacctcggatgctggacttcagggttgaatacagagacagaaatgttgatgtggtacttgaagacacctgtactgttggagagattaaacagattctagaaaatgaacttcagatacctgtgtccaaaatgctgttaaaaggctggaagacgggagatgtggaagacagtacggtcctaaaatctctacacttgccaaaaaacaacagtctttatgtccttacaccagatttgccaccaccttcatcatctagtcatgctggtgccctgcaggagtcattaaatcaaaacttcatgctgatcatcacccaccgagaagtccagcgggagtacaacctgaacttctcaggaagcagtactattcaagaggtaaagagaaatgtgtatgaccttacaagtatccccgttcgccaccaattatgggagggctggccaacttctgctacagacgactcaatgtgtcttgctgaatcagggctctcttatccctgccatcgacttacagtgggaagaagatcttcacctgcacagacccgggaacagtcggaagaacaaatcaccgatgttcatatggttagtgatagcgatggagatgactttgaagatgctacagaatttggggtggatgatggagaagtatttggcatggcgtcatctgccttgagaaaatctccaatgatgccagaaaacgcagaaaatgaaggagatgccttattacaatttacagcagagttttcttcaagatatggtgattgccatcctgtattttttattggctcattagaagctgcttttcaagaggccttctatgtgaaagcccgagatagaaagcttcttgctatctacctccaccatgatgaaagtgtgttaaccaacgtgttctgctcacaaatgctttgtgctgaatccattgtttcttatctgagtcaaaattttataacctgggcttgggatctgacaaaggactccaacagagcaagatttctcactatgtgcaatagacactttggcagtgttgtggcacaaaccattcggactcaaaaaacggatcagtttccgcttttcctgattattatgggaaagcgatcatctaatgaagtgttgaatgtgatacaagggaacacaacagtagatgagttaatgatgagactcatggctgcaatggagatcttcacagcccaacaacaggaagatataaaggacgaggatgaacgtgaagccagagaaaatgtgaagagagagcaagatgaggcctatcgcctttcacttgaggctgacagagcaaagagggaagctcacgagagagagatggcagaacagtttcgtttggagcagattcgcaaagaacaagaagaggaacgtgaggccatccggctgtccttagagcaagccctgcctcctgagccaaaggaagaaaatgctgagcctgtgagcaaactgcggatccggacccccagtggcgagttcttggagcggcgtttcctggccagcaacaagctccagattgtctttgattttgtagcttccaaaggatttccatgggatgagtacaagttactgagcacctttcctaggagagacgtaactcaactggacccaaataaatcattattggaggtaaagttgttccctcaagaaacccttttccttgaagcaaaagagtaaacacggcccagcggtggaaccagccattccttgacaagccagcagcctgcgtcaggagaagggctcctcgccaacccacccacacgctcgtctcactcaattcaatgtcacacttctgcctcttgcaaaattgctggaaaaagtaataataaatatagctacttaagatttcccatcaaaaaaaaaaaaaaaaaaaaaaaaaaa

SEQ ID NO: 25404 - DNA, 1889 bp, Homo Sapiens
cccgcgagcggacgcggcagcgcctctgtctcgctttttcttatttttcccccctttcccctttcttttttttttttcttttcttttctcccctccccccctttcaccatttcccctcggaggcgctttccccgggcaggggcagagccggtctcaccccccgcctctccccggcccccgccgccctatggcgagagggagccccctcccaacccgggctcgagcggcggcggcctcaggccgggggtcatcatggaactaattcgctgaccgacccagcggccgcagccgtgcgtcccgctcgagcgccagcgcccgcgcccgcgccccccgatccgcttcccctttctccctcctcagttggccgagtcgtcccgcgcgcaccgcctccgcgcgcctatgagaatgaggtggtaacgggcccccggatgaccccgcgtcaccactgtgaggcctacagctctgccggggaggaggaggaggaggaagaggaggagaaggtagctacagcaagctgggtagcaggcagatccaaaggatatcatgaagtttccagggcctttggaaaaccagagattgtctttcctgttggaaaaggcaatcactagggaagcacagatgtggaaagtgaatgtgcggaaaatgccttcaaatcagaatgtttctccatcccagagagatgaagtaattcaatggctggccaaactcaagtaccaattcaacctttacccagaaacatttgctctggctagcagtcttttggataggtttttagctaccgtaaaggctcatccaaaatacttgagttgtattgcaatcagctgttttttcctagctgccaagactgttgaggaagatgagagaattccagtactaaaggtattggcaagagacagtttctgtggatgttcctcatctgaaattttgagaatggagagaattattctggataagttgaattgggatcttcacacagccacaccattggattttcttcatattttccatgccattgcagtgtcaactaggcctcagttacttttcagtttgcccaaattgagcccatctcaacatttggcagtccttaccaagcaactacttcactgtatggcctgcaaccaacttctgcaattcagaggatccatgcttgctctggccatggttagtctggaaatggagaaactcattcctgattggctttctcttacaattgaactgcttcagaaagcacagatggatagctcccagttgatccattgtcgggagcttgtggcacatcacctttctactctgcagtcttccctgcctctgaattccgtttatgtctaccgtcccctcaagcacaccctggtgacctgtgacaaaggagtgttcagattacatccctcctctgtcccaggcccagacttctccaaggacaacagcaagccagaagtgccagtcagaggtacagcagccttttaccatcatctcccagctgccagtgggtgcaagcagacctctactaaacgcaaagtagaggaaatggaagtggatgacttctatgatggaatcaaacggctctataatgaagataatgtctcagaaaatgtgggttctgtgtgtggcactgatttatcaagacaagagggacatgcttccccttgtccacctttgcagcctgtttctgtcatgtagtttcaacaagtgctacctttgagtgtaaactaaggtagactactttgggaatgagaacatgcaaaatcaggaaaggctgtagaaggaaatataccttaacaggctgatttggagtgagccagaaaaaaaaaataaaactctcattatttgtgtggctaattataattcagcgttatttaagcacataaagaccaaaaaaaaaaaaaaaaaaa

SEQ ID NO: 25405 - DNA, 3243 bp, Homo Sapiens
gaaaggaggagaggaagagaggactaagaggggagcaaggcgaggaggccgcggcgggcgcagcgggcacctgggccgtgctgcccccgcgagcaaggcgccgccattccgctgctcggggcgccgccgccgccgccaccgcgcccaggggccatgctcccgccgcccccgcgccagccgccgccccaggcgcgtgcggcccgcggcgcggtgcgcctgcagcggcccttcctgcgcagcccgctgggcgtgttgcggctgctgcagctgctggccggcgctgccttctggatcactatcgccaccagcaagtaccagggccccgtgcacttcgcgctcttcgtgtccgtgctcttctggctgctcaccctgggcctctacttcctcacgctgctgggcaagcacgagctggtccccgtgctgggctcgcgctggctcatggtcaacgtggcgcacgatgtgctggcggccgcgctctacggcgccgccaccggcatcatgagcgaccagatgcagcgccacagctactgcaacctcaaggattacccgctcccctgcgcctaccacgccttcctggcggccgccgtctgcggcggcgtctgccacggcctctacctgctttcggcgctctatggctgcgggcgtcgctgccagggcaagcaggaggtggcgtgaggccgcccgcgcccgccgcggccccgatcggggcgggggaatccccggagaccagcctccttaatcccttcccccgccgccgccccgcgcgggtgcgccctggcaccctctccctgccctccagcgtttccactgtcgcccgcgcccgggaaccctgacgctcagctcccgcccgacggcagcgccgccgccgcccagaatcccagcccagaatcccgaccgccgcgccggacgcgccgtctcccgggacaagcgcaggctgcgatccgaggggctgacacacactcgcagacgagccgccccgaggcgaaacctcgcggttcctcttcccttccctgctgagactaagacgtggacaggggccgcgcagatccgggggaggctcccaaattggaaccaggcttctggctgcccccttccctcccgccccgtggtcggaagagcactcccttccctggcccctcatccagcctccggtgctgtaaaacgcaggcgctgggccgcgggcggagctgaggacaggccttggctggtcccaggatgagcgacgagtttggttttagctggggattgtgctggcatcctgcgaagctcctcccagccggtctctctgtgctcggttgtcttggggtggggcccatccgccgaggtggggaccgataggagaagccggtgggttgtacccttacacttgtggagtctcctcttgcctctacctactccgcctttgtccttaaggtttttgcaggccagtgccaaacacacactaactgtcctggcctctccgtgacacaagtctcttcccagccttcctcacaggcttctgccgcccccctcatctccaccctcccccatatctgtttgcattaggagttccacgaccatggtggaatgttaaggtgaaccccaccccttcttacagatggggacccagagcctgctcttgggaacagccagagtaagattggaacccagacttgcagtccagcgctgtttgcattaaaagggtgggtgagtcaggacccctggctcaggagccgcctctcctaaaagagggtttcaaggccaaatgggtttgtcaacggtgctgtctccctttcttggagatgctcattagcttatcaaagactgagaagtcccgctgttacagaaataatttagtttgctgtattaactgctcctgggcctggagcagtattcccaccttaagattcccagcatccctgtgctgtcccggctctcattcatgccgaagggcccaacccattggctgtgttctgtttgaagatttggggggcgccttctctttcttccccagggaattctctagcagagggaggggacccaccccagtgaggaagtagattgctgcctctagccagagacctgaactggggaatttgaacattcctttacattgttggagaaatgaagccaaagttattcagatggttttcccaggctaaaggaaagtcacctgcaagagatcccggcactgatctggagcagctgacagggtgggtctcccttaccaaagagaagaaccactctctggcgctggggtgacctgctggctgggcctgtaaggtttccatgttgctgaggccatggagattcccagagctggtcacaccgaccgctctcagggcccgctgccctgggctggcaacaccattctggccttggcctgcagaagctttcagagtcttcactggcagtagggggagatggggagaggaatgatctctgcccagccccttcctttccaaaccatgcaatggaagagcccagatgggtgaagattgattttgccttaactcaagagaattcctgttctccttgtgctatgatttggacacaagattctggatacctggaacttagctgtgtactcctgtaccctaaacagtggatttgagttccagcgtttattcttttttccttttttcagatcaccatctaagttacatctttagctcaggtccatccttctcaagatctccttcttagccccccagcccctggtgctgtctgtggtcaggtgaccttactcaggagcagatatctccttggccgccatggagcctcatccatccacacgtgcctgtagcattccagagctcactgcccttctagatgtgccttcccgcttggcttccagcggcttgtgctcactctgtctgccaggtatgagaagaacacgtaagaccgccaccacactcaccctccctcaaggccctgtgccataggggtggccacccgacctgcccccagaacttttggatactggaggcagttgcataggtctccctctctgggcaccaggactcagtccagcccaagactactctgggcagctcccatcccagtctggggccatttgcagactcaggaaaggatttctacagtgttctataaaagccaaaagagagagtgggtttgggaagagtgagggtggttggggagaggggaccgatgtgcctcattgtttagtggtgattacaaatatgcttttctggataaagtttggttgtttgctcttaaaaaaaaaaaaaaaaaaaaactcga

SEQ ID NO: 25406 - DNA, 2661 bp, Homo Sapiens
tggagacgccgccggccgccgctggcgcatggcgggtaggagctgtggcgcggggccttccaggagtctgagctatgagtggcccctgtggagagaagcctgtcctggaagccagccccaccatgagtctgtgggaatttgaggacagccacagccgtcagggcaccccaaggccgggtcaagagctggccgctgaggaggcctcggccctggaactgcagatgaaggtggacttcttccggaagctgggctattcatccacggagatccacagcgtcctgcagaagctgggcgtccaggcagacaccaacacggtgctgggtgagctggtgaaacacgggacagccaccgagcgggagcgccagacctcaccggacccctgccctcagctccctctagtcccgcggggtggtggcacccctaaggctcccaacctggagcctccactcccagaagaggaaaaggagggcagcgacctgagaccagtggtcatcgatgggagcaacgtggccatgagccatgggaacaaggaggtcttctcctgccggggcatcctgctggcagtgaactggtttctggagcggggccacacagacatcacagtgtttgtgccatcctggaggaaggagcagcctcggcccgacgtgcccatcacagaccagcacatcctgcgggaactggagaagaagaagatcctggtgttcacaccatcacgacgcgtgggtggcaagcgggtggtgtgctatgacgacagattcattgtgaagctggcctacgagtctgacgggatcgtggtttccaacgacacataccgtgacctccaaggcgagcggcaggagtggaagcgcttcatcgaggagcggctgctcatgtactccttcgtcaatgacaagtttatgccccctgatgacccactgggccggcacgggcccagcctggacaacttcctgcgtaagaagccactcactttggagcacaggaagcagccgtgtccctatggaaggaaatgcacctatgggatcaagtgccgattcttccacccagagcggccaagctgcccccagcgctctgtggcagatgagctccgtgccaatgctctcctctcaccccccagagccccaagcaaggacaaaaatggccggcggccttcaccttcatcccagtccagctctctgctaacagagagtgagcagtgcagcctggatgggaagaagctgggggcccaggcatccccagggtcccgccaagagggtctaacacagacctatgccccatcaggcaggagcctcgcacctagcgggggcagtggcagcagctttgggcccacagactggctcccacagacgctggactcactcccgtacgtctcccaggattgcctggactcgggcattggctccctggagagccagatgtcggaactttggggggttcgaggaggaggccctggtgagccgggcccaccccgagccccttacacgggctacagtccctatggatctgagctcccagccaccgcagccttctctgcctttggccgggccatgggtgctggccacttcagtgtccctgccgactacccacccgcgccccctgcctttccacctcgagagtactggtctgaaccatacccactgcccccacccacatcagtccttcaggagcccccagtgcagagcccaggggctggcaggagcccgtggggcagggcagacagcctggccaaggagcaggccagcgtgtatactaagctgtgtggtgtgtttcccccgcacctggtggaggctgtgatggggcgcttcccacagctcctggacccccagcagctggctgccgagatcctctcctacaagtcccagcaccccagtgagtaagctgcctgtggctggcaagggcagcacccccagcctccaagggccgtcaggctgggctttgggccattgagcagcccattcccagccctgaggcccaccccagaggctggacagagggaggattcaagtcgggaaggaaacccacaaaccaaagatactgtaggattggttctggcccatgcagcacctctagctgtctgcctcagtgggtcagaagcgatcaccctgttgatacacattgtatctctgtagtttaaggagacgctgccggtaacggcgtcggtccgtggctgaggcccaaaccgtcttttctctcagagggtggggagggaggtgggggcagcagaggcctgggctgggtgccctgtgcacgccaccccacttccgccctacccctgggacgttggccttggctggctagttgggcaccgtgtgcctgccctccaagggcctcctctacgccaatgaggcctcatctgtgctctcgctgggcacgtggcttcatgtcagtaagcaagatgcttcttaataacccaccttctgccccactctattccttatcctgctgcccctgtaggggtcaagggccctccgtctacaccctcttcttctcctccatcctttattcagagtcatctcgcccttccccatgggtgggggaacctgtgtttgtttgtgtgcacatgtaaattttaaatattttaagcagaaagtccttacctcctgtaacacatcaataaagtacaatcattgtgagccctttcaaaaaaaaaaaaaaaaaaaaaaa

SEQ ID NO: 25407 - DNA, 1591 bp, Homo Sapiens
tctgggcgcgcgcgacgtcagtttgagttctgtgttctccccgcccgtgtcccgcccgacccgcgcccgcgatgctggcgctgcgctgcggctcccgctggctcggcctgctctccgtcccgcgctccgtgccgctgcgcctccccgcggcccgcgcctgcagcaagggctccggcgacccgtcctcttcctcctcctccgggaacccgctcgtgtacctggacgtggacgccaacgggaagccgctcggccgcgtggtgctggagctgaaggcagatgtcgtcccaaagacagctgagaacttcagagccctgtgcactggtgagaagggcttcggctacaaaggctccaccttccacagggtgatcccttccttcatgtgccaggcgggcgacttcaccaaccacaatggcacaggcgggaagtccatctacggaagccgctttcctgacgagaactttacactgaagcacgtggggccaggtgtcctgtccatggctaatgctggtcctaacaccaacggctcccagttcttcatctgcaccataaagacagactggttggatggcaagcatgttgtgttcggtcacgtcaaagagggcatggacgtcgtgaagaaaatagaatctttcggctctaagagtgggaggacatccaagaagattgtcatcacagactgtggccagttgagctaatctgtggccagggtgctggcatggtggcagctgcaaatgtccatgcacccaggtggccgcgttgggctgtcagccaaggtgcctgaaacgatacgtgtgcccactccactgtcacagtgtgcctgaggaaggctgctagggatgttagacctcggccaggacccaccacattgcttcctaatacccacccttcctcacgacctcatttctgggcatctttgtggacatgatgtcacccaccccttgtcaagcattgcctgtgattgcccagcccagattcatctgtgccttggacatggtgatggtgatgggttgccatccaagtgaaagtcttttccttgaccaagggggacagtcagttttgcaaaaggactctaatacctgtttaatattgtcttcctaattgggataatttaattaacaagattgactagaagtgaaactgcaacactaacttccccgtgctgtggtgtgacctgagttggtgacacaggccacagaccccagagcttggcttttgaaacacaactcagggcttttgtgaaggttcccccgctgagatctttcctcctggttactgtgaagcctgttggtttgctgctgtcgtttttgaggagggcccatgggggtaggagcagttgaacctgggaacaaacctcacttgagctgtgcctagacaatgtgaattcctgtgttgctaacagaagtggcctgtaagctcctgtgctccggagggaagcatttcctggtaggctttgatttttctgtgtgttaaagaaattcaatctactcatgatgtgttatgcataaaacatttctggaacatggatttgtgttcaccttaaatgtgaaaataaatcctattttctatggaaaaaaaaaaaaaaaaaaaaaaa

SEQ ID NO: 25408 - DNA, 3440 bp, Homo Sapiens
cgcaatgtggcgctgcggcgggcggcggggcctgtgtgtgctgaggcggctgagcggcggacatgcacaccacagagcgtggcgatggaacagtaaccgggcttgtgagagggctctgcagtataaactaggagacaagatccatggattcaccgtaaaccaggtgacatctgttcccgagctgttcctgactgcagtgaagctcacccatgatgacacaggagccaggtatttacacctggccagagaagacacgaataatctgttcagcgtgcagttccgtaccactcccatggacagtactggtgttcctcacattcttgagcataccgtcctttgtgggtctcagaaatatccgtgcagagaccctttcttcaaaatgttgaaccggtccctctccacgttcatgaacgccttcacagctagtgattatactctgtatccattttccacacaaaatcccaaggactttcagaatctcctctcggtgtatttggatgccacctttttcccatgtttacgcgagctggatttctggcaggaaggatggcggctggaacatgagaatccgagcgacccccagacgcccttggtctttaaaggagtcgtctttaatgagatgaagggagcgtttacagacaatgagaggatattctcccagcaccttcagaacagacttcttcccgaccacacgtactcagtggtctccgggggtgacccactgtgcatcccggagcttacatgggagcagcttaagcagtttcatgccactcactatcacccaagcaatgctaggttcttcacgtacggtaattttccattagaacagcatctgaaacaaattcacgaggaagcactgagcaaattccagaaaattgaaccaagcaccgtggtgccagctcagacaccctgggacaagcctagggaattccagataacatgtggcccggattcatttgctacagatccctctaaacaaacaaccgtcagcgttagcttcctcttaccggacatcaccgacacatttgaagccttcacattaagtcttctgtcttcactcttgacttctgggcccaattctcccttttacaaagccttgattgaatctggccttggcacagacttttctcctgatgttggatataatggctacacgagggaggcctactttagtgtcggcctccaagggattgtggagaaagacattgagaccgtcagaagcctcatagacagaacgattgatgaagtagttgagaaaggatttgaagatgatcgaattgaggctttacttcataaaattgaaatacagatgaaacatcagtctaccagctttgggctgatgctgacatcatacatagcttcttgctggaaccatgatggggaccctgtggagctcttgaagttgggaaatcagttagctaaattcagacagtgcctgcaggaaaatccaaaatttttgcaagaaaaagtaaaacagtattttaagaataaccagcataagctgactttatcgatgaggccagatgacaagtatcacgagaagcaggcacaggtggaagccacgaagctcaagcagaaggtcgaggctctgtcccccggagacaggcagcagatctacgagaaaggtctagaattacggagtcaacaaagcaaacctcaagatgcctcttgtctgccagcgttgaaagtttccgatattgaacccaccatacctgtcacagagttggacgtggtcctgacagctggagatatccctgttcagtactgcgcccagcccaccaatggcatggtgtatttccgggccttctccagcctgaacacactccccgaggagctgaggccctatgtgcccctcttctgcagcgtcctcaccaagctgggctgcggccttcttgactaccgggagcaggctcagcagatagaattgaagaccggagggatgagtgcttctccccacgtgctccccgacgactcacacatggacacctacgagcagggtgtgcttttctcctctctctgcctggatcgaaacctgccagacatgatgcagctatggagtgaaatatttaacaacccgtgctttgaagaagaggagcacttcaaggtgctggtgaagatgaccgcccaggagctcgccaatggaattcctgactctgggcacctgtacgcatccatcagggcaggccggaccctcacgcccgcaggggacctgcaggagaccttcagcgggatggatcaggtgcggctgatgaagaggattgcagaaatgacagatatcaaacccatcctgaggaagctcccacgtatcaagaaacacttgttaaatggtgataatatgaggtgttcagtgaatgcgactcctcagcagatgcctcagacagaaaaagcggtcgaagacttccttagaagcatcggtcggagtaaaaaggaacggaggcctgtgcgcccacacacggtcgagaaacctgtgcccagcagctctggtggagatgcccacgttccccatggctcccaggtcattaggaagctggtcatggaacccaccttcaagccctggcagatgaagactcacttcctgatgcccttcccggtgaattacgtgggtgaatgcatccgaactgtcccctacacggacccagatcatgccagtcttaaaatccttgcacgtttgatgactgccaaattcttgcatacagaaattcgagaaaaaggcggtgcttatggtggaggcgcaaaactcagccacaatgggattttcaccctttactcttacagggacccaaatacaatagagacgctccagtcttttgggaaggctgtcgactgggctaagtctggaaaattcacacagcaagacatcgacgaagccaaactttctgtcttctcaaccatagatgctcctgtcgctccttcagacaaaggaatggaccacttcttgtacggcctctcggatgagatgaagcaggcccacagagagcagctctttgctgtcagccacgacaagctcctggccgtgagcgataggtacctcggcactgggaagagcacacacggcctggccatcctcggacccgagaacccgaaaattgccaaggacccatcctggatcatccgatgagcagccgtggcgctcgactgcacaggagcccgagacaatacacctccgagctgaatatgaaaagtcagaaatgctactgctttttccaagaatattatgtcattgagtgtcgccaaagcccttgactggcgagtcaaaaactcagatctatcttaagagtgaccaggaagaggttcattgaaataatcatgcatgaagcgccaaagatgcaccatgtagaattttcactttgtactggcaggctcgttttacctcattctagaatatttaagaatctaaaaataaagggcaactctgacttaacaaaaaaaaaaaaaaaaaa

SEQ ID NO: 25409 - DNA, 1880 bp, Homo Sapiens
aataagaacaaaatctgcagccacctgggaagcctggcctcagtgtggaagagaaggcagcaggattattacagaaccttgtgaagccaacgcgggcagccgccaggagctgcagaccgagaggatctcgtcctttcttgcggcccagggagaccaggcctttcattctgggctcgagaccaacaattcgaattccgaactccccctgcgtgtgggactcaaggttgcccagggctcacctctgatgggcgggcaggtgagcgcttccaacagcttctcgaggctgcactgcagaaatgccaacgaggactggatgtcggcactgtgtccccggctctgggatgtgcccctccaccacctctccatcccagggagccacgacacgatgacgtactgcctgaacaagaagtcccccatttcgcacgaggagtcccggctgctgcagctgctgaacaaggccttgccctgcatcacgcgccctgtcgtgctgaaatggtccgtcacccaggcactggacgtcacagagcagctggatgccggggtgcggtacctggacctgcggatagcccacatgctggagggctcggagaagaacctgcactttgtccatatggtgtacacaacggcgctggtggaggacacactcacggaaatctcggagtggctggagcggcatccacgcgaggtggtcatcctggcctgcagaaacttcgaggggctgagcgaggacctgcacgagtacctggtcgcctgtatcaagaacatcttcggggacatgctgtgtcctcgtggggaggtgccgacactgcggcagctgtggtcccggggccaacaggtcatcgtctcctatgaagacgagagctccttgcgccggcaccacgagctgtggccaggagtcccctactggtggggaaacagggtgaagaccgaggccctcatccgatacctggagaccatgaagagctgcggccgcccaggagggttgttcgtggccggcatcaacctcacggagaacctgcagtacgttctggcgcacccgtccgagtccctggagaagatgacgctgcccaaccttccgcggctgagcgcgtgggtccgagagcagtgcccggggccgggttcacggtgcaccaacatcatcgcgggggacttcatcggcgcagacggcttcgtcagtgacgtcatcgcgctcaatcagaagctgctgtggtgctgacgggacccttctgaagttcgggacgcggcggctgcagtttcacccccgaatttccaagtattgtgactttgtttgggccaaatgttggtgatcataggaccgatgataatacgttttcattttcccaaagtgctgggatgacaggcgtgagccaccgcgcccggcctatacctcattttctacatgtcgcttgttggagctgctggttcaagttcccagccagccaatggatgccagcaccatttttactcccctttcccaagcaaatcgtgcatttttgtctaacgagagacatcagtttctcaggatgatcctcaagaacgttatggagtccatgttgcaataggttctctttgggacctaatgactcattttccaaaaatccgcttctacttttggtacccggttgctacggtgaaatgaaggtgccccgcatccagaaagacgcactcctggaccacaaccggcggctacctcagccccacggctctgcaggatcagggctcgggcaggccccgcggagatgaagaatttgcagggagcctccctgacttccgtcggctgtgaatccttgtctgtcaggggcgtatccacaaaatcaccgaattcatacagatcgtttaaataaatgaacatcattaaagtcaaaaaaaaaaaaaaaaaa

SEQ ID NO: 25410 - DNA, 1209 bp, Homo Sapiens
actggccataggagctgggccactccagacattaatccccaccccaacagagccactggcacaagtgcccttagtgctgccacactccctggcagccaggtgccctggtgcccacccctgtcgagcccctaaggatggggaggtgggggggcaggagcttctgtcccccacattccatgcacctcccctctgtatatagcatctcccccctcctagtgagcaggggcctgcaaggcatcactcccagcccctcgccttctagggcaccctcagcaaaggggcaggtggggacactccaagtggggcagctctccgtacatgcgccccacccccatgagccagttcagccctactgggggctgagcgggggcatcccctcctttgtacatagtctccatggatgtccctgccctgtagccaccagccccttgctgctctccctttaatgccatatggcccctgcctagggcacaggccccaacctgtgtgctggggtccccagcagcaaacactggaaagtctgttttttttttttctttcttcttccccaccccttaattttaactttgtggtaactgagtgcccccgcgtgcctgcgtgttgagtgtgtgggcggcagtgccgttccggaggcctggtccatctggagttttgaggggtgaggggaccagagcagtgggaccagcatggggatcagcttcccttccccacctggagccagggactgtccgggtagccagttttggtcctgccagctgcctccctgatccctccccactctcgccccttctctatgaacttaaatcaaaaaccacttccctccatctcctcctgctcctgcgtggagggggaatgtgtgctggctagggtggaggactgagcacctgagcctggggctggctccccggggtccccgactcagctggtggctgtggagctgagtcccctccccgtaacctctgcaaggccagcacccaccatcactacctgcacctgctgtggtcccaccctctggaggcctgggaacctggctgcagcctgggaaggctggagaggcagacggtgggacccaccagctctctccccatcccgcttcttccctgggggccaggccctacctgtgtggtggtgggtgggctgtcaagacgtgtcatgtacatttgtatcaaaaataaagaagtgaccatgaaaaaaaaaaaaaaaaaaaaa

SEQ ID NO: 25411 - DNA, 2212 bp, Homo Sapiens
gctgagtccaagagatagcaaatcgagtcttaaataatccggggagaaagacgcccgggtagatttgaggtgcagccttggagggagggattagaagccgctagactttttttcctcccctctcagtagcacggagtccgaattaattggatttcattcactggggaggaacaaaaactatctgggcagcttcattgagagagattcattgacactaagagccagcggctgcagctgggtgcagagagaacctccggctttacttctgtctcgtctgccccaaccgctagcctcggcttgggtaaggcgaggcggaattaaaccccgctccgagagcggcagcttcgcgcgcggtgcgctcggcctatgcctgccccgaggggcgtctggtaggcaccccgccctctcccgcagctcgacccccatgatagatacgctcagacccgtgcccttcgcgtcggaaatggcgatcagcaagacggtggcgtggctcaacgagcagctggagctgggcaacgagcggctgctgctgatggactgccggccgcaggagctatacgagtcgtcgcacatcgagtcggccatcaacgtggccatcccgggcatcatgctgcggcgcctgcagaagggtaacctgccggtgcgcgcgctcttcacgcgcggcgaggaccgggaccgcttcacccggcgctgtggcaccgacacagtggtgctctacgacgagagcagcagcgactggaacgagaatacgggcggcgagtcggtgctcgggctgctgctcaagaagctcaaggacgagggctgccgggcgttctacctggaaggtggcttcagtaagttccaagccgagttctccctgcattgcgagaccaatctagacggctcgtgtagcagcagctcgccgccgttgccagtgctggggctcgggggcctgcggatcagctctgactcttcctcggacatcgagtctgaccttgaccgagaccccaatagtgcaacagactcggatggtagtccgctgtccaacagccagccttccttcccagtggagatcttgcccttcctctacttgggctgtgccaaagactccaccaacttggacgtgttggaggaattcggcatcaagtacatcttgaacgtcacccccaatttgccgaatctctttgagaacgcaggagagtttaaatacaagcaaatccccatctcggatcactggagccaaaacctgtcccagtttttccctgaggccatttctttcatagatgaagcccggggcaagaactgtggtgtcttggtacattgcttggctggcattagccgctcagtcactgtgactgtggcttaccttatgcagaagctcaatctgtcgatgaacgatgcctatgacattgtcaaaatgaaaaaatccaacatatcccctaacttcaacttcatgggtcagctgctggacttcgagaggacgctgggactcagcagcccatgtgacaacagggttccagcacagcagctgtattttaccaccccttccaaccagaatgtataccaggtggactctctgcaatctacgtgaaagaccccacacccctccttgctggaatgtgtctggcccttcagcagtttctcttggcagcatcagctgggctgctttctttgtgtgtggccccaggtgtcaaaatgacaccagctgtctgtactagacaaggttaccaagtgcggaattggttaatactaacagagagatttgctccattctctttggaataacaggacatgctgtatagatacaggcagtaggtttgctctgtacccatgtgtacagcctacccatgcagggactgggattcgaggacttccaggcgcatagggtagaaccaaatgatagggtaggagcatgtgttctttagggccttgtaaggctgtttccttttgcatctggaactgactatataattgtcttcaatgaagactaattcaattttgcatatagaggagccaaagagagatttcagctctgtatttgtggtatcagtttggaaaaaaaatctgatactccatttgattattgtaaatatttgatcttgaatcacttgacagtgtttgtttgaattgtgtttgttttttcctttgatgggcttaaaagaaattatccaaagggagaaagagcagtatgccacttcttaaaacagaacaaaacaaaaaaaaaaaaaaaaaa

SEQ ID NO: 25412 - DNA, 887 bp, Homo Sapiens
gctcggggggccgctggagtgcccagcgggaacccgaaagtttgtaagaggaagagagcgcgcggcgagcgagcgagcgggccgggggcagcggcagcggcgccggggaccatggtgctgccggcgcctcctccgcgggcgtgaaggcggcgctcctactccctccccggactccgcggtgtcccagaagcttttgttgacaattccagtttccgaacaaaacatttcggcaatggtgagggcttcgatcccttctctgatttgctgtcagccatgaacggatggatgtgatgcctgctagccaaaaggcttccctctgtgtgttgcagtcctgtggcattatgcatgccccctcccagtgaccccaggctttttatggctgtgagacacgttaaaatttcaggggtaagacgtgaccttttgaggtgactataactgaagattgctttacagaagccaaaaaaggtttttgagtcatgatgcaagaatctgggactgagacaaaaagtaacggttcagccatccagaatgggtcgggcggcagcaaccacttactagagtgcggcggtcttcgggaggggcggtccaacggagagacgccggccgtggacatcggggcagctgacctcgcccacgcccagcagcagcagcaacagtggcatctcataaaccatcagccctctaggagtcccagcagttggcttaagagactaatttcaagcccttgggagttggaagtcctgcaggtccccttgtggggagcagttgctgagacgaagatgagtggacctgtgtgtcagcctaacccttccccattttgaataaaattattctttggagaaaaaaaaaaaaaaaaaaaaaaaaaaaaaaaaaaaaaaaaaaaaaaa

SEQ ID NO: 25413 - DNA, 964 bp, Homo Sapiens
ggagaacacagaccctgccagtgagagaggaaatgccagctcttctcagaaagaaaaggtcctccctgaggcgggggccggagaggacagtcctgggagaaacatggacactgcacttgaagagcttcagttgcccccaaatgccgaaggccacgtaaaacaggtctcgccacggaggccgcaagcaacagaggctgttggccggccgactggccctgcaggcctgagaaggacccccaacaagcagccatctgatcacagctatgcccttttggacttagattccctgaagaaaaaactcttcctcactctgaaggaaaatgaaaagctccggaagcgcttgcaggcccagaggctggtgatgcgaaggatgtccagccgcctccgtgcttgcaaagggcaccggggactccaggccagacttgggccagagcagcagagctgagccccacaggctccggacgcagaggtggcagtggcaccagggccggcagagctttggagctctggctgtggacatttttgtctgctgtggacactgagaaagttggccatgaggcctgcttggccggggatcgagacagtagccaagctccccggcgagagccccaatgccgtctgggggacgtttagaggcgtggcactaggagtgcacatctgtgagcatgacaagcttatcctcccatggtaacagaagtccaggctgaggctgattctggacgctgtcctttcagcacacgcagagcaaagatcgttggaagccccagtgtgggagatgctcctcagggaggaagccatgtgagggggctggctctgtggcgggtgagtggtcccctcctccatcagcctggacagccgctcggggttctaaggagtgactcctgtcccggcctggtgtgagtgggcagtgtaataaagtgtctttctataaaaaaaaaaaaaaaaaaaaaaaaaaaaaaaaaaa

SEQ ID NO: 25414 - DNA, 1788 bp, Homo Sapiens
gcggcggcaggcgggcaagcgggcgggtgccgcagcccaggcccgggtcgcgcctctttgtttccacgggtagcggcgcagtcccgggccccgggcggaagtgagacgcgctcggcgcgggggccgcggcggccgcaccatgagcgacatccgccactcgctgctgcgccgcgatgcgctgagcgccgccaaggaggtgttgtaccacctggacatctacttcagcagccagctgcagagcgcgccgctgcccatcgtggacaagggccccgtggagctgctggaggagttcgtgttccaggtgcccaaggagcgcagcgcgcagcccaaggagcaaaccaaggactctgttcggcagattattttttcatcccttttcagccctcaagggaacaaagccgatgacagccggatgagcttgttgggaaaactggtctccatggcggtggctgtgtgtcgaatcccggtgttggagtgtgctgcctcctggcttcagcggacgcccgtggtttactgtgtgaggttagccaaggcccttgtagatgactactgctgtttggtgccgggatccattcagacgctgaagcagatattcagtgccagcccgagattctgctgccagttcatcacctccgttaccgcgctctatgacctgtcatcagatgacctcattccacctatggacttgcttgaaatgattgtcacctggatttttgaggacccaagcgtcctgcaagtgctcatgacgctgcagctgcacctgaccgagaagaatctgtatgggcgcctggggctgatcctcttcgaccacatggtcccgctggtagaggagatcaacaggttggcggatgaactgaaccccctcaacgcctcccaggagattgagctctcgctggaccggctggcgcaggctctgcaggtggccatggcctcaggagctctgctgtgcacgagagatgacctgagaaccttgtgctccaggctgccccataataacctcctccagctggtgatctcgggtcccgtgcagcagtcgcctcacgccgcgctccccccggggttctacccccacatccacacgcccccgctgggctacggggctgtcccggcccaccccgccgcccaccccgccctgcccacgcaccccggccacaccttcatctccggcgtgacctttcccttcaggcccatccgctaggctggcccgtgtgtgccttctgcgctctcgctggacgaagcctttcgagatggaaggggtggccggactcccagaagagaacctcggggaaggggtcgggcagcccctccccgccggcagaaccgtcttggtgtcacggagtccaggtgcttcccacccggtcgcattctttgacatgcagattggatggtggagggaagagtccagcctctgccgagagcctgctgcgtgcatttttaaaagatgccgatcctgggagcctctgttctctgcgcatttcagacacagcctgtgtggcgaggagtgtgacggcaggagccacgggtgcaagcccgtgtgtctggcctctttcctcgtgaagacgatgtgtccccgccagaaaaagtgggctccttctgcagccccgtgagctgagcccaggctgcgtagtgaccacaagcttatgtgcagcactgctcagggaggctgtcaggaattcccctcacctcggaaaggaacttctcagttttattgggggtgtctaaatttcctttcatatgttcaaataaatttttctaaacagtaaaaaaaaaaaaaaaaaaaaaaaaaaa

SEQ ID NO: 25415 - DNA, 1406 bp, Homo Sapiens
gagaacacaagaggacagagctaaggtgtaggaatgcggaagaacttgcagaaactagagctagtcttcggattgaaatgaattaccaataaagggttgggaaatggatcaaggagagggaagcgttttgatggtccctgctccgaggttcagcccatttgcagttgctgataaccttgtcaggtcaccagataaaggcaagtcttgtcaccctcaggcacctggctgcgaagtaataaaacggttgccttatcatctaaaggtggagtgagtcaaacctcagcccagggtaattatagtaaactgaaattgcctgtcctttacaaaaaaaaaggcggagggagagagaaaggaaaagggcttaaggcaggaaattgtgtttgtctttctccttggatttaaaaaagaaacgagcaaaacagcaaaaagttttccagggagtgagaaaagcagcccggctagactcccctcaccctgggttaacaggattgccgacagatcaggcccacgtgatggtcaagaaaagaggctcaagctgatgaaaatccaagaaatcttcttaggagccttcctttctaaatgtaaatgactgagtcattgctttgctaaggagggaaggaagttacaatcacaccaagtgactcattcattgctgttagctccggcagttggatgaaaagttttagcaaaagcagcaacaaatgtactttaaatactagcacagtaagggaattcctgtctttcaggatgaatgccatccacacaaaagagctcctgttgacatctcatttacaatctcccccaggacacagacaagaccctttcaataaatccagctcagaaacacctattgttcaaaatcttcaactcgccacaggctaccaccactccctatggctttgcaaaattaaagatttagaagaaggatggggcggtggaagctatgaaaagaggcaggaaaaaagttcctttgacccgatgctgtcagagagcgtgcatgaagaagaaagttaatggtatttccatttatataagaagcgcctaagaaatgcctgtgacgttcgtgaactagtgattgtgaattccaaatttgatgccaactttatgtgtaaagaagctaactcctgccaacatcgtggctgaatgaacagctgggactatgcttaacccattcccagcttataaaagccccatggcagctgcagtgaagcatcaggtgagtctgatatgggctgtctgttccctcggggatttgaatcttgcctgtcctttccaagtggagtcttgtgcctaagtgctagagcccactccttcctccccactgattcccttctttccatttctgccatttcccttcttcttttaataaaacttggacattttctggaaaaaaaaaaaaaaaaaaa

SEQ ID NO: 25416 - DNA, 2492 bp, Homo Sapiens
gcggtatggcgtcgggctgcaagattggcccgtccatcctcaacagcgacctggccaatttaggggccgagtgcctccggatgctagactctggggccgattatctgcacctggacgtaatggacgggcattttgttcccaacatcacctttggtcaccctgtggtagaaagccttcgaaagcagctaggccaggaccctttctttgacatgcacatgatggtgtccaagccagaacagtgggtaaagccaatggctgtagcaggagccaatcagtacacctttcatctcgaggctactgagaacccaggggctttgattaaagacattcgggagaatgggatgaaggttggccttgccatcaaaccaggaacctcagttgagtatttggcaccatgggctaatcagatagatatggccttggttatgacagtggaaccggggtttggagggcagaaattcatggaagatatgatgccaaaggttcactggttgaggacccagttcccatctttggatatagaggtcgatggtggagtaggtcctgacactgtccataaatgtgcagaggcaggagctaacatgattgtgtctggcagtgctattatgaggagtgaagaccccagatctgtgatcaatctattaagaaatgtttgctcagaagctgctcagaaacgttctcttgatcggtgaaaccataaggagcccagtgttcctgttcatgaaatctcccttttactggaaaacaggaatattgactaccaaatcacaatgcaattgaagccgtactgcttttttgagcagttattcattccagtgattaaaactgattgtgcagaatattctaagaggtcagaaattggtgtgtataactacatttttagtgatgcaatttattgattagtgagtaagatactgtttttattgagagatttgatttttataaagtaaaaatacggctgcattagggttacaaacagaaaagtgtcttaatgtctaaggagggcatattagctacactacaaaaacaaattttgtctgtacttctgaaaagaattttgttgtttctcagctgttttccaaaagcaaaggaagtctttatggtttttttctatttcatgttattgtgatttgtttataagtttgggtggggtgcataccatattcttggttcttaaaatctatcacttttcaccttacacttgatgtgtgaaaactataaaaacaatgtgtgaaacccaggggttctaaaatacaagcatagattttatcagggtgttttgtcaaagcaggttattcagtgattcctccccaccattcttaagaacgttaaataatgctgttgtgttagctctgagtagaaaggaaaaagtaaaacctctgtttggaggtaatattgggttgaattctgactgcccctttctagctggacctttaacaaatcacccaatcttttttgtgtttctctaaagtcatttatacattaaatgtaattatagcaactgtggggttctgttgagaattaagagctaacactatatatgtaaagtttccagtactagtcccagaatttagaatatgctcaacacaaagtaaacagcattatataagtttatatttttgtgagttataaagtactttgatatattctcattaaatctgtaaatcacctctataagtaagtggtaataataaagcagatatttttgtccccatttaaaaaatgaagaaattaatgcttaatagggtggtaccctggaaaggatctgggaagtggtagaatttctggtctgtacttttacaaatggagcccttgggaggtgggttaggtaaaagaagctttttacttaacgttgtcttatttccagtctaattttacgctgtagcagaaccagatggctgagaaaattctggaactatggatcttgaccccaaggatatattattttattccaagaaagatcaggtaggcgaaaagatgacaggatacagagtcaatccataaactaaatatttataactgttctgaattatacagagtctaaaaatatgtgtcagctacttcattcctgtaaatactcttgctgtgttataaatatggcaagaaataaacatgaccaatatcaatagacttcttgaggctactataagttttgagaaataaggttcaaaaaataagaatgctaacacttaagcacagactagagcttgcttgggtttcttcctgcattacaaggtaaaaatttgttaatgtttgtttttattcagcttgggaaagctttgtgccatgaatacgtcgcatttaataacaagcaacacacggcatatagaaataactttaattaaaaaacttacatagaagattataatatcagacgtgacaaagatttgagtttatttgcctggacaacttgggtttgtctggcttttgttttctttttctttaaaaataaatgtacagtaaaactaaaaaaaaaaaaaaaaaaaaaaaaa

SEQ ID NO: 25417 - DNA, 1577 bp, Homo Sapiens
tggttttgtcatgtggaaagtgatgcgtgggcgttccctgataaaggcaccttggggcttccctgccgcatcctctcccctcaggaaggggactgacctgggcttgggggaagggacgtcagcaaggtggctctgaccctcccaggtgactctgccaagcagctgtggcccccagggctaccctacacaacgccctccccaggcccccctaagctgctctcccttggaacctgcacagctctctgaaatggggcattttgttgggaccagtgacccctggcatggggaccacaccctggagcccggtgctggggacctcctggacaccctgtccttcactcctttgccccagggacccaggctcatgctctgaactctggctgagaggatgctgctcaggagccagcacaggacaccccccaccccaccccaccatgtccccattacaccagagggccatcgtgacgtagacaggatgccaggggcctggccagcctcccccaatgctggggagcatccctgggcctggggccacacctgctgccctccctctgtgtggtccaagggcaagagtggctggagccgggggactgtgctggtctgagccccacgaaggccttgggctgtgcgtccgaccctgctgcagaaccagcagggtgtcccctcgggcccatctgtgtcccatgtcccagcacccaggcctctctccaggtctccttttctggtcttttgccatgagggtaaccagctcttcccagctggctggggactgtcttgggtttaaaactgcaagtctcctaccctgggatcccatccagttccacacgaactagggcagtggtcactgtggcacccaggtgtgggcctggctagctgggggccttcatgtgcccttcatgcccctccctgcattgaggccttgtggacccctgggctggctgtgttcatccccgctgcaggtcgggcgtctccccccgtgccactcctgagactcccaccgttacccccaggagatcctggactgcctgactcccctccccagactggcttgggagcctgggccccatggtagatgcaagggaaacctcaaggccagctcaatgcctggtatctgcccccagtccaggccaggcggaggggaggggctgtccggctgcctctcccttctcggtggcttcccctacgccctgggagtttgatctcttaagggaacttgcctctccctcttgttttgctcctggccctgcccctaggtctgggtgggcagtggccccatagcctctggaactgtgcgttctgcatagaattcaaacgagattcacccagcgcgaggaggaagaaacagcagttcctgggaaccacaattatggggggtggggggtgtgatctgagtgcctcaagatggttttcaaaaaaatttttttaaagaaaataattgtatacgtgtcaacacagctggctggatgattgggactttaaaacgaccctctttcaggtggattcagagacctgtcctgtatataacagcactgtagcaataaacgtgacattttataacgaaaaaaaaaaaaaaaaaa

SEQ ID NO: 25418 - DNA, 1380 bp, Homo Sapiens
cctcggatcacagtctcttctcactacagtgtcgccgcctctgcctgcgtagccccggccatggctctgtagcctcgacccctttgtgcccccggcccgtctccgcgctcaccacgcctgcgctctccgctcccaccttctttcttcagccgaggccgccgccgcctctccttgctgcagccatggagtcttccactttcgccttggtgcctgtcttcgcccacctgagcatcctccagagcctcgtgccagctgctggtgcagcctctcctgttgccatcagtgcccagcacctgtgctacagccatgtcactcctggcgaccctggggctggagctggacagggccctgctcccagctagtgggctgggatggctcgtagactatgggaaactccccccggcccctgcccccctggctccctatgaggtccttgggggagccctggagggcgggcttccagtggggggagagcccctggcaggtgatggcttctctgactggatgactgagcgagttgatttcacagctctcctccctctggagcctcccctaccccccggcaccctcccccaaccttccccaaccccacctgacctggaagctatggcctccctcctcaagaaggagctggaacagatggaagacttcttcctagatgccccgctcctcccaccaccctccccgccgccactaccaccaccaccactaccaccagccccctccctccccctgtccctcccctcctttgacctcccccagccccctgtcttggatactctggacttgctggccatctactgccgcaacgaggccgggcaggaggaagtggggatgccgcctctgcccccgccacagcagccccctcctccttctccacctcaaccttctcgcctggccccctacccacatcctgccaccacccgaggggaccgcaagcaaaagaagagagaccagaacaagtcggcggctctgaggtaccgccagcggaagcgggcagagggtgaggccctggagggcgagtgccaggggctggaggcacggaatcgcgagctgaaggaacgggcagagtccgtggagcgcgagatccagtacgtcaaggacctgctcatcgaggtttacaaggcccggagccagaggacccgtagctgctagaagggcaggggtgtggcttctgggggctggtcttcagctctggcgccttcatccccctgcctctaccttcattccaaacccctctcggccgggtgcagtggcttatgcttgtaatcccagcactttgggaggccaaggcaggaggatcgtttgaggccaggaggtcaataccagcctgggcaacatagtaagaccctgtctctattaaaaaaaaaaaaaaaaaaa

SEQ ID NO: 25419 - DNA, 1011 bp, Homo Sapiens
gcgcgtggcggcggtggcggctgcggcaacagcggggccgatgtgtagttggtgactgcctctccagatgctgaggtgcctgtatcattggcacaggccagtgctgaaccgtaggtggagtaggctgtgccttctgaagcagtatctattcacaatgaagttgcagtctcccgaattccagtcacttttcacagaaggactgaagagtctgacaggtataaatgctttccatgagaactgaaggaagaaggaaataggagttgcctccattgtgcacgttgcaaaacctgtctggaaggagcataggaaatggctttagctaagtgcctgactccagtagcttcttgctgttgccacagtttcattagtgttgattctcaatgttgtctgctgatgttgctaaagcagccacacagtagcattacaaagcctgtgggaattttaatagcaccttcataaatatatttagtagtatatgtagaaatatgacctatacagcactggctatctattagattcacctggggagcttttaaagcacacatgctcgggttctacctgcagcctactgaattagaatctctgggtgggatgaccatctatatttttaataaaagctccacaagttaattctgatgcacagaagatagacgaaccattactttaacatgactcaccttgtattagcttattctcaaagctactttcccattcttgaaattggatgatggctttttaggtatgtgccagagataaatggcccagaatatgttgattcttttagattgttttaggcagactttaagtagagggcttaaatgcatgtttggttttgccgatgcttcactatcttttttaattggagagagtgaaaattgctaaaaattgctgtccaatagaaatttatgagcccatatgtaatataaacttttttactaaccacattaaaaagatagaaatggtgaaataaattttaataactaaaaaaaaaaaaaaaaaaaaaaaaaaaaa

SEQ ID NO: 25420 - DNA, 1972 bp, Homo Sapiens
gagtaccagctccccactgccctgagggcgggccggcctgcggcggagggaaaaaggaagaggagaaggaaattgtcccgaatccctgcagtctttctgtaggttgcggcacaacgccaggcaaaagaagaggaaggaatttaatcctaatcggtggaggtcgatttgagggtctgctgtagcaggtggctccgcttgaagcgagggaggaagtttcctccgatcagtagagattggaaagattgttgggagtggcacaccactagggaaaagaagaaggggcgaactgcttgtcttgaggaggtcaacccccagaatcagctcttgtggccttgaagtggctgaagacgatcaccctccacaggcttgagcccagtcccacagccttcctcccccagcctgagtgactactctattccttggtccctgctattgtcggggacgattgcatgggctacgccaggaaagtaggctgggtgaccgcaggcctggtgattggggctggcgcctgctattgcatttatagactgactaggggaagaaaacagaacaaggaaaaaatggctgagggtggatctggggatgtggatgatgctggggactgttctggggccaggtataatgactggtctgatgatgatgatgacagcaatgagagcaagagtatagtatggtacccaccttgggctcggattgggactgaagctggaaccagagctagggccagggcaagggccagggctacccgggcacgtcgggctgtccagaaacgggcttcccccaattcagatgataccgttttgtcccctcaagagctacaaaaggttctttgcttggttgagatgtctgaaaagccttatattcttgaagcagctttaattgctctgggtaacaatgctgcttatgcatttaacagagatattattcgtgatctgggtggtctcccaattgtcgcaaagattctcaatactcgggatcccatagttaaggaaaaggctttaattgtcctgaataacttgagtgtgaatgctgaaaatcagcgcaggcttaaagtatacatgaatcaagtgtgtgatgacacaatcacttctcgcttgaactcatctgtgcagcttgctggactgagattgcttacaaatatgactgttactaatgagtatcagcacatgcttgctaattccatttctgacttttttcgtttattttcagcgggaaatgaagaaaccaaacttcaggttctgaaactccttttgaatttggctgaaaatccagccatgactagggaactgctcagggcccaagtaccatcttcactgggctccctctttaataagaaggagaacaaagaagttattcttaaacttctggtcatatttgagaacataaatgataatttcaaatgggaagaaaatgaacctactcagaatcaattcggtgaaggttcactttttttctttttaaaagaatttcaagtgtgtgctgataaggttctgggaatagaaagtcaccatgattttttggtgaaagtaaaagttggaaaattcatggccaaacttgctgaacatatgttcccaaagagccaggaataacaccttgattttgtaatttagaagcaacacacattgtaaactattcattttctccaccttgtttatatggtaaaggaatcctttcagctgccagttttgaataatgaatatcatattgtatcatcaatgctgatatttaactgagttggtctttaggtttaagatggataaatgaatatcactacttgttctgaaaacatgtttgttgctttttatctcgctgcctagattgaaatattttgctatttcttctgcataagtgacagtgaaccaattcatcatgagtaagctcccttctgtcattttcattgatttaatttgtgtatcatcaataaaattgtatgttaatgctggaaaaaaaaaaaaaaaaaaaaaaaaaaaaa

SEQ ID NO: 25421 - DNA, 1134 bp, Homo Sapiens
aggttcgtgacccttgagaaaagagttggtggtaaatgtgccacgtcttctaagaagggggagtcctgaacttgtctgaagcccttgtccgtaagccttgaactacgttcttaaatctatgaagtcgagggacctttcgctgcttttgtagggacttctttccttgcttcagcaacatgaggcttttcttgtggaacgcggtcttgactctgttcgtcacttctttgattggggctttgatccctgaaccagaagtgaaaattgaagttctccagaagccattcatctgccatcgcaagaccaaaggaggggatttgatgttggtccactatgaaggctacttagaaaaggacggctccttatttcactccactcacaaacataacaatggtcagcccatttggtttaccctgggcatcctggaggctctcaaaggttgggaccagggcttgaaaggaatgtgtgtaggagagaagagaaagctcatcattcctcctgctctgggctatggaaaagaaggaaaaggtaaaattcccccagaaagtacactgatatttaatattgatctcctggagattcgaaatggaccaagatcccatgaatcattccaagaaatggatcttaatgatgactggaaactctctaaagatgaggttaaagcatatttaaagaaggagtttgaaaaacatggtgcggtggtgaatgaaagtcatcatgatgctttggtggaggatatttttgataaagaagatgaagacaaagatgggtttatatctgccagagaatttacatataaacacgatgagttatagagatacatctacccttttaatatagcactcatctttcaagagagggcagtcatctttaaagaacattttatttttatacaatgttctttcttgctttgttttttatttttatatattttttctgactcctatttaaagaaccccttaggtttctaagtacccatttctttctgataagttattgggaagaaaaagctaattggtctttgaatagaagacttctggacaatttttcactttcacagatatgaagctttgttttactttctcacttataaatttaaaatgttgcaaaaaaaaaaaaaaaaaaaaaaaaaaaaaa

SEQ ID NO: 25422 - DNA, 926 bp, Homo Sapiens
gtcctatcatcgcaaaactcatgatgctccggctgctcagttccctcctccttgtggccgttgcctcaggctatggcccaccttcctctcgcccttccagccgcgttgtcaatggtgaggatgcggtcccctacagctggccctggcaggtttccctgcagtatgagaaaagtggaagcttctaccacacgtgtggcggtagcctcatcgcccccgactgggttgtgactgccggccactgcatctcgagctcctggacctaccaggtggtgttgggcgagtacgaccgtgctgtgaaggagggccccgagcaggtgatccccatcaactctggggacctctttgtgcatccactctggaaccgctcgtgtgtggcctgtggcaatgacatcgccctcatcaagctctcacgcagcgcccagctgggagacgccgtccagctcgcctcactccctcccgctggtgacatccttcccaacgagacaccctgctacatcaccggctggggccgtctctataccaacgggccactcccagacaagctgcaggaggccctgctgcccgtggtggactatgaacactgctccaggtggaactggtggggttcctccgtgaagaagaccatggtgtgtgctggaggggacatccgctccggctgcaacggtgactctggaggacccctcaactgccccacagaggatggtggctggcaggtccatggcgtgaccagctttgtttctgcctttggctgcaacacccgcaggaagcccacggtgttcactcgagtctccgccttcatcgactggattgaggagaccatagcaagccactagaaccaaggcccagctggcagtgctgatcgatcccacatcctgaataaagaataaagatctcccaaaaaaaaaaaaaaaaaaaaaaaaaaaaaa

SEQ ID NO: 25423 - DNA, 1599 bp, Homo Sapiens
aagctataacatttgcctttttattgcaggttttcctttggaatatggataaatacaccatgatacggaaactagaaggacatcaccatgatgtggtagcttgtgacttttctcctgatggagcattactggctactgcatcttatgatactcgagtatatatctgggatccacataatggagacattctgatggaatttgggcacctgtttcccccacctactccaatatttgctggaggagcaaatgaccggtgggtacgatctgtatcttttagccatgatggactgcatgttgcaagccttgctgatgataaaatggtgaggttctggagaattgatgaggattatccagtgcaagttgcacctttgagcaatggtctttgctgtgccttctctactgatggcagtgttttagctgctgggacacatgacggaagtgtgtatttttgggccactccacggcaggtccctagcctgcaacatttatgtcgcatgtcaatccgaagagtgatgcccacccaagaagttcaggagctgccgattccttccaagcttttggagtttctctcgtatcgtatttagaagattctgccttccctagtagtagggactgacagaatacacttaacacaaacctcaagctttactgacttcaattatctgtttttaaagacgtagaagatttatttaatttgatatgttcttgtactgcattttgatcagttgagcttttaaaatattatttatagacaatagaagtatttctgaacatatcaaatataaatttttttaaagatctaactgtgaaaacatacatacctgtacatatttagatataagctgctatatgttgaatggacccttttgcttttctgatttttagttctgacatgtatatattgcttcagtagagccacaatatgtatctttgctgtaaagtgcaaggaaattttaaattctgggacactgagttagatggtaaatactgacttacgaaagttgaattgggtgaggcgggcaaatcacctgaggtcagcagtttgagactagcctggcaaacatgatgaaaccctgtctctactaaaaatacaaaaaaaaaaaaaaattagccaggcgtggtggtgcacacctgtagtcctagctacttgggaggctgaggcaggagaattgcttgaacccaggaggtggaggttgcagtaagccaagatcacaccactgcactccaacctggacaacagagcgagactccatcttaaaaaaaaaaaaaaaaattgtgttgcctcatacgaaatgtatttggttttgttggagagtgtcagactgatctggaagtgaaacacagtttatgtacagggaaaaggattttattatccttaggaatgtcatccaagacgtagagcttgaatgtgacgttatttaaaaacaacaacaaagaaggcagagccaggatataactagaaaaaggatgtcttttttttttttttttttttactccccctctaaacactgctgctgccttaattttagaaagcagcttactagtttacccttgtggtataaagtattataaaaaaaaaaaaaaaaaaaaaaaaaaaaa

SEQ ID NO: 25424 - DNA, 965 bp, Homo Sapiens
cagcttgtcctctatgacttacccagaaggcaacgcttctctttctggtcaaaatggctggtaagcaggccgtttcagcatcaggcaagtggctggatggtattcgaaaatggtattacaatgctgcaggattcaataaactggggttaatgcgagatgatacaatatacgaggatgaagatgtaaaagaagccataagaagacttcctgagaacctttataatgacaggatgtttcgcattaagagggcactggacctgaacttgaagcatcagatcttgcctaaagagcagtggaccaaatatgaagaggaaaatttctaccttgaaccgtatctgaaagaggttattcgggaaagaaaagaaagagaagaatgggcaaagaagtaatcatgtagttgaagtctgtggatgcagctgttatgaagatggttaaacttgaaacaaacaattttaagaattatttggtctgaagatgttttactttaaataaatgtctattgtaatggctggagtttttgaattccaaaccttatactgaataactactgaatccctttactgttaaatttttttccaaactttcaagatatatttagttgtgtttaactgctacttggagctcagaagccactttatcagttttcctcactggttggatagcctatcagtttatggaaggatataacttccgtaagttacatccttatggaagctactgaataaaagaagggggtatgcaccccctagtttgccaagattgagaaatagcctcttcactggtatgcaaacagatttgattttgcatcctatcatttaaaaagaaattatgtctgcaccccaacataggcatacttaagtaatatacatactcctgtgctaacatgtatactagaaaacaaaaagatgttagaaaaataaaagtataaagacaaatcaaaaaaaaaaaaaaaaaaaaaaaaaaaa

SEQ ID NO: 25425 - DNA, 1470 bp, Homo Sapiens
actccgcctccgggagagaatacaaagaaatggtgttacctggcaagaggtcttctgtcttttatgaaaaattagacaaagagccttgaaaccagcgaaacaataatcaaagagcagttctgtcaaagaaaacaacataaatcaggtacagaatttcagagtgggatatcagatctttagtgtgaagatacatctacattaaaccaggaatcactagaactgacatttggacaagaaaatttggaaaattttaaaactgtgaaggttgatcatggaaattaaagaggaaggggcatcagaagaagggcagcactttcttcctacagcccaggccaatgatcccggggactgtcagttcacaagtatccagaagactccaaatgaaccgcagttggaattcatccttgcatgcaaggatctcgtggctcctgtccgtgatcgtaaactgaatacactggtgcagatctccgtaatccaccccgtggagcagagtctgacaagatactccagcaccgaaattgtggagggaacaagggacccactgtttttgactggtgtcacattcccatctgagtatcccatctatgaggagaccaaaataaaactaacagtctatgatgtcaaggataagtctcatgacaccgttcgaaccagtgtcctaccagaacataaggatcccccgccagaagttggccgaagtttcttgggctatgccagttttaaagtgggagagctgctgaagtcaaaggagcaattgctggtcctgagcctgagaacttcagatggtggcaaagtggttggcaccatagaagtcagtgtcgtgaagatgggggagattgaggatggggaagccgaccacatcaccacagatgtacagggacaaaagtgtgccctggtatgtgaatgtacagccccggaaagtgtgagcggaaaagataacttaccttttttgaattcagtgttaaagaacccagtatgtaaattatatagatttcccacatctgacaataagtggatgcgaattcgagagcagatgtcagagagcattctttcctttcatattcctaaggaattgatttcccttcacattaaagaagatttgtgcagaaaccaggagataaaagaacttggtgagctttctccacattgggacaatctgcgaaaaaatgtccttactcactgtgatcaaatggtgaatatgtaccaagacattctgacagaacttagcaaggaaacagggtcctctttcaaatcaagcagcagcaaaggagagaaaacattagaatttgttccaataaatctacatctgcaaagaatgcaggtacacagccctcacttgaaagatgctctctacgatgtcatcactgtgggagccccagctgcccattttcagggatttaagaatggtggtcttcggaagctactccatagatttgaaacaaaaaaaaaaaaaaaaaaaaaaaaaaaaaa

SEQ ID NO: 25426 - DNA, 1370 bp, Homo Sapiens
gaagagcagcaaagctgaagtagcagcaacagcaccagcagcaacagcaaaaaaacaaacatgagtgtgaagggcatggctatagccttggctgtgatattgtgtgctacagttgttcaaggcttccccatgttcaaaagaggacgctgtctttgcataggccctggggtaaaagcagtgaaagtggcagatattgagaaagcctccataatgtacccaagtaacaactgtgacaaaatagaagtgattattaccctgaaagaaaataaaggacaacgatgcctaaatcccaaatcgaagcaagcaaggcttataatcaaaaaagttgaaagaaagaatttttaaaaatatcaaaacatatgaagtcctggaaaagggcatctgaaaaacctagaacaagtttaactgtgactactgaaatgacaagaattctacagtaggaaactgagacttttctatggttttgtgactttcaacttttgtacagttatgtgaaggatgaaaggtgggtgaaaggaccaaaaacagaaatacagtcttcctgaatgaatgacaatcagaattccactgcccaaaggagtccaacaattaaatggatttctaggaaaagctaccttaagaaaggctggttaccatcggagtttacaaagtgctttcacgttcttacttgttgtattatacattcatgcatttctaggctagagaaccttctagatttgatgcttacaactattctgttgtgactatgagaacatttctgtctctagaagttatctgtctgtattgatctttatgctatattactatctgtggttacagtggagacattgacattattactggagtcaagcccttataagtcaaaagcatctatgtgtcgtaaagcattcctcaaacattttttcatgcaaatacacacttctttccccaaatatcatgtagcacatcaatatgtagggaaacattcttatgcatcatttggtttgttttataaccaattcattaaatgtaattcataaaatgtactatgaaaaaaattatatgctatgggatactggcaacagtgcacatatttcataaccaaattagcagcaccggtcttaatttgatgtttttcaacttttattcattgagatgttttgaagcaattaggatatgtgtgtttactgtactttttgttttgatccgtttgtataaatgatagcaatatcttggacacatttgaaatacaaaatgtttttgtctaccaaagaaaaatgttgaaaaataagcaaatgtatacctagcaatcacttttactttttgtaattctgtctcttagaaaaatacataatctaaccaaaaaaaaaaaaaaaaaaaaaaaaaaaaaa

SEQ ID NO: 25427 - DNA, 882 bp, Homo Sapiens
actcagggaccggagcagccctcaactcactcttcagcttccctgctgtgttgcagcccagccgctccatcatgtccttcagtgctgaccagattgctgaattcaaggaggcatttctcctgtttgacagaacaggtgattccaagatcaccttaagccaggtcggtgatgtccttcgagctctgggcacaaatcccaccaatgcagaggtcaggaaagttctgggaaaccccagcaatgaagagctgaatgccaagaaaattgagtttgaacaatttctgcctatgatgcaagccatttccaacaacaaggaccaggccacctatgaagactttgttgagggtctgcgtgtctttgacaaggaaggcaatggcacagtcatgggtgctgaactccgccatgttctagccaccctgggtgaaaagatgaaagaggaagaagtggaagccctgatggcaggtcaagaagactccaatggctgcatcaactacgaagcttttgtcaagcacatcatgtctatctgaatggagctctcaagaacaagcattgtttaggaagactggctggaaacttattttaatcacacccatgacaaactctccagatctgtttaccatcattcaggaaaacaaagcaatctggacggttcaagactgagcaactccctgaatttttatacatcttcagtttttctctgaattgaattcataccacacaaacaaagtgtctgctgctctagatgagaagaataaaatattgacaatctcaaatccaagcaccattctttattatctaccatgaatcaacaaacattcttaaaacaataaatcaataaacaattttggtcagtctcaaaaaaaaaaaaaaaaaaaaaaaaaaaaa

SEQ ID NO: 25428 - DNA, 1358 bp, Homo Sapiens
ggcccttgcgatcagggcttgaggaacccgcgccatgaagtgcgtgtttgttaccgtagggaccaccagctttgacgacctcattgcgtgtgtgtcggcgcccgacagtctgcaaaaaatcgagagccttggttacaaccgacttatcctgcaaattggtagaggaacggtggtacctgaacccttcagtactgagtcgtttactctggatgtttacaggtacaaggattccttgaaagaagacattcagaaagcagatcttgttattagtcacgcaggtgcaggaagctgtttggagactctggaaaaaggaaagccactcgtagtggttataaacgaaaagttgatgaacaatcatcagctggaactggcaaagcagctacacaaagagggtcatctcttctattgtacctgcagcacgcttcctgggctgttacagtcaatggacttatcaacactgaaatgttatcctcctggccagccagaaaaattttctgcatttttggataaagttgttggattacaaaaataaacactaaactctcaacactttaaaagcaacccccaaattcaacctatgtaatgtgattaaatcaaattaaatacataatatatatttacaaaataatataattaataaacttcctacatctatagaatgtataggaaattttatgttgtgcacatttgcattgggtccaaatcctaattgcagtttagtgaaattactagatttttttctaatcttcagtatgtagtgagcattcacaggttttctcctagaatctcaagtggaattggaatcataaaaatgaatgagatttgaaaactttcacaaagattataaatgtagttagtttgatactccttagaataaaaaaatgaaacagtaacaacttttatgtaaaaaaattttacataagagttagcatctttagctttataatctaaggaaccaaatttaaaaaatgatggattatgctctgtgaaatgaaaagttcaatcattgcctaaaaaagatgatcaagttagttgatctcttgtacttggaaaagctacttttttcctaaagaacagagtggagtggatatattcactttttttttctaaaacatacaaagtgataaaataatcgtgcctaatgtcaaaactttactggtttgagaagaataatcaaaaaggacttataccaataggacttactattgttttttaaggatctcctctcacagtggtaatgaaacattaactgtaacagaaatttacaatttatgtgcttataaaattagttttatgaatgaacaataaactgatgcatataatggctgaaaaaaaaaaaaaaaaaaaaaaaaaaaaaa

SEQ ID NO: 25429 - DNA, 1814 bp, Homo Sapiens
ctcccgccccggggaggttttgattttagtggctttcttccttttattttccgtcgtgtgcggatttcgctgcagagcgaacttgcggctcgtcggagtacatgtgagcggtaatcgcccctgcagctggttatcctgacactatgcactccgaagcagaagaatccaaggaagtggccacagatgtctttaattccaaaaacctggccgttcaggcacaaaagaagatcttgggtaaaatggtgtccaaatccatcgccaccaccttaatagacgacacaagtagtgaggtgctggacgagctctacagagtgaccagggagtacacccaaaacaagaaggaggcagagaagatcatcaagaacctcatcaagacagtcatcaagctggccattctttataggaataatcagtttaatcaagatgagctagcattgatggagaaatttaagaagaaagttcatcagcttgctatgaccgtggtcagtttccatcaggtggattatacctttgaccggaatgtgttatccaggctgttaaatgaatgcagagagatgctgcaccaaatcattcagcgccacctcactgccaagtcacatggacgggttaataatgtctttgatcatttttcagattgtgaatttttggctgccttgtataatccttttgggaattttaaaccccacttacaaaaactatgtgatggtatcaacaaaatgttggatgaagagaacatatgagcacatgagttaagattgtgactgatcatgatttatttgaagatggagcactgctgatttatgaaggaaaaaagaagaattttctaaagattacacatatttcagaaagactttacccaattcagttgtcagacataatgatttatttgaaggcttgttttatttgaagaaaagcatattgccaaaaattctggttaaaagcttcctaatgggtaacagaccatgggagagatatgtggttgggtaatgcgaatgtagttatacaaagaaaaatacagatgtctccagacctgaggactttttaatagggcggttgttgtgttggtggcacattggatatttctaacatgtacaaagctatgtattttgatttactttcatttcttgctatgtatatgtacttttcttaaaatgccaagaactttctcttgctatcattgctccttttgaaacaattcaattttcatgtctacagctgactgttttgttaagattgagtcatcgacattcaggatttaagtctgaggtagtcaaccctcaggaaaaaaaaaatggcttatctgaaatcagtactgtggaaatgaactatattagctattatgaataatgtccagtataagaatatgcttctggaattgagttctccttttaagtaccaatgatacttaaatttctcagaaatgtaatggtgtgtcattgccttgaaatgcttgcttagggcttcttttatgttatcttaaaaagtgctggtgaattttccattttttacatccatttcacatgtaagagacaaaaaagtctagattggtcttgatattgagataataaaaagtaagtagcattaagaaaggtaacaatcttcattctacagatgaactcattgaaacaatttaggggaatgaggggcaaaaggggagaaatactgctaaagaacatgagcataaaaacgcgtgcgtttcagtgtttaagaaggcttgataaagaatgtcacttttttatttaactgataagatttttgttattttttactttgataagtaaaccaaaaaaaaaaaaaaaaaaaaaaaaaaaaaa

SEQ ID NO: 25430 - DNA, 1477 bp, Homo Sapiens
gcggatcgctgctccctctcgccatggcgcaggtgctgatcgtgggcgccgggatgacaggaagcttgtgcgctgcgctgctgaggaggcagacgtccggtcccttgtaccttgctgtgtgggacaaggctgacgactcagggggaagaatgactacagcctgcagtcctcataatcctcagtgcacagctgacttgggtgctcagtacatcacctgcactcctcattatgccaaaaaacaccaacgtttttatgatgaactgttagcctatggcgttttgaggcctctaagctcgcctattgaaggaatggtgatgaaagaaggagactgtaactttgtggcacctcaaggaatttcttcaattattaagcattacttgaaagaatcaggtgcagaagtctacttcagacatcgtgtgacacagatcaacctaagagatgacaaatgggaagtatccaaacaaacaggctcccctgagcagtttgatcttattgttctcacaatgccagttcctgagattctgcagcttcaaggtgacatcaccaccttaattagtgaatgccaaaggcagcaactggaggctgtgagctactcctctcgatatgctctgggcctcttttatgaagctggtacgaagattgatgtcccttgggctgggcagtacatcaccagtaatccctgcatacgcttcgtctccattgataataagaagcgcaatatagagtcatcagaaattgggccttccctcgtgattcacaccactgtcccatttggagttacatacttggaacacagcattgaggatgtgcaagagttagtcttccagcagctggaaaacattttgccgggtttgcctcagccaattgctaccaaatgccaaaaatggagacattcacaggttacaaatgctgctgccaactgtcctggccaaatgactctgcatcacaaacctttccttgcatgtggaggggatggatttactcagtccaactttgatggctgcatcacttctgccctatgtgttctggaagctttaaagaattatatttagtgcctatatccttattctctatatgtgtattgggtttttattttcacaattttctgttattgattattttgttttctattttgctaagaaaaattactggaaaattgttcttcacttattatcatttttcatgtggagtataaaatcaattttgtaattttgatagttacaacccatgctagaatggaaattcctcacaccttgcaccttccctacttttctgaattgctatgactactccttgttggaggaaaagtggtacttaaaaaataacaaacgactctctcaaaaaaattacattaaatcacaataacagtttgtatgccaaaaacttgattatccttatgaaaatttcaattctgaataaagaataatcacattatcaaagccccatcaaaaaaaaaaaaaaaaaaaaaaaaaaaaaa

SEQ ID NO: 25431 - DNA, 1183 bp, Homo Sapiens
atatttacttctatttactttcttttctggtgaattatttccatcaacatttgctgcaaaaggagtacacataggccggacgcagtggctcacgcctgtaatctcaacatggtaggctgaggcgggcagattgtctgggctcaggagcttgggcccagcctgagcaacgtggagaaaccctgtctctgctaaaaataaaaaaaaattgggtgcattggcatgcgcctgtggccccagctacctgggaggctagggtgggaggatcgcttgagcccaggaggtcgaggatgcagtgagacaagatcatgccactgcgctccagcctgggtgacagagtgagaccttgtcttaaaaaaaaaaaaaagaaaaaaagtacacagaatatacattttttgtgatctttatttccagtgatgagcactgcacctaacaacagcagaatattcttctcaactacactaggaacattctgcacgctaggccatgaaacctcaatagattaaaatgatagaatgaatacacagtatgttctctgaccacaatagaatgaaattagagtcaataatagaaaggtatttagaaaacccacaaacagctcactcttaaatagtcagtgggccgaagaggaaatcaaaagagaaataagaaaatacactaagaaatacattgagatgaatgaaaatgaagacatggcataccaaaatgtatgggataaagctcaagcaatgcttctagggaaatttatagctgttaatgcctacaataaaaagaaagctctcaaatcagtaatcgattcaccaccataagacactggaaaaagaaaagcatactaaacctgaagacagcaaaaggaaggatgtaatcaagattaaagcaaaagttaatgaaatagagactgggaaaaccagtgaaaccaaaagctggttctttggaaagatcaacaaaattgacaaacctttagctaaacatatcagggtaaaaagagaaaacattcaaattactggaattacaaatgtgctgggtgtggtggcacacacctgtaatcccaacacctgggtgtggtggctcacacctgtaatcccaaggtgggaggatcacttgaggctgggagtctgagaccagactgggcaatatgacaagacctcatctatccaaaaaaaaaaaaaaaaaaaaaaaaaaaaaa

SEQ ID NO: 25432 - DNA, 1710 bp, Homo Sapiens
ggggctggcaagcgcttcctgcgcagcgccgaggcgacctggagtttgtgacgctgtgatggtctagaggctggagattcaagatctgggtgccatcattttctggttctgttgatgaccctcttccagtttttcttataaggctaaaaattcacaaagcatatatcaatgaatcaggaggatctagatccggatagtactacagatgtgggagatgttacaaatactgaagaagaacttattagagaatgtgaagaaatgtggaaagatatggaagaatgtcagaataaattatcacttattggaactgaaacactcaccgattcaaatgctcagctatcattgttaattatgcaagtaaaatgtttaaccgctgaactcagtcaatggcagaaaaaaacacctgaaacaattcccttgactgaagacgttctcataacattaggaaaagaagagttccaaaagctgagacaagatcttgaaatggtactgtccactaaggagtcaaagaatgaaaagttaaaggaagacttagaaagggaacaacggtggttggatgaacagcaacagataatggaatctcttaatgtactacacagtgaattgaaaaataaggttgaaacattttctgaatcaagaatctttaatgaactgaaaactaaaatgcttaatataaaagaatataaggagaaactcttgagtaccttgggcgagtttctagaagaccattttcctctgcctgatagaagtgttaaaaagaaaaagaaaaacattcaagaatcatctgtaaacctgataacactgcatgaaatgttagagattcttataaatagattatttgatgttccacatgatccatatgtcaaaattagtgattccttttggccaccttatgttgagctgctgctgcgtaatggaattgccttgagacatccagaagatccaacccgaataagattagaagctttccatcagtaaaaggatgttttcttttttcacacagtaaaaattcttatcattcaaggatattggaaccacaggactatttggataaaaaacattatttgcaaattaatgcgcatagtacttttattgcaaaatggcatgtgctgccatctattattcatttttaaatggtcatttcttattcagtgagtgctttagtgttttaaactatatggataagaatgcaggtagataatattctaggcataaaacatttaatgtaccttacctcatgcaatattctttggattctttgttgatttatgatattgctaatataatattttcttaaaatatataacaatatcttttatgcattttgagttccagctggtgcttctttatatttagaaattataatgggaaggccatttaatttacagatggttttaaaattgaggtaatatctgaggtggcataatttaaaaatatttagcaaatttgtttcatatatactgtcttatttctagatttgtttaaaattggaatatgaaaaactaatggataaagctagcataaaattgatattttagtttgtattattaatatatcatgttaccttatatattaatctactcttgattctgctaattattaccaacaaaattgtattcatgacattttattaatcctctgtgaattttctgtaaataaaattatttctgaaaatctctcaaaaaaaaaaaaaaaaaaaaaaaaaaaaaa

SEQ ID NO: 25433 - DNA, 2230 bp, Homo Sapiens
cggtcttcggtcctcgcagcgcttccagctccccgcgcccctatgtgagggagacggggaggcccgcggcgcgcaggggagggcgaggcatgtgcacgggccggagggtgctgcagccgcccgaggaagaggaggacggcggcgaggaggagagcggggggctcgcggcggcgggccccggccgaggggatgcagtggactgtgtgtgtctggctgtagcagacgcgaggcggcgacgaggcgccggggacccgcgcgaggggcggccgggaggcggcggcggcggccgccagaagtagcagcaggaccggcggcggcgacggcagccctgaaatgcattttcctctccagcggccatgttaaccaggaaaccttcggccgccgctcccgccgcctacccgaccgattggcggcagtaagcacacaatgaatgatcacctgcatgtcggcagccacgctcacggacagatccaggttcaacagttgtttgaggataacagtaacaagcggacagtgctcacgacacaaccaaatgggcttacaacagtgggcaaaacgggcttgccagtggtgccagagcggcagctggacagcattcatagacggcaggggagctccacctctctaaagtccatggaaggcatggggaaggtgaaagccacccccatgacacctgaacaagcaatgaagcaatacatgcaaaaactcacagccttcgaacaccatgagattttcagctaccctgaaatatatttcttgggtctaaatgctaagaagcgccagggcatgacaggtgggcccaacaatggtggctatgatgatgaccagggatcatatgtgcaggtgccccacgatcacgtggcttacaggtatgaggtcctcaaggtcattgggaaggggagctttgggcaggtggtcaaggcctacgatcacaaagtccaccagcacgtggccctaaagatggtgcggaatgagaagcgcttccaccggcaagcagcggaggagatccgaatcctggaacacctgcggaagcaggacaaggataacacaatgaatgtcatccatatgctggagaatttcaccttccgcaaccacatctgcatgacgtttgagctgctgagcatgaacctctatgagctcatcaagaagaataaattccagggcttcagtctgcctttggttcgcaagtttgcccactcgattctgcagtgcttggatgctttgcacaaaaacagaataattcactgtgaccttaagcccgagaacattttgttaaagcagcagggtagaagcggtattaaagtaattgattttggctccagttgttacgagcatcagcgtgtctacacgtacatccagtcgcgtttttaccgggctccagaagtgatccttggggccaggtatggcatgcccattgatatgtggagcctgggctgcattttagcagagctcctgacgggttaccccctcttgcctggggaagatgaaggggaccagctggcctgtatgattgaactgttgggcatgccctcacagaaactgctggatgcatccaaacgagccaaaaattttgtgagctccaagggttatccccgttactgcactgtcacgactctctcagatggctctgtggtcctaaacggaggccgttcccggagggggaaactgaggggcccaccggagagcagagagtggggtaacgcgctgaaggggtgtgatgatccccttttccttgacttcttaaaacagtgtttagagtgggatcctgcagtgcgcatgaccccaggccaggctttgcggcacccctggctgaggaggcggttgccaaagcctcccaccggggagaaaacgtcagtgaaaaggataactgagagcaccggtgctatcacatctatatccaagttacctccaccttctagctcagcttccaaactgaggactaatttggcgcagatgacagatgccaatgggaatattcagcagaggacagtgttgccaaaacttgttagctgagctcacgtcccctgatgctggtaacctgaaagatacgacattgctgagccttactgggttgaaaaggagtagctcagacctgtttttatttgctcaataactctactcatttgtatcttttcagcacttaattttaatgtaagaaagttgttcattttgtttttataaaatacatgaggacaatgctttaagttttaaaaaaaaaaaaaaaaaaaaa

SEQ ID NO: 25434 - DNA, 2390 bp, Homo Sapiens
tggcggcgactctgggaccccttgggtcgtggcagcagtggcggcgatgtttgtcggctcgggatgggtccaggatgttactccttcttcttttgttggggtctgggcaggggccacagcaagtcggggcgggtcaaacgttcgagtacttgaaacgggagcactcgctgtcgaagccctaccagggtgtgggcacaggcagttcctcactgtggaatctgatgggcaatgccatggtgatgacccagtatatccgccttaccccagatatgcaaagtaaacagggtgccttgtggaaccgggtgccatgtttcctgagagactgggagttgcaggtgcacttcaaaatccatggacaaggaaagaagaatctgcatggggatggcttggcaatctggtacacaaaggatcggatgcagccagggcctgtgtttggaaacatggacaaatttgtggggctgggagtatttgtagacacctaccccaatgaggagaagcagcaagagcgggtattcccctacatctcagccatggtgaacaacggctccctcagctatgatcatgagcgggatgggcggcctacagagctgggaggctgcacagccattgtccgcaatcttcattacgacaccttcctggtgattcgctacgtcaagaggcatttgacgataatgatggatattgatggcaagcatgagtggagggactgcattgaagtgcccggagtccgcctgccccgcggctactacttcggcacctcctccatcactggggatctctcagataatcatgatgtcatttccttgaagttgtttgaactgacagtggagagaaccccagaagaggaaaagctccatcgagatgtgttcttgccctcagtggacaatatgaagctgcctgagatgacagctccactgccgcccctgagtggcctggccctcttcctcatcgtctttttctccctggtgttttctgtatttgccatagtcattggtatcatactctacaacaaatggcaggaacagagccgaaagcgcttctactgagccctcctgctgccaccacttttgtgactgtcacccatgaggtatggaaggagcaggcactggcctgagcatgcagcctggagagtgttcttgtctctagcagctggttggggactatattctgtcactggagttttgaatgcagggaccccgcattcccatggttgtgcatggggacatctaactctggtctgggaagccacccaccccagggcaatgctgctgtgatgtgcctttccctgcagtccttccatgtgggagcagaggtgtgaagagaatttacgtggttgtgatgccaaaatcacagaacagaatttcatagcccaggctgccgtgttgtttgactcagaaggcccttctacttcagttttgaatccacaaagaattaaaaactggtaacaccacaggctttctgaccatccattcgttgggttttgcatttgacccaaccctctgcctacctgaggagctttctttggaaaccaggatggaaacttcttccctgccttaccttcctttcactccattcattgtcctctctgtgtgcaacctgagctgggaaaggcatttggatgcctctctgttggggcctggggctgcagaacacacctgcgtttcactggccttcattaggtggccctagggagatggctttctgctttggatcactgttccctagcatgggtcttgggtctattggcatgtccatggccttcccaatcaagtctcttcaggccctcagtgaagtttggctaaaggttggtgtaaaaatcaagagaagcctggaagacatcatggatgccatggattagctgtgcaactgaccagctccaggtttgatcaaaccaaaagcaacatttgtcatgtggtctgaccatgtggagatgtttctggacttgctagagcctgcttagctgcatgttttgtagttacgatttttggaatcccactttgagtgctgaaagtgtaaggaagctttcttcttacaccttgggcttggatattgcccagagaagaaatttggctttttttttcttaatggacaagagacagttgctgttctcatgttccaagtctgagagcaacagaccctcatcatctgtgcctggaagagttcactgtcattgagcagcacagcctgagtgctggcctctgtcaacccttattccactgccttatttgacaaggggttacatgctgctcaccttactgccctgggattaaatcagttacaggccagagtctccttggagggcctggaactctgagtcctcctatgaacctctgtagcctaaatgaaattcttaaaatcaccgatggaaccaaaaaaaaaaaaaaaaaaaa

SEQ ID NO: 25435 - DNA, 2067 bp, Homo Sapiens
agcggatgagatcgtggggctcaccagcgtcccccatggcttctgagtagcgtgggagtggagtcagcaccaagccaggctccccgcgcctgccttgccctcacctgctcctgctctctgccagaggcagcatggtccgcagggcaccatggggcccgacagagtgacagcacgagaactgtgcgagaacgacgacctggccaccagcctcgtcctggacccctacctcggtttccgcacccataagatgaacgtcaggtctatcgctacctccgtgccttcctgccggaaagtggctttaccatcctgccctgcacgcgctactccatggagaccaacggggccaagatcgtgtccactcgtgcttggaaaaagaatgagaagctggagctgctggtgggctgcattgcagagctgcgggaggcagatgaggggctgctgagggccggtgagaatgacttcagcatcatgtactcaacccgcaagcggagtgctcagctgtggctgggcccagccgccttcatcaaccatgactgcaaacccaactgcaagtttgtgcctgcagatgggaacgcagcctgcgtgaaggtgctccgggacattgagcctggggacgaggtgacatgcttctacggcgagggcttcttcggcgagaagaatgagcactgtgaatgccacacctgtgagaggaaaggtgaaggagctttccgaaccaggcctagggagcccgcgttgccaccacggcccctggacaagtaccagctgcgtgagaccaagcggcggctgcagcaaggcctggacagtggcagccgacagggcctgctgggccctcgggcctgcgtgcacccatccccgctgcgccgggacccattctgcgccgcctgccagcccctgcgcctgccagcctgcagcgcccgcccagacacctcacccctctggctccagtggctgcctcagccccagccccgagtgcggccccggaagcgccgacgcccccggccccggagggccccagtgctctccacccaccacgctgcccgcgtctccctgcaccgatggggaggctgtggcccccactgccgcctgcgaggagaggccctggtggccctgggccagcccccccacgcccgctgggcccctcagcaggactggcactgggcccggcgctatgggctgccttacgtggtgcgtgtggaccttcgtcgcctggccccagccccaccagctaccccagcccctgctgggaccccaggccccatcctgatcccgaagcaggccctcgccttcgcccccttctccccacccaagcgcctacggctggtggtcagccacggctccatcgacctggatgtcggcggtgaagagctgtgacaggccggacggggaggcccagcagggagagagggtctctctcctagctgctacccaggacctccagaaggagcccttggacctctgggagggagctgacccttgactccagcatagctctgaccctggaatggggttggtttggacacccccagggatctgagccctgaccctttgtgactgctgacccctgagccacccccactcccacagggagccccggccatttgctgccctccccacccctgccccagcctcaggactgcaggagccatccgcccccctcagccccttcctccccagggagcaaagccataaggggcaggggccaccccacggcatctccccagaagtacaggcctcaggaggaggtggaactgatgtagggggtggcactccccagagactgccctcacgaggggactgggttcgctctcagctctgcagctgtctgcggtggggggaaggttggggggtgtctggaggcatgttcccctcaccaccccccgtgggtctcagggaggccgggtgtgacctcatctttctcatggtgctatcctggtgctattggggtggggagctccctcccctcccccacaccagaaaggggtatgttgggggcttggaagcacttgaactttttattttattaaaaccttgttataagcagcaaaaaaaaaaaaaaaaaaaaaaaaa

SEQ ID NO: 25436 - DNA, 1200 bp, Homo Sapiens
ggcagagggctggttgaaggaacggggcagtcccctgaggagcggggctggttgaaacgctaggggcgggatctggcggagtggaaggtaccggtccggcccgataaggggtggagttaagtgaatcgttaagggtggagtcgaaaccggggtcggggccggggccggctgagtgaaagggtgggtgattatcccgggagataggccgaaagggcaggttcgtgaaggaatggggtctgggctgggcttagagggtctgggaatggggcttaggagagtagaaggggcggtgattggttggaaagggcaggccctaagacggactgtgtgagcccgggggctcattgctccgtgaaagggcaagaccagggaaagagaatcgtgtaaaaggggtggagtctagcgggccgggcggggccgggtagaatggccacctgagtggagggagaaggcctgagagaggcggagtttggaaggctgtggagaatcagatcgcaaccgcggcaggggccaagcctcctcaactatgacctcaaccggccaggattccaccacaaccaggcagcgaagaagtaggcagaacccccagtcgccccctcaggactccagtgtcacttcgaagcgaaatattaaaaagggagccgttccccgctctatccccaatctagcggaggtaaagaagaaaggcaaaatgaagaagctcggccaagcaatggaagaagacctaatcgtgggactgcaagggatggatctgaaccttgaggctgaagcactggctggcactggcttggtgttggatgagcagttaaatgaattccattgcctctgggatgacagcttcccggaaggccctgagcggctccatgccatcaaggagcaactgatccaggagggcctcctagatcgctgcgtgtcctttcaggcccggtttgctgaaaaggaagagctgatgttggttcacaggtgaaggcttgggagccttgtagggatggggaggagcctgccctggacaaaccagggcaagctaaacgctttgggaagcaatgtcatggtctctgcagccagccttgggcaagtcgctgagcctttctgaatctgtgtcatcgcctgtaacaaggggaccagtaaacataagttcctcaggagaaaaaaaaaaaaaaaaaaaaaaaaaaaaaaaaaaaaaaaaaaaaaaaaaaaaaa

SEQ ID NO: 25437 - DNA, 2176 bp, Homo Sapiens
ccgcttccccgtcttgtacacccctaactcctgaggctcctccgaatcacgcgagtggaagcggagaagctcaagtggccgccatgtcagaggcttatttccgagtggagtcgggtgcgctggggcctgaggagaactttctttctttggacgacatcctgatgtcccacgagaagctgccggtgcgcacggagaccgccatgcctcgccttggcgctttcttcctggagcggagcgcaggcgccgagactgacaacgcggtcccacagggttccaagcttgaactacccttgtggctggcaaaaggactttttgacaacaagcgacggatcctttctgtggaactccccaagatctaccaagagggttggaggactgtgttcagtgcagatcccaatgtggtggacctccacaaaatggggccccatttctacgggtttggctcccagctcctgcattttgacagtcccgagaatgcagacatttcccagtctctgctgcagacttttatcggacgttttcgccgcatcatggactcctcacagaatgcttacaacgaagacacttcagccctggtagccaggctagacgagatggagaggggcttatttcaaacagggcagaaaggactgaatgactttcagtgttgggagaaggggcaggcttctcagatcacagcttccaacctcgttcagaattacaagaagagaaaattcactgatatggaagactgaaagccggaagaacacagaatggctcctcacagacgtatccctccgtgtgtccttgataggagctggttgaccttgtacagaaccagaatcctgtcccatttcatggcttatttcctgtggccatagagaattatagggaactggacatgctggaggatgtgggtgtccctggctctgtgagtcttccaggaccgtcccaccctgctgacccacagcccaggccctttaacccaagaacccatggccaaggagaaatcaaagtccttcctaaataagaatcactgccatataatatatcacagtagagttgcaactgagattccttgtgtctgggagtttggacagcttcagatgtacagtttcactagccacaaagcacaggtacaaactgggtcatcgcctgttcacaaaatgctctcttgatcttatttgcctcatcttcctcatggttgtacagaggatagcaccccaccatgccagcctgacttggagatatctcctgctgcctgcctgcagggagttaccccagtttccaaaaacagtcgcccagataaaggaggaaaagggaaaggcagacgaatggcatggcttttactaaagaaaagatgttggcctcatactctatactcagggcttaatgaactggaatctgcataactcagcagtcaacccagaagggaaatggttaaactgagcttgttattgcctcggagagcctaagagcacccgcacacttaattctactccctgtctagaaaagctgtcagggagtcgtttggaattgcaatgtagttattaagggctgttaaccagcctgcattacatctggaagtcaggacttgggtgctgactatgaagggccctgttttcaaaatctaacattgcaagtgtaaatgggcaagaagcctccgttgtgctttttttttcctcttcagtaacttttgcaacattattgcatagaagatccctgaccatttactaggaacctggttaagcaagcactaatctcttttcctggagatcaaggatgcaacctcaggttgagaaagaaacagggttccctgggcccattagactgtttgcagggcatcactgcttccccctgacacctcacaactagcaaaaattgtctttgtctttggaaattatagagggatttgggtatccagattgtgcagatgcaaacttaggctgtcttgatgcaaacttagaaccacagaaatgcttttaaaatgcctgttttaagatggaattgttgtttttataatttgattttagtgctaaataaatgattggctttgtacatgaatatgttctgtacaagtgctctttcactagtactacagataatcaaagctatcagaattgtgtctttgatcatatttgacggtaatacacaaataaatccatgttttagcaaaaaaaaaaaaaaaaaaaaaaaa

SEQ ID NO: 25438 - DNA, 1941 bp, Homo Sapiens
cttcccagaggcgcgagtcgcttttccaggagccgaggcccaaacggggccgggcctgaagggtcccccgccagcccgcggccgcgccatcaatcgccgccgcctcgtcccgcttctcggctgaggcgccgcgcggccaggcagcgggtccaggcctcagccgcgcgcccaggggcctccggggccctcccgggtcagcatgcccggggtgaaactgaccacccaggcctactgcaagatggtgctgcacggcgccaagtacccgcactgcgccgtcaacgggctcctggtggccgagaagcagaagccgcgtaaggagcacctccccctgggcggccccggcgcccaccacaccctcttcgtggactgcatccccctcttccacggcaccctggccctcgcccccatgctggaggtggctctcaccctgattgattcatggtgcaaagatcatagctacgtgattgctggttattatcaagctaatgagcgagtaaaggatgccagtccaaaccaggttgcagagaaggtggcctccagaatcgccgagggcttcagcgacactgcgctcatcatggtagacaacaccaagtttacgatggactgcgtagcgcctacgatccacgtgtacgagcaccatgagaacagatggcggtgcagagacccacaccatgactactgtgaagactggccagaggcacagaggatctcagcctcgctcctggacagccggtcctacgagacgctcgtggatttcgataaccacctggatgacattcggaatgactggacaaacccagagatcaataaagctgtcctacacttgtgctaggcaggcaccgctgtgactgggctccgggcctttccactacgttgaagaagaaaacctatttttaaatgtaaataaaatatctggtagcctgtgtggaaagctgaccgttttaagaagtggcatgtgccttgaaagggggcagaatgttcagtcggtcgtgtttttaacacagagtctctagaagaggtgcagacatcccgtctgactgtccctgtggactctctcagttgtatgttgctataatcctccaaatcaaagctctttctgcttgtgcaagattgttcctattaaacagttttaactaaccttttataatctggagagaatactttttaaggcttttgaactatctttttttaaaaaaaaaaaaaagcccacatcttatactccaatgagtgtgtttgtgagtttttatcctgtttgaattttgatgtcgtccaggcgtcctgggatcagggtagacacgtggagtgctggtgctgagctgtttgagaagctctgtgtgggtgtttctgtggtcaggtaggctgggctgtgaacagcactgctccacatggtgtcggctcacagagccaccgcaactctgcccagcgggagtgacaccactgatgccacagaagcctttatcgttaggggcaaaagcagacatctctggtagcaggagctcagtgtggtgctcttcagccacgcagaaagctcacgtgcctgcagggccaggaaagggaaatgatcgtttcttttgtattaggaaaaacaagacttagacttcccgagttgtgcagagtgacgtctgtactttttatacttagaacatttggtcaagttttgtaaccaaaccttagggaattgagagggaaactttatggtacgtttaccttttttcctttttatatgaattattttgtacaaagttcagagagcggtacctttcctactgtcttttctttgactccatggaggaatttgtaacgatcggtgtgacctgaaagggtttgtgatacagcggtcactattttctcttaacacataggaaaaaagttcagacatcgctacaataaatgtgctttatttgatccaaaaaaaaaaaaaaaaaaaaaaaaaaaaaaaaa

SEQ ID NO: 25439 - DNA, 596 bp, Homo Sapiens
agctgtagtgggagtgttccaggattcgccttgtatatttaaagttggagttcgttgctagagatggcagacccagatgtcctcactgaagttccagcagcattgaagcggttagccaagtatgtgatccggggattttatggcattgagcatgccttggccttggacatcttgatcaggaactcctgtgtgaaagaggaggatatgctggagctgctcaagtttgatcggaagcaactttgatcagttttgaataatttaaagggagacaagtttatcaaatgcagaatgagggtagagactgctgcagacgggaaaaccactcgccataactactacttcatcaattatcgtactcttgttaatgtggtaaaatataaactggaccacatgagcagaagaattgagaccgatgagagagattcgaccaaccgggcttccttcaaatgtcctgtctgtagtagtactttcacagacttagaagctaatcagctctttgatcctatgacaggtgaggtttatccagtttgtgaatctttaaaataaagtgtgtattaccttttttctaaaaaaaaaaaaaaaaaaaaaaaaaaaaa

SEQ ID NO: 25440 - DNA, 1902 bp, Homo Sapiens
agaaggaggaaggacagcacagctgagagccatgctcaggaagtttctggatcctaggctcagctccacagaggagaacacgcaggcagcagagaccatggggcccctctcagcccctccctgcacacagcgcatcacctggaaggggctcctgctcacagcattacttttaaacttctggaacttgcctaccactgcccaagtcacgattgaagccgagccaaccaaagtttccaaggggaaggacgttcttctacttgtccacaatttgccccagaatcttgctggctacatctggtacaaagggcaaatgaaggacctctaccattacattacatcatacgtagtagatggtcaaataattatatatgggcctgcatacagtggacgagaaacagtatattccaatgcatccctgctgatccagaatgtcacccgggaggacgcaggatcctacaccttacacatcgtaaagcgaggtgatgggactagaggagaaactggacatttcaccttcaccttatacctggagactcccaagccctccatctccagcagcaacttataccccagggaggacatggaggctgtgagcttaacctgtgatcctgagactccggacgcaagctacctgtggtggatgaatggtcagagcctccctatgactcacagcttgcagttgtccaaaaacaaaaggaccctctttctatttggtgtcacaaagtacactgcaggaccctatgaatgtgaaatacggaacccagtgagtgccagccgcagtgacccagtcaccctgaatctcctcccgaagctgcccaagccctacatcaccatcaacaacttaaaccccagggagaataaggatgtcttagccttcacctgtgaacctaagagtgagaactacacctacatttggtggctaaatggtcagagcctcccggtcagtcccagggtaaagcgacccattgaaaacaggatcctcattctacccagtgtcacgagaaatgaaacaggaccctatcaatgtgaaatacaggaccgatatggtggcatccgcagttacccagtcaccctgaatgtcctctatggtccagacctccccagaatttacccttcattcacctattaccattcaggagaaaacctctacttgtcctgcttcgcggactctaacccaccagcagaatattcttggacaattaatgggaagtttcagctatcaggacaaaagctctttatcccccagattactacaaagcatagcgggctctatgcttgctctgttcgtaactcagccactggcatggaaagctccaaatccatgacagtcgaagtctctgctccttcaggaacaggacatcttcctggccttaatccattatagcagccgtgatgtcatttctgtatttcaggaagactggcagacagttgctttcattcttcctcaaagtatttaccatcagctacagtccaaaattgctttttgttcaaggagatttatgaaaagactctgacaaggactcttgaatacaagttcctgataacttcaagatcataccactggactaagaactttcaaaattttaatgaacaggctgatacttcatgaaattcaagacaaagaaaaaaacccaattttattggactaaatagtcaaaacaatgttttcataattttctatttgaaaatgtgctgattctttgaatgttttattctccagatttatgcactttttttcttcagcaattggtaaagtatacttttgtaaacaaaaattgaaacatttgcttttgctccctaagtgccccagaattgggaaactattcaggagtattcatatgtttatggtaataaagttatctgcacaagtgcaaaaaaaaaaaaaaaaaaaaaaaaaaaaaa

SEQ ID NO: 25441 - DNA, 907 bp, Homo Sapiens
gtaggcggtgcttgaacttagggctgcttgtggctgggcactcgcgcagaggccggcccgacgagccatggttgctgggagcgacgcggggcgggccctgggggtcctcagcgtggtctgcctgctgcactgctttggtttcatcagctgtttttcccaacaaatatatggtgttgtgtatgggaatgtaactttccatgtaccaagcaatgtgcctttaaaagaggtcctatggaaaaaacaaaaggataaagttgcagaactggaaaattctgaattcagagctttctcatcttttaaaaatagggtttatttagacactgtgtcaggtagcctcactatctacaacttaacatcatcagatgaagatgagtatgaaatggaatcgccaaatattactgataccatgaagttctttctttatgtgcttgagtctcttccatctcccacactaacttgtgcattgactaatggaagcattgaagtccaatgcatgataccagagtattacaacagccatcgaggacttataatgtactcatgggattgtcctatggagcaatgtaaacgtaactcaaccagtatatattttaagatggaaaatgatcttccacaaaaaatacagtgtactcttagcaatccattatttaatacaacatcatcaatcattttgacaacctgtatcccaagcagcggtcattcaagacacagatatgcacttatacccataccattagcagtaattacaacatgtattgtgctgtatatgaatggtatgtatgctttttaaaacaaaatagtttgaaaacttgcattgttttccaaaggtcagaaaatagtttaaggatgaaaataaagtttgaaattttagacattcgaaaaaaaaaaaaaaaaagaaaaaaaaaaa

SEQ ID NO: 25442 - DNA, 1290 bp, Homo Sapiens
ccggctcacgtgaccgtctttgggccggcgcgaaccatggccggcatggtggacttccaggatgaggagcaggtcaagtccttttttggagaacatggaggtggagtgcaactaccactgctaccacgagaaggacccggacggttgctatcggctggtggactatttggaagggatccggaagaattttgatgaggctgccaaggtgttgaagtttaactgtgaagagaaccagcacagtgatagctgctacaaactgggggcctactatgtgactggaaaaggtggtctgacccaggacctgaaagctgccgccaggtgctttttgatggcgtgtgagaagcctggaaagaagtcaatggcagcatgtcacaacgttggcctcctggcacatgatggacaggttaatgaggatggccagcctgacttgggaaaggccagggactactacacaagggcctgtgatggtggctatacttccagttgcttcaacctcagtgccatgttcctgcagggtgccccaggctttcccaaggacatggacctggcatgtaaatactccatgaaagcctgtgacctgggtcatatctgggcctgtgccaatgccagtcgcatgtacaagctgggggatggtgttgataaggatgaggccaaggccgaggtgctaaaaaatcgagcccagcagctacacagagaacagcagaaaggtgtccaacccttaacatttgggtaatgtggtccaccctccctcccaggcaacaaactgcttgaggctggcagctcctgtttctgaagactgatgcagcccttgaaggtcaacctgctggagcaaaaaacttgggacttgaatttgtagctccatttacatggatccattgccccagctactggagtatagcctacaatgtttatttcagtcaatattcctttatctgggtgttctgtacaatgtttattacagtcaatattccttcatctggatgttctgtgaagatagccatgtttatgggggtcttagttttcaaactctggcaactctgtgaaaaataggagcaaactagagagccctggagattggtggtagggaagggaggatagcaggaagtttgaaaaattagcagccccggggcctaaaggaatcagctgtcatcattttcatcattattattttggttaggatggcttgaaaatcagaacgtatcttggtttacgtaattgaggtcttaaagaactaagaacagttaaatagtcacaactatcaaaaaaaaaaaaaaaaaaaaaaaaaaaaaa

SEQ ID NO: 25443 - DNA, 1183 bp, Homo Sapiens
gagagtagcgcgggagctgagaagttgcagggttgagttggtcccggcaagtccttgagcagtttgttcctctgtcttcccgcttcctggtgccccgactgcgtccccacgaacgccccgtccttaccgccggctgctgtggagtgcctcgctgtctcccaggtccccgagttcctggtttcagagaagatgaccgaagaagtggatttcctgggacaggactctgatgggggtagtgaggaagtggtcctaactcctgcagagctcattgaaagattggagcaggcctggatgaatgaaaagtttgcccctgagctgctggagagcaagcctgagattgtagaatgtgtcatggaacagctggagcacatggaagaaaatctcaggagagccaaaagggaggacctgaaggtcagcatccaccaaatggagatggagaggatccgctacgtcctcagcagctacttgcggtgtcgcctcatgaagatagagaagtttttccctcatgtccttgagaaggaaaaaacacgtcctgagggggagccttccagcctctcgccggaagagttggcctttgccagagagttcatggcgaacacagagtcctatctgaaaaatgtcgccttgaagcacatgccccctaacttacagaaggtggacctctttcgggcagttcccaaaccagatctagattcttacgtgtttctgagagtgagagaacgacaagaaaacatactggtagaaccagacacagatgagcagagggactacgtgattgacctggagaagggctcacagcacttgatccgatacaaaaccattgcacctctggttgcatctggagctgtccagctaatttaaaactaggcataaacagccaggcatggtgactcaggcctgtaatcccagcactttgggaggccgaggcgggcggatcatgaggtcaggagttcgagaccaaccgaccaacatggtgaaaccccatctttactgaaaatacaaaataattagccgggtgttggtggtgtgcacctgtaatcccggctactcggggggccggggcaggagaatcgcttgaacctgggagcaggaggttgcagtgagccgaggtcgtgccattgcactccagcctgggtgacagtgagactttgtcacaaaaaaaaaaaaaaaaaaaaaaaaaaaa

SEQ ID NO: 25444 - DNA, 1339 bp, Homo Sapiens
gaaggttctgggcggggctggactgttctaagtgagttcgggtgggggagcttcacgaggggaggctgctctgtgaaggaaccgcctttctctccgcgtgtctcacccttttctccccatatctgtttggacatgagctgagggcacggtcgcgggcggtcagccctgttcgcagctacggcgaggaggggcgcgattgttccttgttgccgctccgcttagtggccgcgtccattccgcgcggtgtcccgattttaggggtagggagaagtgtcagcttcaggcatcgcgaggcgtggcggccccatggccccgctgggaggcgccccgcggctggtactgctgttcagcggcaagaggaaatccgggaaggacttcgtgaccgaggcgctgcagagcagacttggagctgatgtctgtgctgtcctccggctctctggtccactcaaggaacagtatgctcaggagcatggcttgaacttccagagactcctggacaccagcacctacaaggaggcctttcggaaggacatgatccgctggggagaggagaaacgccaggctgacccaggcttcttttgcaggaagattgtggagggcatctcccagcccatctggctggtgagtgacacacggagagtgtctgacatccagtggtttcgggaggcctatggggccgtgacgcagacggtccgcgttgtagcgttggagcagagccgacagcagcggggctgggtgttcacgccaggggtggacgatgctgagtcagaatgtggcctggacaacttcggggactttgactgggtcatcgagaaccatggagttgaacagcgcctggaggagcagttggagaacctgatagaatttatccgctccagactttagtcactaggttctaggagtgagctggggcctgctgaggtgggggtggggctgactctgcaaaatgggggtgtcccccgatcctggccgaggtgaggaacagacagggggggtctagattctgagggggttggtggatattgggcaaggcaggaaacctctggagacctcattttctccatggggaagacagccatgctcttcaggaggagactccaagggcaaaggagggtgtcttggctgtgcttgaaggcgaaaccctgccatatccccagtgccagtcccctcagcctgtggtggccttgcatcctgactggatgttctcagccccttgttctgggcaagaacccagagctccccagtgtggatactaataaacctcttggagcacactctcaaaacaaaaaaaaaaaaaaaaaaaaaaaaaaaaaaaaaaaaaaaaaaaaaaaacctcggg
